United States Patent Application Publication US 2014/0057251 A1 - sequence listing, part 73

SEQ ID NO: 114193 - DNA, 5754 bp, Cannabis sativa
  modified_base (71)..(74): a, c, t, g, unknown or other
  modified_base (5378)..(5385): a, c, t, g, unknown or other
  modified_base (5660)..(5664): a, c, t, g, unknown or other
  modified_base (5725)..(5728): a, c, t, g, unknown or other
atgatttggtagatttcaaagtatggtaacatgatttagtacataaacaacagtaaaattgaatgaaattnnnnaaaagtctttaaatctaacaatctgaatagttcaatgagaattttaaacgataaaaaaagtttaggaaaatacaatttaatacatgtcaaattcgacggataaattgtaattagcctatatttatttataaggttagttttgggagaaaagacttcttttcttcgaactcgaccatcatattcttttttttaagggaactcggctatcatattcagaccgcacccacattattttataaagttacccattttcatttaacaaaaaaagaaaaagacatattgctttctcttttaattgggggccaaaattcttacaacaaaaatatctttggcatccttcactttctggctattactctcaatagactccacgtgacaattttttattgacacaaatattttcaaaaccaacaaaaatttgaaattttgacacaaaatactatatttatttttaaaattttacatttatgatatttataccatattttttttttttccactatttttttaggctaaggagaaagccgcactaagcaaagaaagaactgaaggcatggtgcaggcttcgtcaccgatccaataggtatctttatctatccttagcactttctttgccaagttgtggactacagacctacgaacgtagttaatcttagtgcttagatagagggaaagaagtgtcctaagcagagaaatgagatctccaaaaatgctgaaatgatccaatttagtattcaaagcatcgattatattcttgtagtctgtttctatgaagtgaattggaaaatcttcactaagaaactactttagagaaataattaagacttttgcttcttgaatacgggattctccggtgccaatgtaggggacagctatagtagtgactgtatccctgttactattacgaaggatacccgcgaaacccgacttgttatttcgagagtcgatagctgcatcagtagaaagtttagccaatcccgaatgagggggggtctagacttcaagggcctttgggcaagcaatttgagttccttggagggcatgatgtgcttctcttgcttgggagtaatcattaagcaacgatcttgctttgtccaggagggaatgatggccatcttttttatcgggaagcatacactataaccccgttagcttgcattagaacacatcctagaccctgtctggatgcatcacaatatgacaaacctttcttggtctgatggcaaggctaacactggagctatgattaaccactacttcaattcttgaaaactcgcttcacacttatcggaccatacaaaccgttggttcttcttagtcaactccgccagtggcattaaaattttagagaatcctccaacaaaacgtcgataataccttgccaacccaagaaaccttcgtacttcagtaactattcttggcctcaaccaatttttaactgactgagtctttctcagatcaaccatattttcatctttcctgacaatatgcccaaggaaggacactttcgacaaccgaaattcacactttttaaacattgcatacagcttgtgatccctgagttgttccaataccatttggagatgctgctcatgctcctcttctgtctatgagtatacaaggatgtcatcgataaacactataacacagctatcgaggaaatccttgaatactatattcatgagatccataaaggtcattggagcatttgttaacctgaatgacatcaccaagaactcgtaatgaccatacctagtccaaaatgcggtcttcgaaatatcctcctcctaagttctcaattaatgataattggatcgcaagtcaatctttgaaaacacaatcttcccctggagttgatcgaacaaatcattaatcctcgataatggatacttgttcttaattgtcagcttgtttaattctcggtaatcaatgcacattcagagggatccatccttctttttcacaaataaaactggagctccctagggcgatacgatgggtcgggtaaatcctaagtccagcatcccctgaagctgtatttttagctccttaagttctgtcagagccatcctctatggtgcttttgaaacaggttctgtcctatgtgccaaatcagttacaaagtctatctttcgctatggtggcaatcccagtaactcctcatgaaaaatattaagaaattgtgttacaactttgacatcctcagacccaaatgtttcaggtctgctggactcaattacattcgctaaaaatcctacataaccactgtgtaataaatctttacccttcaaaactgaaataattgggattcgagacccctaaacagttccaacataaacaaatggatcttcgccctccgtctgaaaggttaccatcttccacttctagtcaatactggctgaatacttggacagaaagtctattttaagtataatatcaaactttgttaattccagctctactaagtcaacactcaactccctattttcaatcctaactggcatagacctaatccacctttttggtgataacaaattctctactaggcagtagggtcccaaaccctcttataatgaaaccataaggcctaccaaattaattaattactcttgacaccacatatgggtgtgtagccctagagtcaaatagtatagcaaaataagagttgttgacaagaagctaacctgtgactacaaaaggactggctgcagcatcaacttgagtgataccaaacactcgagtaggtttgggctttgcctcttacttctgctcttctttcttgtctgggggcaatctttcttaaaatgctcaaccatgtgcccgaccatgccacactggaagcatgttttccaattgcattcttttgatatggtgctccctacaacgtgggcactcaaggtaagaataactccaacgtccacctctgccctggatcccccagaaccttttattctgtcccgaacctccagatgtcagaatagtctttcttttttgatcagcggtggaatcaccgccatccctaccatatccaggagtaggaagagtggtggttccaccaacacttggagtctcacggggctcctgaagaaattttactactctctcggctcgaagagccttccccaccatcttagcataggtcgttgtgtcactcgtagtaattatcagattgtgcttaatcttggcatttaaacccgtcagatacttctccttcttattgaagtccgtaggtactataccggaagccaacttggctagacagtcaaacttcattgtatattctgttatcgacatgccttctccctaaactaaatcagtgaattttttccgcttagcactgcagattgcctcgttataatacttagcattaaactcttcccaggtcatggtagtgacatctcaggtgagggacattaattcccaccacacaagtgcatcttcctggaactagaaagtggtgcaagtcactcggtcattcccaactactctcatgaaattcaaaattctttctataacagtgagccagtgctcggccttcataacatccgagcctcccaggaaaactagaggtgcttgtttacaaaatctctcatacaaaggttccatacggttgccagtaacaggttgttctgctagcaccactagaaccatagcaattggcgcttgctgtggaggcactataggaggaccctactgtctcggcctctgaatctcttcatcttgctggagaattcaagcttgcatttccacaaacctttactcccaattcggaggagcttgaggtgagttttcatgtctaccaccttgaaacctttcacagcctctgccgcgtccacggggattcaggggattttgacctccccgaccgactccagtctcaaccatgttaccctgactcctcatatctcacggggcatcaatttaataggacttagcctgcgaacccataagtcaagtaggtcagacagcgatcatatatattctatgtaccgcattttatggattttaaggtaatgcatttaaacaattataaaatattatgctccctaacatgcttttctaatcacataaattactaaacaagtaaaggcttacaaaactatgagtcaagcttttctctgatgatgattgtacatgccttgacgatctttgatagacaaacctgacggctctgataccaaaaatgttaacgccttaatacgtaggggcgctatagtgatttttctaactatagtgccacctttgctaatcaaaggattttccttgaaaattatgccaaattaaatttttgataaaactttaatctttataaacatatatatatatttacataaaccgggatcgcgtgtttaaacttttacaatcaaagtcaaaatgtttttacggacatgtcgcattgcgactacaaaatacagcccaagtcgtctcgagaccgaacactccaggtcgcgccgtctcgacatatacaatcatcacttaagctcacaactcactcctattcagcctttgctttccttttacctactcatgaaaataatatctgtgagtcaacaaacttaataagaaaagtaaataacatattatatattaccgacttgtatttatgcgctcatacacctctccacaaggcttatcaaataagtaagaacgttctttactaagatacgaccactataccacatgcactacgtaccgctactgtatgagtgttggtagggtttaccccatacctcgagtacctctaagtgttataccacttagacgtgcctcttggaattcctctttgggtgtgtaccagtgttcatctggaaggtttggcttattccgtcattcagaaggctcggagccttccaaattcggctaagtcttgtccttggaggcgaggcttctgggccttagatgtgctcgaacccatctcttgtgacagagccttcttacgtggaagggctttggcccaggtgattctgcttgatcattaactataaatgccacgtgtcatccttccaaaaatatggataacattaactaaatgtgggaattggtaattttgctaccaaaatttggatttggggaattaattgctagcgaagtataagtttttttgggttttgctgcaatttatttcatttttatgtattaacttttaagtttagccctcttgcttcttatttttagtaacaaatattctttcaatgctgaaaatatacaatgaaaatttcattttttcaattactattatttattttttaatagatcccaataataatagtaattgaaaaaagggattttttttttatttttacnnnnnnnnatagttttttttttttttttacggaattatacatagaaactcctattgcaactaacgctgcaatctaaattgcaataaaaaatcgtatagaaacccctattgcaactagcactgcaactattttaaaatttgaaaaaaaaaaaaggttaaaaaaacaatatataggataatttctcttgaaaaaaatcactatatctatcccaattttttatcaaaacccaaagttgtatgagaatgtgccatgcatttgaattaggatttttgccccctgaacnnnnncatgtaccaaatcatgccctctgaacttttaaggtcattgaaaatgccccctgaactattnnnnttgttggatttaaggacttttttcta

SEQ ID NO: 114194 - DNA, 1228 bp, Cannabis sativa
  modified_base (1196)..(1201): a, c, t, g, unknown or other
ggcggaatccgccggtattaattaatgccggcggtctcctctattattaccggcgggtggctccgccggtaataccaatatttgttgtagtgagtgttaaaatactcaaagttacttaaaatacaagttttgtagctatatgttagttaccttaaaaaattaacttttcgggcgtagcacaaaatggactttttgcgttagtgataatataaaattaagagaaattacttcatatattattttttttaatctttttttttctaaatttacggtttgggtttctaaagtggttgcagcgctagttgcaataggggtttctatatgattttttttacaatttaggttgcaatgttagtacgcaatagggatttctatgtaaaatttcgcaaaaatacaaaaaaaattgttttgaagtgtaaaatgaaaaaagcccctaaaatcaatataatttgaaaattttactcaattgcgttaatttttaaaatgatgctaaatttttattaactgcatcaattaatgatgttattaataaagtcgattagcttcgggtatacgtaacactttatttaaaagaaaaaagactaactagtactattactacgacaaaaagagtattaaatcgacatgcatatcaacctattacgttggttacaacaaacgacgtatattctaccaaaaaaagtaaaaataagtaaaattttattcctaattttcatatatacctactcattttaagtataataacataaaactacttattcaaatcaaccaaattaaaatacgaattagttcaattagatattggattgtattggatttttagacgtcccatctaacattccaattggatattaaaaaataacatctcatctaattcgttcataattggatatctaatgtctagtgatcgtttatcattagatcggtctattataattgaattggattgatttaaatatactggtatttctaaccaaaattgtttaagtgactctaataattaattataataaactgaaaatcttagatagttttgatgttaaaataaaaaaagaaatataattttctttcaaaaaaaaataattttatgggaaaattatagaagaaagataaaattattagaaaaagaggaattaacctcttagtcaacctccacgtccgaaatcacatgtcgaaatattttttttcatagcggnnnnnnttatagttacagtatcatccctgtaaa

SEQ ID NO: 114195 - DNA, 2392 bp, Cannabis sativa
  modified_base (2359)..(2362): a, c, t, g, unknown or other
atactatgtttagtcacaaataatattttgttgtgacttaaagtcacatttagttacaaaaaaaaaaattatgttgtgactaaaaaattgtgattaaaactaacagttttttgtagtgataaatttacattggttaagctaaaacgtcttgatatgacatggttataacacaaaaactaaatgtatcatttaaatttatttattttggtatttttatttttgtagtttttaagacacaagtttacaaatagttactttatagaaaaattataagaaaaccaataaggtcattggttactataatgaagtaactggttaccgttcccatatttttaattttattttttattttaattctataaattaaataactttttctgaaactaaattatatttttgtgcccattgtataaaaactcataaaaaaatatataattttgtctttattttgtatcgttttaccatttcattgtgttatgagtcaataactgatagccataaacatatccttgaataatttaataatagaaaatgttaaggagtgtcttaatatactaaatattattaagagatggtatattattattaacgtattttaatattaattaaatctcgtatattttaatttaataattatatgaaaaattattaactgtggagcatattgagaaatgtcaaataatagtgacccctttcaataatttagtcaatagtcaacgtaatttgtaagtttggcaaccaccacatctgtttttttattcaattatgataaggagatagtcaagttttcaaacgtgaacatttaagatcggctaagctaattaccaaatcatatgccacttattattattattattattattattatataattggtttctactctcaattcttttatccaagtccaacccagccttcttcaaataaaaccagataataacctcaagcatttctctttaggtaatgtagatgtccaatcattaaaccaagacttagatgaaaataaggtagttattaatttctagcgagtggttcttgtgcttaggtcgaaaataaatccagaagcaataccatatataataatcatgagcaaattaatattgtaccaaccaattgtattcttttaacataatgagctaaatataaatatacaaattatatacaaattcataattgtataaagtattttggtgacgtgcctcattaatcaattcatacacaaaatatgaaaatgatgtatgttttatatatttctttctttgttttaatttttaagtttagctgttaataagcggaaaaaaaacttttaagtttagctttgtatttctttgtcttaaagaaaaaatttctctgatcttttccttcaattcattttatattagggattttttttcttcacgtttgctaatttactaaaatattttatctatgagaaatagctcacccagtaatgttttaataatgtacattacatttaaattagctttatcttcatcatcatagatctttgtaagagtgtagtattgttattaggtatcttaaaatatttaatgcattataaataataattagtaatttttatatgttatttattaaattaaaatgaacgagactattaatcttgtcaattttatcatttcaaaaaaaaaaaaatcaattttatggtggaagctctagcaatcaactttatttgtaaattgttttacaaataatatacaaaacagtattttttaaacattgcaaacgcggcacctcgctcgcacatacaatcattattaataattaagccaaaagtagtacaaatggagaacttcgtatacataggttgaatcactgtgtgggagtcttgactcaattaattggccccataaaacatatataagcataatattattttctcatccctttgtctgtgactttaataatttagtttagtatatttgagaatgatctatgatataaaagccggtgtttaaaaaagagaaagatacggatagtaatctggtcatcaattaacttatgatcgtgcatggcagcatgggattaatttatacaatctttgagtgtagactttcgagtacagagtatttgaatgtcaagccttcattatcgcaagaaaactttaacttgattaactgtatgatctataccatatataaatataaataatactttttttcttggtgaggatcgatataaaatatgtgaaaaataaaacattttattcaagccaattcggtagaaaaagtataaagatataagggtaaataccattttggataatgtgtttaaaagttatgaattggaccctatgttttgttaaatgacaaaatggatcctgtattttctaaaatagtannnntaggaccctgagcttaattttttacaactt

SEQ ID NO: 114196 - DNA, 5369 bp, Cannabis sativa
ccttttgttgccgagccacaacattagacacttcccttttcttcctaccaaacagtttagatgccctggtcaggaacctacataccataaactacgaattagctacgatcttttttataactaaagaaacaacatttcaagtactagcttactcagtagccctgacatgtccaagatgctctagtgtcccgagtgcctgtgtcaggatatcattttgccgctggacttgaatttttccctgagtaagctgctcatctaattgagcctaatgcacgcatatattcaagtacttactatatgaattatatatatattaactcattagtagaagtcaattaaggattaatatatacttactatcctctcagcaatgtccttgtcataatcagtgacaagttttgttctcttggttcgagatttgatccaaagaaggtggcatgggggatcttgaacatcgagatcctctttctacattattttataacaattaaatgagtacaaattacattttaaaggacataattagaattcaagcattacttaccacatcttcccgtatgttcaccattccactccgaccacttcaatgtctagattggatttttgacgaatgttccctttgcaccttaatcaattcctacaataccaaaaaatacattagatacatgtacttgaatttaagagtttatcttagtacaaatataattagcgtacctaaaattcaggagttagtcgactttcaacaaatttcaaccaatcattaaggccgatttcgggatgcttttaagggacttgtgccagttgttgcacatccttctcttcaattgcaagcattataatgtcttttgtcgtactattcttgaagtctttcattaatttcctagtaaggatcagaaaatcatgtttgagggaatcagacattataaaatccgtctagtttgaaggaaaactaacacaatcagagttaacatctgaattaatcaaaaacaaataaaaattctaacaaataactacttacctgtatatctgtccaaactttttttttcagtgtagggttgacttctttctaatttttataggacagtcctatcgtctgagggcatctaactccaaaagtcgatgttagcttggagtagcttttgccacagtattgtgctttgtcattcacatcgagggccactcttttgcattgatctattagcttagatatttcattcatttgagtacctcctcgtgtaggcatcaggctaggacactctgcatctgggtctgaatctgatcctgaacccgagttggccatatctacaccattaacaaacaaaatttaaagttagctatatataactagtaatctataataaatattaaatgcataaacaaacattatgtattcagcataaacaaacacaatataaagtaagctatattgtaacaaacaaacaaaacaatacaaaaattggtttgttctaattctaccaaaatttctgcagcataacggctatagttggatgttccaaaaaattttaaaagtacctaaattaacaaacaaaaaaaaaatataacaatagagaacaaataaaataacataaacaataaaaaatttatgcacctatccgactgcagtacatgtattcgcagaacttacttcactagggatgaatatttaagatattcaaactcaactaagcatgcattgataattaattgtaataacaaaaagttagtgaatggatatacttattgctattctgattaacaccaaaatatgtcggccctcaaatattagcacataacctataataaatgcaatatacaatcaaattagaattttaattattaaattagttactagttattaagaagtgtaacaagttactagttactaaattctgtagttaattttttttaaaaaaaaaaatatagacatatacatatataatcaattatatatcacactataaaattttaaaaactttaattctaaactaatgaaattcctactacctcattctcattcacaacaaatatatatacaaaataattacacaaaatatacaaatagtatatacacaatatatataaacacatattaaataataaaatacaaaatatatacatataaattatatatcaagttaataaatatttaccttataaacgcaatccggcaataaattgcgacaaaaatctgaccacctatagcacacacaatataatattaatacaatgaaaaaatcccaacaaattttacaaaaataaaataataccaatgtacataaataaaatgaatagaaagtatatttatacattaatggacattgagattcaacgttttttctactaaaatcggtggccggagttataccaccacctttttttataataggttcggtttcatatatagagggaaaaaaactgaactttttaaagtataggtttaggttttgaaaatagaagattttaagacaaaaatagggtaaaatggttaagaaatgagggagaatgaggttgttttagtggtggttagcgagggttttttcgtgggtttgggttgctatggctattgtgtttttcgtgctcaacaagttgtgaaatgaggaggatgaagctgggggtcatgatatataaccctattgcatcgattatttgttattaacgaaggccataggtgccacgtgtcgaaaaacggctgctcctatggcgttggttaataccaaataaccaacgcaataaggttaatctaaaaccactcattcaactcgaactcccaaccgacagcatagatatatataaattcaatacctatggtttttaccaaaaaaccgcccctaaatgtcaatgtgggtattttcacaccctttagcttccctttttataaaatgggttgaaaaaagggaagctaaaggcccatattgcagtagtgtgcctcagcaagatatattttacagcgtgtcttaatctacgtcagcattgaccctttaaaagtggttaaaatcacagctgtgagattttcaaataataaatgtatctatttacatggagcataatgaaggcccacaattttgaggaaatattcttgtgggattcaaatttgaatgtaattaactacaaacctatgttattataaataagggcaaattatctagaaaaagggacaaaacaatcttaagagaaaaagagaatacactgattgtaaagagcctagttctatatcagaaaaatctgaataagattgactcgtggattatgtataattaactgcaaaaccaagtaaaaacctggtgttatattcatttttgatgtttttctttgatctcttataatgtctctacaaaatcgattacgtaaatgggctcatattcgtttacgaaaatctactttaacagcttcctaccttctttcttccggtaaacattagtagcatgtcccatacctttgcaattggcacatataatgggcttccattcatatgtaaccaaaaaaactagtatcaaaaccaagctcatcttcaaactaaataagatcacgaaaatctcgtttgacaaagatttctatgagcactcatggaaaacttagtttatccttgagtttagtcactgaatccacctgtagaggcttccccaattgtcctacaatgttgagcaacgacctgtcacccctaatatttcaaatcaaaattagtaagttggattcaaattggaatcgttgtgacatcttctttttcaaaattagtattggggttctaaactttcataaccattcgtcttttattgaaaaagacatatcctccattaataacttcatttatatctttgatagaatcaaatctcactagaaatactccatatgatagcatccctactttgttagctttatctttccaaattcttctaacaaaactgttaagaattaaaagtggcgtagcaaacaattaaagattcccaaaagctacctcctcttttatatcttccattgtaatcttaacttttctatccttttcaaaattgaaggaattttctaaataatagcaccagaatccacgataggaggattagtaggattacctagtgagatacctcttagagcatttgttgattagtagtgaggaacgcattgaagtctgctcttatatcctcttgttgttgaatcgatctcatagcaactttggatgacaaaggttcaggaaacatatcagtgatagcttgctccacttcctgcttcgttctcgactcctgactctgagagcccgaatttgtctcctccaaaaaattatcttcatcatccgtgaaagctacagttccctagtatctctgccatatattttgtcttcctaacatctgcaatagatgtcagacctcgcttcttaggtttcttagcattcaaaattagcttcccctgacttctaggccttgtttttgctatagcaccaatcctagagctgaagcgagagagaaaaaactttttttccttttttctctttttttcttgtttttttttttctcaatactttaaataaatttatgatgttaaaatgcagaattttattattaattttgaattagtgaattttgatatttccattattaatttgaatcagttttaaactattttttttttcacatgaagacgtgtagctgctatgatttttcactaattttttaaaaatttaaaatgttaaatatcatattcaaacaatttatgattgtgcgcacatataaatattaaaacaagggaattagtcactactacaaaaaccaccttttgagacggtttcttagggattccagcatcggttttgacaaaattcgctaccgatgtttaggaaccgacgccatatatacccgaattttaattttttaaattttatttaatttttttaaattatatatttattaatttatatattatgttatttaatataaatttaaattacatatttatttctctaaaagttaaattaaatattatttaaattaattttcgaattggccaaaatacataatttcgtttcatagatgtaattaaatattacacaaatattgtaaaattactccaagtattaacaagttaataaatctaactacaagttaacctaaaaaaataacctagggaagaaaaaatcttgggcctttcaacatcaatcgtcatcgtgaatcaccgccatcaaccgttatatccattgtcgttgtattggtatcaattcagtttttagattgtattgtcgcttatccccaaaatgttaataaaaagaaaaattttatattagtttacatatatttatattatttgttattataataaatactataatcaataattaaaacttacaactttttgatcttgtatgtaatggttggggtttgcacgtg

SEQ ID NO: 114197 - DNA, 5332 bp, Cannabis sativa
  modified_base (47)..(59): a, c, t, g, unknown or other
  modified_base (580)..(588): a, c, t, g, unknown or other
  modified_base (5295)..(5306): a, c, t, g, unknown or other
tttgtcatttaacaaaacacagagtccaatctgtaacttttgcaaannnnnnnnnnnnnaatggtatttaccctatttaatattactatatacaattttaattacttgatgatattagtgattattatttttttaagaattttttaacattcttttatggtttttgatgaacttttgatttctatagttggctgcttataaaaatttgggcaaaattcaattttagttacgttaaatttttagaagatgggcgtctactttcaggtttgttctttttatcctctttgtattttgtaagaatatatcattaatatatgttagttgtttaagttttcataaagtaattaaataatattattacaagtatagtttcagttattaagcaattttatcagttatttgtaacaatatatcattaatatatgttagttgtttaattttggctaaatattattttggatcctgtattttgcaaaagttaccgattgaactctttgttatgttaaatgaaaaaatagaccctatattttccaaaatagtaaaaataggaccctcagctcaattttcaacaattttattnnnnnnnnnaaccaactttaagataatttctaatacgaacagatacaggaaatgtaaccagttttgtcataacatctctagatcgaattattattaagttttatttttacaaaaaatcacttcaaggtcctaattgtacaattcgagaaaatatagggtctattttgtcatttaacaaaagagagagtctaattgataatttttacaaaacatagggtctaaaattatatttacctttaattttttcttagattatttagtttcaaaatctatttattcgattgccaaatagaagcaagaattcagttaattggtacataactacagtcgttgtgggaacaatgtcacttactagtattacttgttaaaacaatatgtatacttgtgtgttggatttatcacatcaactttatttaaaaaataatataataatagagaatttttttgtgtaaccttttgtgttgtggttaaaataaaagagactacaacaccatatttggtgttggttgacgagtgaacatttgtacactcatcattgggcattatttagataaattattgtttatttcttaaaattttgtataaatttgatatgttttctattgtgcacagtattaagcacaaaataataaaattatgacaaattgggagtaaactgtagatatttgggtaaagtgctgaaattgagaagcaaacaaatcgaggaacaaataaagtgacaaaaaaaatagcctatggcgctatcgcatcatgagttaggcactatggtgccgtcttggaaggaaagaaaaaaaaaagatgattttcacattcattaattaggagaatctctcttggtgccatagcactgcccgtacacaattcaaattcttatctttttctataacatcattctttcatcttttctagcctataaaaagagcattataacttcggctccagtataactagagagagagagagaacacaactttaaagagagaaataaggctgagagatcaagaaatcaacctaaagctgcattcaagaattttcatctattatacttcttctttcttctttatttcctagttattattcagattctaaacaatattttgagatgaaccactatgtgtcactagttttcttagtttttagggtcaaatggatctctaattatgacttcgattttatgatttaatgcgaagtttagtttagttgaatatttttcatttgattaccttgtttaattgctgccatgattacgtgttatatattattctacttcatatgattatgattaaggctattatcttgattgtgagatttattacttgagaggggaactttgaagtagatcaacttaggtggtttgagatcgagtggtaagcattcactcaggtaaccaaaataattctaaattgtgaaattgagacatggtatattaatgattgttcctagagtgagacttaatgaaagtaaggtataagggtggtatagcaatataggctattatttacttacacattctttatgcgacactcgagagataaaaatttagaattaattataacagtaccaatttacttacacattctaaattgatccttgaattgttgatagtggtatagcaatatgtttgcattttttaaaataaagataaaaattgattttctttatgagtgaaaccctccccaactgacccctttctctgtctttctctctctatatatataacattgtggtttcaagtctaaatcttggtgattatggtggaattgaagagcgattttggtgtcgattgtggtaaagctcttcaagactaattaacgtagttgaaattttatttttgctattgtttgaattttgaatttttccttttaatgggagatttgcatgtgttgttgttggttgatcttgaagttgatctatatgttgattttaggatgcaattgggtattgttttgatgatttagactaagcttaatcttaatctttagactaccttttgttagtttctgactgtgagttggttaaagaaaatgatgtggttttcttggtttatttgctgaaattaagcatgaactttgtttagttcttttaagctagatttctgaaagatgtggatttgattatttttctatattagacatgtgttttatgttgtgagtaaactgtttaaacactttaattgtcatggaaaatcgaataccagattcttatatggtttggtttgcatttggtacatgttttgatttgagaaaaggagttttctgggtttttaagcccagtcgccacgaccagatatagggtcacctgttgaaagtcacgaggctcgaacccagaacagggatagcccctgttgaaagtctggtcacggcaagccttaatctagtcgcgaccagaaggcagggacagttcagtttttgctgttttattttgagcataacttttgactccgaactccgatttggacgttctttatattgttggccaaagctcgttttgagctctactgcttggtctaatgtttgagtcttaaatatgaatatttatgaaaggttatttgggattaaccctattatgtaaaacccaggattgtgactaggaataccgacacttggtcaagatcacctatgaatcaggatttctcctcaattgttagaaattcggtaagacggtgaattatgcacatagagtatagcgtggtggtacaattatatgtgattaataagataaaaagcatgaattagggttattaccctaagtttatgtattgtaagtgggggttactaccttaagtatatatgttgtgaattagggttattacccttactatatttattgtgaactaagattattaccctaagtatgtaaacatggtgaattagggttactattatgtattgtcataaacatgcaataatgtattaagtgaataaatattaaaggttatgcagttaaagaatggcttgtgaataactcataaatattatattatatggatagttagatggtattctattgagtaagtaaacaacaatttttaccatgtaattctaataagataatagaaggttggactgaaaagccgaggcatgggccacattaaggatgtgtaggtgcttcctttgtacaacaacattttttgttggggcttcatacacaagacttgtaatgtgtttttgttggtgtaaaaattgtttagtgtgagttccttagcattttcacttctaacaaatttattattgattttgtattgaaaattgacaagagtgaaatttttatttaattatgaatggggcatctgacttagcccgaagaaagtaaatccaagtatatcatccacaatagtgagaaagtatctataacttttaatagaaggtattagataaggtccctaaatatccaagtaaataaaatcaaatatagcattagaaaaattattatgagatgtaaatatgataatttcttttgcttggccaaatgacaagttggacaatcaaaaggaaaatagatatcatgggaaaaatataatttttgatttattttattagtgatgagtacaaaagaatgaccaaggcaagtgtgaaatcggtttttatctaaatgaacattacaagaaactgaatcagaaattatagaatttgtttcttgttgcaggtaatagaggttgccaaaatgtttagctacctcaatcctcaatgtttgagaagttccctgaatgtagaaatcattagaggtaaaaaacgtgatgttggacctgtcatttaataaggcataagaagttaaacttgaattgaggtacaaagagaatatttgtaaggatcaatttagaattaattacaacagtaccaattttttgaatgttaatcaaagtgccacttggtaaagtaaaggatttagcatgagaattatgtgtgaaagtgttgaaatcttacatcacagcaaacatggagagtaacaccactatcaacaattcaaggattgaaagaatgatgattgatattaccaaaaaaaatggttgactgcaagcgcaacattggatgtggaatcatctgtgatgggctacaaccgttgagtcaacatggaaatgagttgctgacattgagctggagtaaattgagattgaggaatatcaactgtgaaatcagtgacttgcagtgtttgagatggattacgattgtttggactaggatcgtttggactaggatctggtttttgattagtggtgctaggagtgtcattgggtcttctattgccatagccaggagaaaccatgcaaaaagtagcacttatctttgtaatggccttatttttgacaatgagaacacatgagacgatgttctttattttgtgcaacaacaacacaaaagtaaggtatccgagggcacaattggttgatttcgccccacattgtaatgagtttggtgagaacccattgaatcatcaccttgaagatagtttagggtttcattaagctcaaagaactttgaaccatttccttgattaaaattattgtgcaatacaatctacatttcgacagcagtatcaaggtacatgatattactcttgatctcaggtgatagtggagtatccaagatataaccatttagttacatctagtctaagaatttaataggatcactagaagggggttgaggtaaagtatcttcaagaaacaaagtcttgtttgtggtgccatggtatgtgttcatccgatccaatccgcannnnnnnnnnnnaacaacatccaatccgcactaagtgc

SEQ ID NO: 114198 - DNA, 2129 bp, Cannabis sativa
  modified_base (32)..(62): a, c, t, g, unknown or other
tttagaaagttcttatttaggatgttaataannnnnnnnnnnnnnnnnnnnnnnnnnnnnnnaaaataatttccaacagtaaggtcacagtagagacacttgacgagagacttgaagaaggcagtgttaagagtgtttcagcatcagtcaataggcgtggttgtgggatggttgtagtgtttaagcgagggatggttgaagtaagtttggtacgagcaaggcgagtcaacaaaggccacacatttccttttgaaaagtcagtccggtatttgtcataccccgttgtaggaagcttcgctcttttcatccaaggaccgtaagggagatcatcatcgttaccatggtccatacgttccatgaatttgatacacttctcaaatggatgtccaagcaaaccacactcaaaacaaaactccggtagatgctcatatcggaagtcaatccaaaactcatctctaacttttggtaggctaatcattcggccacgaggaagtggcttattgatcaataatttcacccggatccgaagaaaaggaccccaaccttcatcaagggaatcctcatagacatccaagaactcaccaataaggtttcccaatgcttttgcaagagtcttggacttgcttaagaagggtaatcgatagatttgaacccaaaatggagtaaaaatcagatcatttattgagacattctgcagagcacttggggtgtacatcacaataagatgattttgaaagtgcctcggttttttgttcatcactaaaaatttatcaccggcacaactaaaagaaaccttgaacatgtcctccttgtagacagaaatcacagcaggaaagcgacctttccaatgtcccgacatttgatcaatgaaagtcggtttatggacataagattcagtgagaacccgtgctttgaacaggtgttcagaatgctgggtaaaggtagcagcaacctcctcaaacagggtaaaaatagagccctcatcttctgttaaggacagagtggtgttgaaggcattcgcaatggatcaatggcagaaaagcagcaaagagaacagaggggctatcggggaaacagggatcgattctcagggagatggtggcaagggcggttgaaggtggagtaaaccagaaaactggaaaaaaggggggaaaaaagtttgaaacgaaggaaagttagttaaaaagaaaaataaggtagttataaggcatgactgcaacagaccaaaaaggcacaataaattcttgacatattagaaaaaattacatttaccaaaaaaaattttaaatataaaaaaataccataagagagtgacaaacatataaatatcatatttttgtagctttattatcaaattccatatttaatataattttcacacgtatataatagttgttgtttcgtctatcctttataaatatattttaatatataaaaaaactccaaactaatttattaattacatcaaattcaaataacaaagtataatatcatttaattttatcttaatcctttcaactatcaccccacttacatttaatcctctaaacttaaattttaacggtaaaactcttcaaattaataaactactaacaaatttaaagtatcatttattttttacaattaattgtcaatatagactacttatgtgtacacttttgtacatatgtcacattgatattgttacacctaatattattatttaaaaaagggtaaatggcggaaaaactcccaaaacttttattttggtttcacttaacccccaaaacctaaatttgtgcggtaaaacctccaatactcgtattcagttagcaatttgacatttccgtccattttaggtgttaagtgccatgttggactggacacagtgtacacgtaacataattttattggtccatgaaaaaaaatatttaaaaaaattaaaaaattaaaaaaaattaatttgaaattaaaaaaatataaataaaaaataaattttcttttttctttctttctttttcttttcttttcttcctttttctgtttatcttcgctctatcactctctcgaacaggtgaaggtggtgacttagcttcagtcactgaagctgatctcattgcctttaagctttcaagtgcttcttccttcac

SEQ ID NO: 114199 - DNA, 2361 bp, Cannabis sativa
  modified_base (2327)..(2328): a, c, t, g, unknown or other
tggtaaaataagttccaacaggatggtggtctgcatcccagtcagagcttctattacccagttagagtctcctttagaagctcccacttcaaccaatagttttttggttagaacatcacgcatatctctcaatcttccaagtggatcatggactttggtcgacttgggtcttgtagttgtgtcctgaccacggggtcgtgaaggcaactctggtgatatttttgaaatgaactacggatcgtctcggaatgatgcactccagaagcagtgatcaagagcgttttagtgacacttccctcaaagtagtctttagctaaatcacaattacggagagagttgaattggtttctcaggcttaattcctccccatacacttgagggatgtactcatactgaaggccatcaaggccacaggcaaagtaatggcacaacttacacctttcatctcgaaagtattttcaagaattaagcggctcattggtccttactcgtcggatcttatagcctccgacttcaaagtaaatccttttccccttgcagggtcttgaggcctcgagtcatgagagcattgggaggacttggtggagaagtcctattggttctctcagtgtcctgaggccattctacatcaggtggagggcccattggttggttcccattagtttaagtcctttcgggatcttgctcgaaggtagtttccctccgagaggtccaagcacctggtgttttcttagtgcttggatggttaccaggtgaggtagttggtattgcatgcattgagggtttccccttgagcactagttcccacgtgaccagttggttgaccgggagtctctctcaccaactaagaaaggcccttacggggggtaattccacgactagaatgataggcttctcttatttgttaagacaagttagctctttgttgctcctgctcaactcaatgactctagatgtttcactagttttccacgaaccaatgttgaaaccatttgtgttgactgtcgagagagtctcgcaactattgttgtaaatcagccacgatttgggtgagttattcacaccgaagattagcctccttagggtcttctagctccatgtgtggctctccagttccagtaccgagatcattcggtgaccttaggggaagagttgtggatctagttctggggcttcctccttgcatgtgaggtgtaggagtagtcctggttctagcttcagtaactagagtgcccccagttgtttgggcagatgatagggtgcctctatcgatgcttgatgaacgtgttgcaaccatctcgaaaagtaactttcttgagttgtggctctcaatgaaagtaccaaaatgttgactcaaaaatttggacagagattcttgagccacacccgctttctagattggcgagaatgaaatatttgttaagtataaataaagagagacacaataatttatagtagttcactccatgtatcacgacagtaatggagttacgtctacttcaagtttttatttctcacgagatggtagttaaaaaaatggctaattttttcagctcaaatttctatggagagaaactagagagaggtgctctggccttatggttacttttctgaatatgagaaataagctaaaggagctctccttttaaaggtgaaggatatccttgaaattggaaaaataattcaaaatatgaaaaaaaaaaactaaattgactaattttgaccatagatgatgattcagtcatcaaaattaacttttaaggttgatagtcaattttctgagcttggctcgcgacggcgggaccgctctaggtaaaccgaatcttatttttgtaactaccttaagggtaaaatttgtagttgataaatttataatttcaattaaaacgtgagagatgacataatatatcattgaattagcttcaaaatgcaagttgaatcacgttaatcggattaatatgttgtgagttatagccattttacaaaaggttattctgggcccaatgcctaggttaacatcccagcaccgaagttgacatatgacatcaacctagatggtgggtgagtaggaaaatgtcctgggaagtatttttttatgcctaagtgatattttgacatcacttagtctattcctgtgttctggcgaagctagtcacaagttctcagagatgtcgttgttttgtggaaaagagagctcgaaactcttcattttcgagtggtttcccatgttggaaattagaaatgcaaagttgtgaattttacttctctaacttcatggatcttagtttttgtgaataaccagacaaactgtaaagcccgcttagttnntttggaaattagcagttgtttatgattaattat

SEQ ID NO: 114200 - DNA, 6075 bp, Cannabis sativa
  modified_base (42)..(50): a, c, t, g, unknown or other
  modified_base (5720)..(5725): a, c, t, g, unknown or other
  modified_base (6013)..(6024): a, c, t, g, unknown or other
ttgattataaagttattatatttttttttaataaaacattannnnnnnnntaaattttacatcaaaattttgcaattgtgcattgaagcacaaagttaaaatttggtgtaaatttctacaaaactattttttgtgctaaatataacacaatttttaaattttttatatctcccattggagatgatcttattacacgtttaaggtttattgatttttgttgtaataaatattatatatttctgttaaaataattattatataatacactattgttgatcatattgttttttttttaaaaaaaaagtttaaatagataaaaagttttaaaaaaaaattacaaaaatacatcaatacagaaatttttcatttttactcttttaattttttgaattacaaaaaacttattcagtaaaaataatgaaccgttttttttagttgttttatagtttatttatagttgtattattgttgtcatgaagttagttttggttatttatagcttatttatagttgtcgtgaggttgatttttcgttgtttttttagaaagttttactttttgcggagcaaaatgtatttttataattttaaacctttacaaatatatttttgtaattaaaattttaagtcttaaaattgtaaatagaacataaaataatgatatttttgaaaaaaaatatatattttagggtaaatataatagttaggaaaataattatggtaaaagaatattacgcccattgcccattaaaattattaatatgaagtttaatttgaatattgataaaagtggtgggttaaataatattattttaagactataatagaatttaaaaaattagataaatattatgtttgatgtgatttaaaaagaatggatttttacattatatattgaaaattttcaatttttttacttttttatcgtggggtagaatttttttttcaaaaatactatatttttcttcaaaaatactgtatttttctttaaaaatactgtataagttttatactgtgtactgtgttaagttttcacggttgttccatggttatttttcagttgtttcactattgttttaattgttctgtttagttgttttacaattgttttataaaaagacatcatttttgaaaaaaaaaatcgtatgacagtaaaattataaattttttaccaaaatttaacatttttgtaaacatccctaaaaagaatgacaacccattttattttccttattaaaataataattgtgttttgtcattagtttgaaaattcacaacattatcatttaatagtgtgctaatttattttttttatatctacttattttataggtagttttggtccaattagttacttacatctaatgtctcgtgaaagtgatttcaagtagttttgtctaaatttttgagataatttgttcttatataagtcgttttgtttttatagtgactcctattatgacggtatatttttggttagacaattaatttattgactgaattccctacgtcgataactgtgatagtgtgatttaaatctttctctaaccaaaaaaaagaaaaaataaaggggtaaactaatggtgagagggtaaatcactaatttcttaatgttcaaaacaacaaatggaagtgaatgtttttctcttttaattgttttttattagtcgaatttttttagtgattttgggttcttacttggattgggggagagaggagtagtggaaaacagaagacagacatcttatgttatggacccgagattgtttattaaactataatgtataaaataaacgcataagtccggtcctgctgacataatttcctgtcccctgcaaaaaccacagaacattttcccataaatacaagctaagctcactttaataagtactcggaacctgtttttagtgcttgcttctcttctctcctctgctctcgagctcaccacttgggtcgtttttccaaaaagttaaaatcaaacccaaaaatacttgacagaagaaaaaggttagagccgttgctgttgcctggtgctgagagaataataacgttactagtactatactacaatcttgctacaaagaagaaccagagtagagtgtgtttttgagtgtgagaaagagaaagagaaagagaaagacccaatggggagagagttcaggcttggctttgtgctctcactgttgcttcttgtactattgggtttgtgccatttttctttgatttttatttcttactactctttgatgtgtttgtggagattggaaagttttcagttttggtttctctctttgcagatctttgtttttaagtgaatagtataacaatgtcggtgcttttatttaccatagatatatgtttctgtttattttacttttcttgtttttggctcattatttttaagagaggtattgaatcaatacccatgtaaaacaaggtagggaaactagtgagaaatcattattgattgtcttctaggggtctcttccttttaaatttgttccaaaagacttgatcttttgtatttaatgaactaattaatgacccaaattgacttgaatacatgagtacattactttaaggttcaaattacacttgggttttaagagaatgtaattgcagagttttatccttctcagttggtagattggaccatgttgccatcataaactgtgtttccttaaagtttgatcatgtaaatgtgatatgtttaactaggttgtttgctatgcaatgtttaccaactttattctgttaattaagaaagaccttctctacaaaactaagagaaactcctagtttatatatgatttgtgtaggcaacatagtaagttttatgattttaataaactttttgttggcagacggctgcagcggaagttatgttggagtttgctatggaagaaatgctgatgatcttcctgtaccggacaaggcagctgagcttgttaaacttcataacataaagtatgtgaggatatatgactctaatgttcaagtcctcaaggcttttgccaacactggaattgaactaatgattggagtccccaattcggacttgctatcgttctctcagttccaaaccaatgcagacacttggcttaagaacaatatccttccttattatccagctacaaagattacatacattactgttggtgctgaagttactgagagccctggtaatgtttctgctttagttgtccctgccatgaaaaatgtacttacagcccttaaaaaggccggtctgcacaagaagattagagtctcaagcactcattcccttggagttttgtctagatcgttccctccttccgcgggggcttttaatagtagccatgcttatttcctcaaaccattgctggaatttcttgcagaaaatggttctccattcatgattaatatttatccttactatgcttatagagattcagctagcaatatctctctagattatgcattgtttgagtcttcctctgaagtaattgatccaaatactggtttgttgtacacaaacatgtttgatgctcagattgatgctctctactatgcactcatggctttgaatttcaaaacaatcaaagttatggtcacagaaacaggctggccttccaaaggatctcctaaggagacggctgctactcctgataatgctcaaacttacaataccaatctcattcgccatgtcataaacaatactggtactcctgcaaagactggagaggagcttgatgtgtatatattttcattgttcaatgagaataggaaacccggattggaatctgaaagaaactggggattattttatccagaccagactagtgtctataacctagatttcactggaaaaggctctgtggatgtagctacagggtctaattctaccagttcaaatggaacaaatacttggtgcatcgcctcaaacaagtcctctgaaatggacttgcagagcgcactggactgggcttgtggttctggaaatgtggactgtacagctatccagcctagccagccttgttatgagccagataatctggcatctcatgcttcttatgcatttaacagctactaccaacaaaatggggctagcgaaatagcttgcagctttggaggtgctgggattagagttgacaaggacccaagtatgtaaacactttgcttttattttattcttgtttaggtatcagaaatattgcaaaaaaagaaactaacacatcaaactagttgctaaggcaataatctgtgaaaacgacatgaaaaaccagaagttttaagcagcttattttatttgatatagtctagttaaagctttaacttatctaactgtgaaatgtgccatacttgaaaatcttctcttgactcacataagttcatgtttcaaaaatgcaggctatgacagttgtctctacatgactgctgggtaagcttataaacatgagacaactttagcttcaaaagtttgggttctcaataccataatgccaatctaaaattgcttctcttgttctgttattcttatgcaggagcaacaaaactattgcaagtaatacaactgcaattgcttcgaaatctttgtcaacccgaaacgattttcctgcatggttttctacattctttctggctaccttcatcacagttctcttgggagtcaaccatgtctgaagagagtttgatattgaagaaacaattatattttgccccattaacgcaacgattgagaagatgttaagaacagttaatggtttgagaatctttgtatgataatgaagacaactgacaaaaaccatccaaggtataaagataacagtatgtatacctcttggacatatggttgtggctcccttgcatattagtatctttaaattttttccccctttaagctttgaaaattgttttatatttttcaactaagttaaaggccgaaggggaatttgggactttgggagttcatattgtagccattttccaggccgaagaatcaaaaaacgtattttggtccatgttggaaattgaactctagtatgaagaaagaggtctttttttttccctttttttattaatttttttaggagatttttttcttcatttttacttggccattaatttctcattcattaatttctttcgtaatcaatatgcaaatttattgttctgcattgtgtctaaattttttattgttttttttttctgaaacaagaaccttctactactacaaccaccactggtgtacctttaaaatgtatagattttaagggtataatgtttcatgtaatatagtaataaagatgtccttaatgtgatgtttttttttaacttgatagtgtaaattccgttgttttgttttgtttagatcaaatgtacatgatggaatatcttccatgtagtatcgtttccatatgaaatacatgtttagttaaaggatggttgctcttttaactttattatcatagattgtaacttgtgtgcccataatttggataattgggctattgcggcctggcctttaatgtaatcctgttttctttcttcaataaaatcgtagcttttaagaagatatgcagcacttgaactaacaatacctataaagtataaagtaagtgttataccgaaattcaaaacagtgaaattaaaacgaattaccgatagaataatttggtcgagtcgcggacagtgtcgctctctttaagacgtttcgcagctctgctcgaagtgtgcacggcannnnnncaaccacggcgtccccagaataaagcaacctctgtataagtacgatacgttccatcgaactgtatcgctctataacaccctaaaatttgctctgagaaaaatcgtaaggaagaaaaaaaagaatttttaatgttggaaaagatgtgttcttacgttgttctgatacgacttatatagaagtcgatccaagaaaaaacagtaatgttatcgttagtggaggagttggatcgtgggagtaaaaactgttggaaaaaattaatataaaccccaagatcaatttgtatatannnnnnnnnnnnataataatatataataattatgtatgcgtacctaattaatccatagcaatt

SEQ ID NO: 114201 - DNA, 835 bp, Cannabis sativa
ggataaacacttccttgacaaatgtctttagatattcagaacttatcagtcatgtgccagaaggagaatattcaaagatggctccatttcgcatactgagttttgacattgaatgtgctggtcgtaaaggtcattttcccgagcctggccatgatcctgttatccaggttgcgcatgttcatatctattgtagttaatataaaatttactggctttcatcttttgtttttattttttatattgaccattctttatatatgcgaatggataactgatattgctcttttatttgtagattgcaaatctgttaacattacagggaaatactgagccattagtccgtaatgtcatgacccttaagtcatgttctccaattgttggtgtcgacgtgatgtcctttgatacagaaagagaagtcttgctagcttggagggtattagtttttaatcgcttttctttttatgaaaatgaaaagtgtttgttaatactgtttaagtgcatttgttataaatctgttctcaatatttatatcttattttacatattttaagagattttcatttaggttctttttcgttttgctcttacggtaggagctctagcttcagaaaactatttctcttgccatagtgaagcatgtgtgtctatatgcttgtacaaaggaaaagaaatgcttatgcattctaaattgtgaatttataactatgagagcaatatgcactatcattcatgctgtttaatcatattggttaacactttaagcaagtaaataatgtaaacatcagggtagcgtttggttggaggtaatgaaatggaatggaatggaaaggaaata

SEQ ID NO: 114202 - DNA, 3641 bp, Cannabis sativa
  modified_base (3582)..(3593): a, c, t, g, unknown or other
aaacaacatacttgtgagtagatgtaagatcctggtaaaataaaattcccacacaaaagagaaaatcttgcggagctaatagaaatatctattagtgggtgtaaaatccaaagttcatatatattttacttgcacaaataaagagtaatcaatggagaatatcaatgccataacacttcaaagtgggtcacaacttgaatcaccaccacgtcaagaagtttatgatttgatttcaagtcatggagtcaacaattcatcccttgcaagatcatctctactagaggttgaatctcctactttagttggtacaccatcattgaaaaagacatacaaactaattataccaacttatatcactcctccaccgtttccaagttgattaaaaaaatttgagaaagaggagtccatcaaggagatccctgaaactcatcctaaaattgaggtaaaaaatgaatttcatgtcttaatggaattaaagaagagcctcattgtgccaagtttcttaaggacttatgtccgagtaagaaaaaattgaaaggtgatgaggaaataagtgtgggagaggatgtttctgctgttttttaaaaaatgttgctacatgagtgtaaggatcttgggacatttacaattcaatacacaattgataaaatcaggtttgatcattgcatgatagatttaggatcaattattaatatgatatcttattctaattttacttctttaaatcttggtccattaaaaaaaactaagtttttattcaattgactaataagactattgcttatctcccatggatagttaaagatatttttgtgtaggctaaaagacttgtcacttcaggtgattcctacataattgagatggaagatgaaagtgatcacaatcctacatcaattctatttaaaatacctttcttactcactgcgagtaagaagttggatatgaaagcataatacttacaatagaaattgatggtaaagcactcaaattcaatgtgttagatttcattaataagtatataatgagtctttgttagaagacccagcgtgaagaccatatgtggtacaccatgcagttgagctaacgatgttaaacaaagcaaatttataggagtttttcttaccattttctttttattttgcattgattttatttgattaaaccttgaggacaatgcttatattaagtattgggggagaataattgtggtgtctatcatattttattttattttagtttagtttagtttatttattttgatgaggtttaataaagttttgttgaaagcattggtcgatgatgaaactttgaattgtgctttaagtgatgttaaatgataacgaattgcatgtgatttgtatgtttgactcctatgtgaatcactatttttgatttatgctatatttcactttatgcacgattgaattcaccactgaaatgttttgaaaaaaattcatgcttcttaaaataaattagagttattgatgtccctaccactctaaaaacctttgattagttttctgaggctaaataataagtacacatgattaaaaaaatgattaaagtaattctttagatcatttgaacttttttagtctacctttgtaattattatttcttaattttctatatttgagccataagaacggttacttttcttgtgtaacccaaaatccttaacccatctctcattcaaagaataaaattgatgtatgctttggtgtgatttacgcttaaatatatttttctcatctacccttagccttagttttatattacaagcttaaaaagactttataatttttttttttaattatgtgcttatattaatggagaatgatattgattaatatctatggagtggattccttttactgaaaactatattttgctatatagggactcttttaaaagagaataatttggcaagtataggtcaattttgatatattctagttggtgttgtgattatatgcttattaaattatttttgaaaattaaatttttaattccatgtagggttaaaattctaaagagcatgaaaatctgacttgtgttggcattacttagttgtgtgattctcatagaaaatcaagctttcgataagacctttgtttagttattttagattaatttatattatcgtgatttttaattttgagtctttgttatttaaatagtttgctaagtgactagcaaaatttaagtgtgaggaaatttcataagtgtatatttgtctattaagttgtgttattttctctcattattgttattctattaactctttgaacctttgattagtgtaattttaattctttaagattttgaaaggctaatcatgtatttagagtattttggaataattttagaatactttggtgaaaaagatcaattttacagagctcaattttacaaggaaaaaatggatttgaagctgaacatggaagttgtagatctcgttctcagcttttcacaacatctttaatcgtctaatttcgagttgtattgaaggagttatggccaaaatactaattttgaagacgcgacagaaatttttcagtagggagctctcgctgcagcgagcgtgttgtggccgcatggagcctaaagctttgccgtagcaagcgtgcaattggaaatttaaaatttttctctaggaggctctcgctgaaacgagcataaaccttccccaaggcaagagtacgcttccgaaattttaaattttatttttaatttaaatcaaaggacttttatgggatataaataagacttttaagttttattttttgggactacattcttgagagagaaactcatagaaagtggaaaagaaaaaaattgcataaccaattgttcatcattttagttcttttattctcctatctctttactttttaattatgattttgattatgatgaattagtgtagagtaggttttttttttaattaattattatttcaaaaccctaaagtataattttttgattcgtgaaaataaatgttgttcttaatttttcttatattaaattgtttatatttttctatttgaatgttatgaatattgtgaattatgtacaattaattaaaataattattttagtattgataattattaaaataataaaataattattttaggtgtacaactaatattgtgaatttgtgttacaatataaaatattaaactaattgaattttagtattgataagatgtcacttcaagtgatgataaaattaggaagattctaactcaaaaaagtaatagacaataaataaagtaattcatggtagtgaaagatttatctcctcagatctatcagtattgctacggggcatcaaagtgtctagtatttctatgacatatcgtcttataattagttagctttattaaaataaaataagtagtatttgatattaaattgtccaataataatattacactttatacgggtgctaagcaccatgagtaccctttagcaattttacacatctatttgttgtagatactattacatatgtgctcctttaagatactattgaattgtaatgaccgctttagtaatttggattagtaaaggcannnnnnnnnnnnttttattattttattattatttgggaatttatttaattgtggacccca

SEQ ID NO: 114203 - DNA, 1483 bp, Cannabis sativa
attggattttgaggtctaattggattggatcagatgatgatttttcaaatctaattactaattgaattagattaaatgagaaaaaaaatattgcatttgatcggatgaccacccctacctatgagagtgagtagagcccataaaacaaattgtcgtttccttgtttcttaactttttccgaacgctccttaattgcttccattgaccgtttgcccattaagatttggcctttgccttctctctccctctcactctctttctaacataaatttctcatttaccctttcttctctttctctattaattctttttttttctttccctgggaaactattatattttccaagaaaaacttaaagaaaatctataaaagaaagaagacatgtttgattttggggacgatttgacaatacaaagttacagaatcccatggctgatatgggtccagctcttggtgatgttactccttatccttctaatctactgctttttcgctttagattccaccgacaatatcgccgccatatctgcttcttcgtcttcttctcagttagtttccgatgatacccagatgaataagccctttccgaagcatcatacagttaccactgttatttcaaatcgtttgcagaatacccaggtgagaaaatgttgggggaacaaagatattaattagctattttatcgactgttagttgcaatttttagttttcagttttgattggtgttattgaaagcattataataggatcggaattaagattatctctcttcccagttcagtcacggaggttcttttcatttcgaaagctattgcatagatatgatgggtcagattagtttacctttctcttcattgtttaaattatgtgtagagttgtagtttatggtagtcttgaactccacgctacgcaatcgttttgaaaaggattttacaccattttagagatattgctatctattataataagttagtcttgtattactcttgtaacgtttgcagaaatattgtgaacaagatgattcaaactgtaaggtttgacttttagttaaaaagaaaaatcaacttctaaaaaaataaacaaataaattccattctagaaaattgtcttatttaaggaaattttggcattgaatcacaagtgttaaagcaagaaataactgtatcttaaaatggaacaagtgttataaagtcgtgtactttttatgaagatcatttggtaattcatgaatgcttgattaaatggctcacccattcttttctttatcttcttttaataagatcatagttatttcacttttagcttcaatttccaactagattgagtaattagtaagtagtctctgttcaaaattatttcttagtttggtaaagccaaggttcttacaccactgttcaaaacattggtggagcaggggccaggtcttacccttataatagagaattcggttaaagcctatttaaagcaaaatcaatactttt

SEQ ID NO: 114204 - DNA, 2204 bp, Cannabis sativa
acaatctcaatagttcagggggaattttcaacggcaaaaaaagttcaggggaaaaaattactatttagcctttcttttttggtgtagcgtaatagtattacaatcaactaataacttaggagttttgagatcgaatccatgtcctctctttttcccatccctctctcactactaaagtaaccttagtagcttgtcaacccggtatttcaatccttacaaaaataaattaaataaataaaagacctcatatttcattctttcttaaccgttcctaaacacattaggagtttttttcctctatttttattttggtgttccttacagttacaattactttgagtgcactttaaaagttataaataattacagtattaacaaacatgcaccctaaaaactaattgaaatttttctaaaagtttatagaaaattgtcgtaattataataaatgccaccgtgaaaaaaattttaacgataaatactcccacatatatttttgagacaaaatggataaaaaaaattgaaataagttgtaaatattaaaatttctgtccaatatggaggaactaccatatcatgccaagccaacttttaattatggttgcatttttttcatttgtatactaactctgtctcaaacgaatggaaagatatcctccttctggaactagacacccttcaccaatggagactccgaggcaaagtgggagtcagagaagcgaaagagatactcgaaaccatgagccaaagaataagggacgctcacaacgaaacatttcaccccaatatacaaatagattgagggataattgtgcagcaagccagatgtcaatatcacagacaagaaagcgttttaccttagtaaccgcaaacccctagttacgtggacaattatcagtccgaaagtaatctccaaccaggtctgtaagcaaattacaattaggtactcaggcgtataaggaagctgactttaaggactagatggataagagaagacctaatttgagggtgtacatgaatcagaatgctcctgacctaagagaaatttgaaccgaagtcccccacctactccacataataatcctgatccagcacaagacaaaagtagggagttggaaggaaagtttcgtgtgttaaaaaaagcataaaccatcaaatttccactcaaacgaacagttcaatctttcaaaaatgaaaaaaaaaacaaacaaatacaaaacaatatgaattctttagtttgtttgattgtttcccaccttaccagtaccttaaagagagaagaatgttattctaacatacatcctttcagttaccattttatattttttgttggagaagagttttaattacaactttttaattaattttcacacccaaaatcatatgttgaaataatttttttaaaatattttttataacggtatccgttataattacagtatcatttttgtaagtttttgaaaaatttcgaatagtttacaatactgaaaaataaagttcttaatattccagtttactacgcgtgtttaaaaaaatatcaaatgtatttttgatacggtaaactattcgaaatttttcaaaaaattataaaaaaatgatactgtaagcttaacgaacagcgcaaagctgatgattttcgctctcaagtggatttgggttgggtcgttctttgaagaatggccgcctgttcgccatgattgtatgcaaagctgatgatttttccatcgtcacggcacatcgatgtcctctctcttttttaaaaaaaacgaataccgttatgaaaaaaaatagggaaattaccctatatactattttttttaacttttttttcaaatttacggtttgagtttccaaagtagttgcagcgctaattgcaataggagtttctacacgattttttgttacaatttaagttgcagcgctagttgcaataagaatttctatgtaaaatttcgtaaaaatgcaaaaacaaaactattttgaagtgtaaaaatgaaaaaacacaaaaaaaaaatattctattatttattttcaaacacaaaaattaactaaaaattgtaataaaaagttatggtagtactcatctcttttagaagggaaatttgcggcaaaagtccccaaaaggttcacgttgatgctgattagtccccaaggtccgaaaatagcggcaatagtcctcaagttcacactttttatttgtccgttgg

SEQ ID NO: 114205 - DNA, 2086 bp, Cannabis sativa
tttcccttttccctctattggggagtttacaatgaataacacatttgggctacctcatgaagtccagcccatgaaggagaggatatgttgactaggcagatcagatttggttggatttagtcaacaccatgtactatgattatggcaattaactatgaattaattgcttggtatctattttaggaagtttccccatttagcttgatacgatcctttgtcgagatttggcaaaccattatttccttatttgggcataggaataaaaagggaaattgggcccatcttttgagaacacgatgtcttaaccttccagcctcacggtactagacctactttcgaacatgagctatcaatggtagaaggttctgcaatcagggagctgaattgcgttcttggaaggacctgtccaagtgggcttgccctactttatcttctatgggccttggatgctgacctggattccacatgtctactgccggaattgtggataatatttaccccaagcttccaaaatgctacatatggtggaagcttgcgtcactccttcagtgcgaacatgtagaggatgaaaggataatatcatgactttccaggtgttaatcgatcacagaaggtgacttgcatatttgattgtggtatatccacgtgtcagtcgcatggtggtggaaggatgtgaccattgaggagttgctttctagaaacgactttattattttgatagttattcactaatttggcgcaaaaattaaaaattggcatcttcatcattgattggtgtctcgattttggagagcattaattgtgaagatgtgcgtggatctttgaactctccaacctttggatgaagcttgtgtttctggaggttggatcttggaccattcaccttttttcacgtggattactttttgagtataaataccctttacaacttccagttaccatttttttctaattttcaaatttttaacccttcaaagcttgaagctttctcttcacccttcaaaaccaagaactaaacttagagccaagttttcttcttcaatctagaatacgttgtcaattttgcattcaccttctattgaggattcgagtacaagagttttcacattgtcaaacccaagtgatagtgagttttacgccaaaagaaagcgcaaacctagattttgacgtagaagttgacttgttgatctcccagcatctcgctttcgtgaaatgtgtgattgacttcctcaacctaacccagcatcgattagcttgatatctccacttttgttattaggtatgttgcttcttagtctctagattgtattttctgagtttgtcgtcatatgttatacttgcatattcttttctaagatgagattagggtttttctgtgtgattaccgtcgtaagtagattcaggcaccatgagccataatgtttttagaattccctattagaaattcttggaatcgatcgttttgcagcagatgtgctggaaaaatttctcacgcccaaaattcttttggtttttggtttttggtttttcattgatctttgttctactcttcctctctattattcctgacttcctatctggaatgaatgactcctgaaagtttttgtttctggatagttagtttgtttggaacctctccaagcaatttatggggtaggacttccctgctccctttttatactaggtagttagggtggctaactgcttagattctcttcttttgtacagaaatcatgcttaagagggtccatcaagacaaggctaacttggaagaggaaatcttggagcgagaaagttctttaaagtttgtcttgaacgataatccatgggagatggactagcatgttaataaagtcaagatttacaataatctgaggcagtatgaaacccaatgggggtttcaaagtgttccaagactattctagaatagactctttgttcaaagggagatgttcagtaagtacgcagaaggaggctttgacatttggagttgggctcacatcgagatgggtgtgcatcttcccctgaggtgttacttgttggattttgtgccctaaataaaaccctttacaatctgattagttat

SEQ ID NO: 114206 - DNA, 1702 bp, Cannabis sativa
aaaagcggctctcaacagccagcaccactggcttcaaatctagaagttgcttttaaggctccatgcatggaggccatgcccacttccatcatcgacctaacagaacctgtcctagtcgtgaaaccattgaggcaaggtcctatggagaacactggaggggatagttctaattacaatgggctagccgtgatcaacaaaaagcgcactagttcatctaatggtggcaccaacaagaaggcgagggtggaggccaaggagaaggtcttgcaggtggtagccttaaggaggtagggctcaaaaactcagtcccaaaggggatctgatacatctgatggcagaaggccgcctaagcaaagcaccagaacatccaaggacaatcaagatcctcctctaccacccctagcgcctaaggttattccatccaccttcacccaactctctagagaaaggattaaactacctccattgcctccgccacctttcactcttcttgtcaagcctttgttgttgacggaaggagataatgcacgcctagaagtcatcgaacaattctattagaagaggcgtggcagtgagtatgaagagatgaagaagttgaccaacaatatctcctccgtatgtaatgttgagtttattaattatgacaaatggaaagaagcatgccttcctcttgtgaacagagttgagatgacagagaagcactgtcctcgagttgggctaatttgttgccattcttggttgacctattggaacaaagtgccactacaagttgtaggcttagtgctgataggtttgccataatggaaagtagggatccaatgtacgtattcgacgctatgaggacccaagttaacacgataagtttaacttaataaaaacttcgtatttttccattgttttaattcacttatgtttcctctttcacaagttggcttgatggcagaaaggaattgctccttggtcattcaactggcctatgatttggaggtgctgagggcggagcatgccaatgctgagctgaggtgaaaggaagtagccaatgctttagatatgctaagatggaagctactataaagcaaagagtgtttgactctttggacaaggccctgacccgtgaaaggaaggcgaccaagatagagagggatcatggagacatgtacaaggacttgcactccaccgctcttaccaaaatcaaagacttggaagctaacttgaagcaggccaagctggatgttcaggagaaagacaaaaatatcaccaccttatctgtggagtacgacagaaaggctcaaattatccaggataaatacatcaatgaaactactctagagagaaaggtgaagcaccatttggacaacagaaggagaaggtagctgaggcagaagctattaagagggctaaggaggctgagactaaacttaatgcatttgtgagggcttgtgaagaatcccaaaaaaagattaccgaagtagagggttaaaacttagatttaaagggacgtcttcaattggccatctcaaaaaaataggagcaagaagcccaacacaccaaggctctggaacaggcgtttatctactcagtgtttactctttggtagcataacaaatctgtaatagatctcttcaatgccaaaaataaggaagatttgatgctcaagatcttggcactagaggaggtagacagatcggaagagcggttcagc

SEQ ID NO: 114207 - DNA, 2043 bp, Cannabis sativa
atttttgtaagtttcccatttaattcactattcaagcccaaaaaatattaattatataaaaaaaaaaggtcctgttaaaaataaaaaaaatggtaattttaaaaattaaattttatttcagctcataaattaaacattcgggcttaacccgacccgaaacccggcgcatccgtacacccgaaaaccgagttcgattgtgcatttccaagactcaaagcccgaaaacccgaactcgaaaccccgaaaaccggacccgtgtgcacccctaattagtcccaatgatctttttcatttcaaactttgtcgatgtcattcttgagtagagttcttgaaatctttaaactgttcttaaattcttgaagcaccttcaaccaaattctaataccacttgttatgatccgaatcacctcagaacaacacaataagaactcataattccaagatcaaaaattacttaaaccgaacaacaaagcataccaaattgacaaacaatgagaatcaaacttgaattgaaaagcactagagacacatcacaccagagggaagattaaattgtgtttgctttattaatttttaatatgaactgagctacaattacaaaactaaaacagagagcaaaacttaagaactaataaaagaacataattacatcggttctcacatgaggtgttggtgattaaacacacaccaaacctttaacatccttcctaattaatctcattattaactaagttgagagtgaatgagaaaaaaacactcccttatataggaaacggtcaaggccgagataccctattcacttggataagtgagttggcagtagtgtgtaactaacataactattactagttataaatggtaactggtgagttgtaactaaattcaacaatttttaacatattacccttaaaaaaaaaagaaatttacacaaagtattatttttagtaaatttattacacttttacgttcaaatatataatatttatatttttacgacgtcttataaaaataatattaaaataaaaaaaaaatactacgtaacagaataataacatcaaaacaacataaaaataatatacaaattaataacaaaaaactaacaataaaacaacaatacaataacaagaatacaacataaaaataacatgaaaacataaaattataaaaatatttaaaattctgtaaaattatatttttatattttatataaatatttatgaaatttccaaaaaaaaaaaatcactagttccaactaaaaaaataaaatactgcaatatcacatgttcttgagttttatcaaattaaaaaaaatatcgtgaaaatactattttttaaatactattgtgtattgaaaaatatctaagaacataacaaatatctactattattttattaattttttacataaaagaaacatgtgacaaaaatgctattaatactattatttagttgactgagcaaaaaaaaatactggtgaaaatatctaagaatatctgttattatattatttatttatttctagattttttagataaagaaggcatttggaaagctaccataaaaattggatttaagtataattgtaaataattatataatttgactgtttgactacataattaacaataattatttaatttttaataaaaaaaaataattatttaattgaaggattttaattacactttttaattttcatacttcataaaatttaagtgtaattacattttgtaattactacaaattttctttaaatattaactattaaaaattattaattttcaattataattactaataattttgctaaataaaatgttaagaatttataaatacatctcatattaaaacacatattattagtgtcactattatcttgtttaagtaattacactacttaataattacatatacttttcaacccatccaaaaaaatatcaataataataggctaaatcatgtcccatgaacttttttagccgttaaaaattcatcttgaattattgaaattgttagatttaaaaatttttgtctaattttatt

SEQ ID NO: 114208 - DNA, 3225 bp, Cannabis sativa
ttccctgtggttcgacctcacttgagtgagatactacttgattgcgtacacttgcgtaataaacataaaattcgtaacacctgtctcccatactgattgcacgcacgacctccgagaatactagttctattcttctagatttcctactaatagggtgccgtctcttcgtctaagttttcatcttccaagtattctaattatttatcttgaattttgtctacttctgattttattatgtttttatagtcccactaacgcgcctgatttgcaacagagcttcctccccagagcactatgactgaggggatagtcaaaaaataagctcaatacagggccttcaccgaagaactgtttaaggttgggaacctagtgatgactaaactcctctgcagatctagtttgattacaaaattgcaaagcattgacacactcagcctgcaaggacaacgccaacccccaaggaagtaaaggaggatgttgccaataacttggctattataatcaccaaagcggccaaaaacgacaataccttgaactctagctagatgtctttccatctcgatcctctatttgatgaagaagagattttgaagaggtttgccgccacgtagcccgatgtggggacttttaggaaccagtacttcaggaagaggtaatagacccttctgcatcctctgtacccccagtttgagtcgcatgttctggagggatcatggaggatttgacaaatatttcttaggcataaattgccgtagataccccatgaaggattctatagacaaagtagaccacatagttaggagccctagaaatccaggaaaaccttcagacattattaaagtggaccctttcatggctatgcctctaccaaattttaaggagtatgtcagcttccttggtcatgagagcatagctacttttgttcgtgggcaatcctataacacctcactgaatggttgcacccacgcacaagtctctttagtagatttatctctctgttgctcctatatatatttttattggaatgactataattttcttttttactcactcatattgttgctacgtgtgtagatactctaaagtttgagatgttgatatctctgagcaaccagatcacaattgctctagacaaagctaggagctcccaagaaggaggcaaagggaataccatgactagggctttcaggaactggaagctgcattctccatcaacttcttcatcattagatgtctgagagattgctcctcctgttaaggctggacccgcagttccaggctctttggctctggctgggggagagagggactttgccacctcccaggaggcttccaaagttcctattgctctgggagaacatgccttaaaggatgtttcccatatggaaggaatgatccctgatactaccaccgaacatagggggttctgatgatagcctagatggactcgtctttcccccaaaagaaactcccatagagtctaagcccaagggaccaaaaacttcttcaagcctaagtgagaaaaggatcaagtctttaaccccaaactatgggacatctagtacacaatcaaccactccaccaccattataacaacaacaacaacatcaccaaatgtcgcaacagtagcaaccacagcaacaacaacaaccacaaaaacaacaacaaccacaacaatgacatcaccaactacaacaacaacaacaataacaaccaccacaacagcaacaataacaagaaacaaaacaaccacagctataacagcaacaaaagaaaaacaatcaaagtaaacgtagctactatagtaacaactaaccttgtccctcggccagttgtaaattgtgtcatcacagtccgctacacacccatctttgtctcccacgttctaacatctccctaggagcttgactcctaggtctgcccccaccaaccaatctaagcacacgacttttggtaagattcctccgttgggtttttctttcctcatgaggccttccgttctaggctatgactaccttaccaagataggtgagcctgctggaccttgaaaaggtgccatgagcgggagcaagtgattcttcaaaagcagactactcgactgtcttccatcaagattgttgagattgtggagggaattcgccaaccttcctcgtgtagcccagtgttgaatattgccacagtgagccaaaccttggtgcctaaggtgggtaaagccattgctccctatgccgcagagatgttggatagcatgagaaaacttacgtctgaaaagtgggttgtaagcaacagtcttgattcgtacactctatcaatggccactaaataacaagcggtatgggtaagtcttagccctctaaacagtacttcctcttggtaaaatctttaattattgaaggttgcatgactattttctgttattttcttttttagatttctttgttcacggagaggactgccaaagaagttggtaatattaccattgaactgagccaactttgcgccaaagtccaatccttgacaacaggggccttacgtgaaaaagttaagcaagttaggacctaggctgccttcaacatcaaaaagaccaggaagactatgatgccaagttggtttttaatgagaaggaaatagaaaccaagcactgaaagctatacttagactgcaagccccaagctaaggaaaatgccgaggagattgtgagctcccttcaagagagcttaggtaaggtcaagaaggaactccatctttctcaagaggggaaggacaaagctaaggccagggtggtactccagtctgtaactatatacccaaatccaataaggcagtactctccaagcggacatctaatgaaaagacctatctagggccttcgtgataattacgaaaaagtgaagaagcaaaaaaagacctcctagatggtattttaggtcagttgaaccatcatatggtgtcacgcgaggctccttgaaatgggtggaagtggttccatttgaatttcccttgagaaaggggactccttgtcaaattcatcatcctttgatgtcgtagccatccttcaacgtagatcttgcatctctgcttctatctctttcattctctttttcactctttcttgagagttggtgaacagaacttggattttcctaacaatttgcatggagcccgtaggtagtacttgtaacatccccgcttcaagcctcaattgggtccttacacccacagaat

SEQ ID NO: 114209 - DNA, 3725 bp, Cannabis sativa
attattattatttgactaagtcattggtctctgaaatgatataagaaagtgatgttaagatagtgagccatcaggtttgacttgccttttttttactattattattaattttattcctttaaagcaggggtactcaaaactccaattaaaaaggaaaatgaatattggattattacatctatgtaatttaattgaattggtttttattcttgcacatttatcaaattactaaaattttatgtaattgctaagtttaatttaaacacaacaaatcgagatgtgttctttcaaaaaaaaaaaaaaaatcgagatgtgtgaccgaatacataagcttctttatctataaaattattattgtaatttatagggaaattattccatatattattttttttacttttttttaaaaaaaaaaattacggttaggatttttaaagtggttgcagcgctagttgcaataaaagtttctatacgattttttgttgcaatttaagttgtaacgctagttgcaataagggtttttatatagaatttcgtaaaaatgtaaaaaaaaaattgttttgaagtgtaaaaataaaaaagaccctaatttatatcatattttatgtacatcttgtaaccaataaattttgaaattcaatattaaattacaatgttccattaagtgatgttgaacaagtagtttgtagcgttagaaaatgttattataattttggtgtgattaaatttatataaaaaaaatcaaatatttaaaaaaagtatttttagttaaaaaaatatatattattttaaaaaatgaaaccaaaaattatagctttaaatttttttttcaaaagttatataaataaagctatgtctcctttatgcatttttagaaaatgagttataaatacataattttatgctgcattaggataatgggtatgttttcttcatttgacttttcatctcgttatttatattgttttatgaacttgagattttttagtagggtttttttaacctggttggagctaaagtattaggcgatttttaggatctttataattttggattttatttctagtttaaaaaagaaaaatgaatctgtttgatccatatcctgaaaatcctgaatttttttatcacaaaattcgcttttctttcacgttaccctttaaccaaactccaaaatccctaaaacaaaactcaaagataatgatgtgaaaattcttgaacatattgagagattaaatagactatatgtttctgctcgatttagacgattcataaatgaaataaccaagggtaaacattcttatatgtgaaaagttgtctggcttaagcctattcatcttactaaaaaccctttgaccaaacatttgtttttaccttttgttaacattacttttttcaccaggtactttaaattttcaaatcatggcccctcccgaaattcgcaaacctaaactgcctcaagatcccacagtacaattcaaggtcgaatttttcgaatcgaaattaacctctatagctccgtacgtcaggccttttttataaccatgtggcattaaaaaaggtgacgactttgtatgtcgatcggttgaaaaagaagagaagagtggctttccacctggttgccttacaaatgactcggagtgtagtatgagtgcttttgtaaaaattggggcttggagtgctgaacacatacatgttggggctattcttcctctgaaaaaagctacttcaaagacttttgtgactatgttagaatttctgcactctaactaattcgtaatggatataggggtttggcttctcttagaaccttatatcgcatggtgggatgggatggttccgggccttagcagatcacttgtatgtataccctcaaggcgacccccgcgaggaaaaattattttggaggctttttcaacctcgaaatttacacgagtgatcgcaaaattatcattgacctccataataataaggaatttatggaccaattcttctagacaataatacttcatccttgttcatatataactttttaaaaacctcgtaagattcataattcactttctttatctgtcatgtgctgatttccttgcatttgtatcaatctcacccccttttttcttttaacaacgatgatgctaaaagctaccccattcaaaatggtgtcgtgacgtcaccaaattttagtgaatttatcattcggaataagggcattaagctttctcctctgtgaaccaaacttagtagcttgtggactgcttggaaagaatcaatcgacaatggttgtcaaagaacaaaaaaaaatttcctggtcattggtaagggtccccctaaggaagaagatcaatttcgtgttgcacgagctgcatttatcaaagccaacatttctcgagaagctgcccaaactcttgaaggggctccccgaggtacaataaattatttttatggatggtccctaactgttctcaaggctgaacaaaattttctgatagccaatacaacttttttatttgaaaattgtgttgatatcatcgtccataggtttgatagttggtactccaaataccatatccaagttactgtcaataactcgtattatggtatcccggaccattataactcaaatgcgtactgggtaaaaacttagaattttagcccaattaacacattagatatttgtgaaattacttactttagggagtatattaatactcgagctggcccactctcaactaactttttagatagtagcctaggtgagactttttcgatttttcttttgtgtggtttacttattttatttccaactttactcattttttatttattgattttgtagaaatggtgaacttcgcaaaacttctccagagcctaactaaccttcttgtgaagagaagaaagaaacaaaacaagaaagatggagatgaaatctcagattcaagtgtagttctcaaaaaacaaaagtctaatcctccttctgaaaccattcccaaggatcgaaaccctttgcttgctaaaaaccttcctgattccagctcgtaacaaatttttaatgtggaagcggctctcaaaaaacttgaaaaaggaaaggaaatccttaatgctaaaaaaatcattattttttatgcttcgaagcccgaagttcatctccttgactcaactcttcacttggatccttcagctggcattgcaggagcaaaacttatttctgagcatcttaccagacaagctcgtttcttccatagtttggagaaaggtgattggggatcgctcagtcataggaacatctccgagcttatggatagaagtgagagcttaatgtagatggtaaggttcttctttttccattttttttgacaaaatgatgtaatatccattctgttttttattcgtaggaagttttaatccttgtctttttccttaaaattcaggcttctctaatggttcgcaagagcttttctttgcatactcaacattcttctcgtattaaccatcttttgcaatagtataaggatcagaagtacacttttgttatcaagcgaaattctacttttgagaggatctctctctttgaaaaggaaaatctcaacttgaagactctcaaatctaaagcaacccttgtgataactcttgggtaaagagttatttgatatcactttaagcattttttttatgtaattgtgtgtcatttaagttatgtttgtctcttaatttgtgaaagtttcagt

SEQ ID NO: 114210 - DNA, 2904 bp, Cannabis sativa
tctcttttctcatttgttgactcattctttcatggttacttttctctgaattctcatcaatctctatatcattatgatcctctatgtataaaggaggaagtgaacgagaagttggtgcccaagctctagcccctgtagcggtaacatccttaaacaactcatccagcttgaaagaatattctaagcctttcactcgaaatttagcagcatcaggatacttatgttgattgatttattaatcaaaaaataaaataatataattgttatatatataaaatcataattataagaggtatgtacaaaaacctacttgtaacttttcctcccaccattcattaagagcatcaactatttgcctttgcgtgttccatccaagtctaatatctcctctaagtaatgaatcccacagatgccactcctttttaacattatcccaataatttttcatttattttcgatcataatttctacctgtctttaaattaaattttattaaatttttgcaacctaattttcttaaatgtgatccatttctattgccaactctcaactaaatcaatccatttctcatatgctgttgaatcccaaactgcttttgattttccttgtgtaacctaagtttccattctattttaaaataatatgagaattatgaacaaacacaaaataatacgttatattattctattcaaaaggggaaatttaacaatttatgctaaaaaaacaaacatggtgttattttatgctaccaaaacacgcattggttaattattctttagtttcaatttgttccaaaaatacccccctcatttcaatcccccaatctctctaacttccttctttctcctctctcttccattctcggtttcaatctcaccactctctcctatctgtcgaactggaccctcattttcaccaccgcaccattcgaaccaccccatccagtcgacccacgaacccagtcgatgtcgaccctcacgaacccagaacccactcgaccctcacgaacccagaacccattcgacccacaatcgacccacgagacccaaaaactcgatcccaatcgacccacgagacctagtcgacccagtctccgttggccgtcgtccccaccgccgtccacgaacactcgaaccaggtatggcttcccttaattttttttaatttatcctttaaatttagaatctgtgatataaatgaaacatgttgtttattaaagtttggatttgcaagtttttgtgtttggagaagaatctaggctagggctttggtttttctggattttgggtttttgtgcgattttatgcgatgaatttgcgatattgtgcgatgcttagcagtactgtaggatctttttttgtgattttgtgcgattttgtatgatttttgtgcgatgtgaggatgtggttaagattttggggattttgagcgattttatgcgatttattttgtgattttgtgcgacataacactagttagatttgtgtctggaaaattatgcgatgtttttcaattcttgtataatatttgtgcgattacatctggaccattttgtgccttcgcaatttttgcgattaatgtacaatttttgtgtgatttataattaataagaatttttgtttgtaattgcagatggctccagaacttatactccccttggctaagcattttttaggccatatcacgtacagaggaaacatgtactttgcttcaataaaggctaagtttgaagcatttaacttgactgagagggtgaaggaaactccctttggagttttttggaatgcttatgatctgaaattctctggggtgattgtgcatcaacagctgttgaggaaaaagaaagtcagtgaggtcaaaaatgatgaagtgtggttttacgtgggtaaaaccgaagccagatttgggcggtctgagtttggtttgatcaccgacctaaagatgagcggtggcccctcgacagaagaattgagtagactatgtgagtttaatcggatactacgggactacctcagtaattccaaaaggctcactttcaaaaccctttggctagcttttgaggcgtgcaatgtggccgacgacgtgtacaagctggggctgtgtgcatttgttgaaggtgtgctactatcaagggctgagggtgtttatatatggatggatatgctgaagctagtagaaaacgtagagaagttcttcaagtatccgtggggcctcctttcttatcagaagttgttgtcatccacaactaaaagtatgagtgacatgaggaagaactacattgataaggtctctactaaggataagacgaagaagaaagggaagaaggagaaaaaatttactcaaccagaggcaaaggacaatgtctatggatatgcaccgacgttgcaatactgggccttcgaggtgatgcaagatttggggaagaagtatgggcagtgcggagggactagattctctcaaatgttgaattggagtacccccgattcggttacgaaacatgatatgaagaaacatgatgtggctacactatttgagaaaagggtatatcaatcttactttctttgtttttattttttggtatttattttgctaaattgttattttctacgattttatgcaattttaatgcgatgtttgtgcgatttttagatgtttttgtttgctaatctgttatgttatgtgagtttatgcgattttcatgcgacatttgtgcgattcagagtttttgattagctgaactgttattttatgcgagttttatgcgatctttgcacgacttttcttgttttttactaatctgttatttttgcgatattgagcgatgtttatgcaattttcgtgcgattttaagtggttatttttgttgggttttgtgccctaaataaaaccctttacaatctgatt

SEQ ID NO: 114211 - DNA, 1537 bp, Cannabis sativa
  modified_base (43)..(52): a, c, t, g, unknown or other
  modified_base (1442)..(1442): a, c, t, g, unknown or other
tgtctctttattgatatttaaaagatagagattacattgaaannnnnnnnnntttagggcataaagcccaacagttaagtagtatcagaagaacataagtttagatccctttataatttcatacaaagtaataaagtatctttattgagatacattaaagattacattcatacatactttattaagatgaactaacattatggaaatatagttaaccacttacattaaatcaatattgattacgtccttaagattaccagtaagttgtaacatgaaaaatcttaattattacttccattaattgaagtcataggatacatcatatatatgatgtattatagagtcttataccaggccttatagttaataattctatatccagaccattaataaaatttagcgacaaattcaactaaagtatttatggctaagaactataagagttatggtggaagctatttagccataaagaggtgtgacaagtggtcattaagcacgcaatattaaattaggtgatcgtaatatctttgactaaagttatgccacaagcataaattaaaggattataaaataaagatgggattcagttttcccttatacagttttccattgtacaacaaattatttaatgaaactctaattttgatattttctcatatttatgtgcaccttaattttatctgagaaaattatctttagatgaccagaataaacataaggtttagaatttatttgcttaagtacattacaacattttttttacgcgaagtacattacaacatgaagtatattgttatgtgataaatatatcgtaatacatggaagatatataatacttgccatataacgagaaccaatcgctataattcatgtgtttattatacaatgaggaatactaaatttaagtggtaaatctaaatactaactaaatagaaaaatatttgaatattttctatactaagtataaaattattttaattgatttatacgcgtaggtgagtaaatgaatatttcatattcattatatttgatcacaattaactatttgttattctatatatggtcagattataatttatttttcgatttaatttcttgaattaagttttaaaatattctaacaactaatgtggcgcagatacagatgaaagtatctcaattataaatatagggtaacgatcccaagctcataactcattctgtggaaaacaataaatccatctaagagagtttgtgagccccaatacctacactaactatgttttgttttctttatagatcaaagcttttgtgggcttaaaattcaaaaaattaatagcttgagctatttcgatcattttacttatatcgtgtatatatattcaatttatgtcgcacttcataaatcgttcatatatattttgtctattcatataaattttgacactacaaatttttttacntttagtcacaataaaatttgtgacgaaagtgaaaaagtttgtgactaattataaatcatgattcctatgttgtgactaaaaagttcgcggctaaa

SEQ ID NO: 114212 - DNA, 4656 bp, Cannabis sativa
  modified_base (54)..(55): a, c, t, g, unknown or other
  modified_base (3143)..(3150): a, c, t, g, unknown or other
  modified_base (4612)..(4620): a, c, t, g, unknown or other
ttttttgaaacaagtagcatttaattttctatattaagaatattaaattttaanntaaaataaataaatgtaatacatcttggccatccacgtattcatatttatgagttaacggaagtggtagtaacatgtgtaaaagaattgtaacattgagtatttttgcctccaaaaataaaaataaggtatttaaatgtataaaatctgaaacattaggtatttatgctgcaatttacctttaataaaattatgttttctttcaaaattaaacaaataaatagaattttgacaaaagtactgaattttaggtaaaagtttataattttactgttacacggaattttttgcaaagatactgtttttttataaagtaactgtaaaataacaaaacaaaacaattaaaataatagtggaacagctaaaaaataaccgtggaacaactaaaaaataaccgtagaacaataataaaaacttaacacagtacacagtataaaacttacgtggtagttttgaaaaaaaaaattcttacattaaaaaataaaaaagttaaaaattttgatataaaaatcactaaataaataaataataatacagcaacgtatgaaaaaacaatattttatcaattgtttctttatattttacatatataaaggaggaccaaaatgagtttgtttgacaatgaaaatataaatattacactcataatgttagttttatatggttttaaaaaattatttaaaaatatttttctatattaattaaaaataaaatttaataaataagaatatgtatatataattgaaacattatatatctttatgaatgtgtttggtaatatttttttaattaagtttttggttttttttttaattaaaaaagttaaaatattttctaaaaacatattctatataattatttttactttttaattttttaactgagaattaactggaagacatggaaggcactatgccaagccaatgttgaaggtgatatgggatttaaaagttttatgcactttaactaggctttgctagctaagtaggcttggacgattttttccaacccagaatcactactgaaccgaattcttaaggctagatatttcaagaattcttcctttttggatgttggtcatggttcttacccttcgctcacttggcaagggatcatttgggtaaagaactcatatccaaaggcttaagatggaaagttggtgatggacaaaatatactttgtgctactaattcttggctaccaagtatgtctaatttcaagccattaatctttaatggcattgacagaagcttgaaagtctcacattctcccttgttgaagactctattcattcagtctgatgtagaaaaataaaaagcatccctttaaccttgtactctcacccagatcattacatttggaaccatgaatctaatggtttatacacggtcaaatctgaatattttcatgctactcacttggaagattaacaccctatggttcttcggttctcatacttcacaattttggggaaaattctagtctctttccaccccctcaaaggtgcaaatttttatatggcgtgtaattcatgaatgtctcctagtagctgcaattctccataaaagacatattgttgattctcttcactgttctttgtgtcgctatgataaaggaacaaccaaccatgcattattttttgccaatgacccaggaaagtttggaaacattctcctttctctcttaataatttattttcaagccaaatgagtctaaaagaattattactcaatgtatctaatatatgaaatgatttacaattcattgcaactctttggtgtgtttaggaaatccatggcacaaaaccaaagtcacatcatgttttgctctatttttctttgaattacttggaggaatatcacttggcacgggctgctactaaatcgtctactgcaacatctatccaacactcggcttctgccccaaaaaatcaaccatggctgaaccctccatcaggcagaatgaaactgaacacagatgcagatgttaacaaacttaattaaacttctggccttggtgcaatactacgtgacagaaatggtgacattgttgcagcaatgttcatgccactatctggctgttttaaaccggaagtaatggaagctttggctctaatgtatggtctacaatggcttaaagatcatcacttaccagtacattatattgaaattgattctctattagtggtaaatgggctacaatcttcccaagcctcaatttcagacttccatagtttgttaatgaatatttttcacttagcgtctaatttctctagagtgcagatctctcatgttaatagatctgcaaatactgctgctcatgttttagcaaagtatgatcttttggtggactctatttgctcttggttggaggaaattcctcctcccctaatgactattgtattttaactctggttttaatataagagcatttattctaaaaaaaaacatgcaacataaaaaatatatattatacaaatagtaaaaaatcaacaacaaaataaagagtacaacataaaaatatactaaaagaccctattttatgtaaaaacccgtaaaaatattaaaaattttgtatagattatatttttgtaattttttttattatttttgtgttttttttaattatcctttttttgtctcattcttgttttggataaatttatttttttgaatttggggctcttttgatacgtacgtcgtattgtattgtattatattgtgttgtatcgtattagtattattttaatacaatacaatgcttggtattaacttgtataaatagattgtgtaaaattataatatattttcaatacaccaaaccccaacaccaactacgggtccaagttcgagttcgggtccagggtccaggtccgggaataggtctgggtctggatctgtgtccgtattcatgtctgtgtccaggtctcgagttcgggtccaggtccaggtccgggtctcgagtccaggtctcgggtttgggttcgatttcgggttcgggttcgggtcagagattagtgttgaccctgaatcctttgtaaatattataatacaagctaatacggatatttgttatgtattaaataatannnnnnnnattgtattaaaaattttggtcgtaataattaatacaatatattgttttatctaagcataatgctatttattattttatacaatacaacccttattcggcgtagcaaacaagcccttagagatatactctctactctttatctcctcccacttattatctcactcctatcctttctttttttccaaaaattccacattccaaaattatatattataaatattttttgtttttttaaaaaaaaaataataaatatttggcctcttaaacaaatttattacattttggccctttaattaaatctatatatatatatatatataaagaagaagtataagacggtaacatgacgctctaaaatagcttaaaaactatctttcttttttctccttaattttttcatttttttttaattttttactaattttataaattgcttaatacctatttatttattttctctaatttttttcctttttattttattttccaataaaaaaaatgaaatatctaatcttaaaacaactcattcgttactttaaaaattataaatattaattaattaaaaaaaagcttctaacgtagcattaaaagaaaaatttaaaacaacataacctaaacacctaatattcttacccattattatgcctatcatcttttgattttcatggaggctactctataatattggagttggagtacacttccctaagcccaatccaatagtatccaataaaattccaaagtttgatggagtacaataaaaaatgtcaaatataggtaaagctagcattatttatggtaatgaagagatagtatataagcatacttaccgagatcctcttaatgttattaggaagaaaatttttagtaaaatataatctgtttcccaatatctttttaattgcttagtaataattattattattattattttgctagatgagtagtatttgttattatttataaactacacatcaattttttttaatatattatatttatcctttttatttaagtccctatactcacataacttacataataaatttatatttaaaattttaattaaaatatggctaaccattttaaaaaatattcctaacacttttttagccatataattattttagtttaaaattaattctagaccacttttttagttgattttttctttcaaaaagaaatagcgtatatgtctaggcactctttttattaaaatttatatcataattgtaccatattaaaattttctgtgtaaggataaactaccataagcataacaatttttgagactttgaatgacaattgccattcctaaggtatataaaaatttaaaagtttctttttatttttattgttgttttgttttgggtagaaagctttcattatatcttttttctctataagtctaacaccctaactagcataggcgtattacgtaatttttaaacatgctgtgcannnnnnnnntaatcaacgaggtttatgaaaaacgtgattaattaa

SEQ ID NO: 114213 - DNA, 1407 bp, Cannabis sativa
agagagagagagagatagagaaatgctaggcagagcagtcacagcctctctttcaatttctgtcacttctccaaacccattatcgaagtccttcttcggcaaaaccaccaatacgcacctctcttcttcttctgagaacccttttttcactctctcaaccctttcatggaacatcagtagaagaagctctagcaggtcctcccgaatggagaagagcttcactactcgggcctccgctcagcccctcacgaatgctgacgagcttattgactctgtcgaaacatttatcttcgactgtgatggtgagaccatttgcttatctgggtcttccgtcgcttgtttttattttgtgtggctgttttacttcttacctgtctctgaattggtggtcagtttagaagtgaaggttgttttagtcatatcccgaataagtaaaaacttgcaatcaaataagtataaattcacttggtattactagtaatcatccattttctttttttggattcttgggtattttacctaagaaaaagaatgacattgtacaatgggttggatttggagttagttaagctgttttaaaaccaaatggcagtaatatattgtattaatatgttaatatttggcactgatacacagtctccagaagtacttccaactgttcaaaagttagttaactcgaccgtaaactctttactactaaagggattcctttgcaaatagatatatgaagatggcttttaccaagcaaagccaaggaatgttgttgaccacgttcaacaccatactcgattttgccaaagctcattctgcaaagaacttttaagcctttgcttttttccaagttcatattgccaaattgtccaattgtcctactttccccacgtttttgttgatggcgtagaggctctaagaggtttaatttatgtatggcttcaaaattactagattttcctattgattcttactatgagatgggtgagagtactgttttcacgagaattgttgcatatattcaggtgttatatggaaaggagataaattaatagatggagtcccagaaactcttgatctgctacggtcaaaggtttgttttacggttttagtcatggaattaactaattcattcatcttgttagcttccttatcaatctaacatttatttaacattcttatggattttctgttttcctttttattagggaaagagattagtgtttgttactaacaactccaccaagtctaggaagcaatatgggaagaagtttgagacacttggccttagtgtcagcgaggttggtccgttattcgtggcatgtttactggactgtaattggaatgaaaatagtgggaaaaagaatcagtaatttttattatattgtttactttaactgactagaatgggaaaca

SEQ ID NO: 114214 - DNA, 2033 bp, Cannabis sativa
acgcttacataataaaacatcaaattagcttgggtgtgtatttatgagagtgcagtagtataactatagctatagtaccatgaacatgatataatattgttaagccacgtcccacgaattatattatttttttatatatataaaatggaattatacaacaaattttttggttctgttgaagttttattttattattaataaaacttacaaaagagtaacgtttcccgttagctttctttagtaaaataaaatataatagtactaatggtaaattatatagtaaaataataaaataaacaattaaaataaaaattgcaattaactttttccgtgagcttgacaaattacaattgagtgttggtggtaaggaataaccacaactctatttatatccaccttcaggtggtctattccaatcagatctagctcgatacttaaatctatactctctatttccatccccaactaaatcagttcaacggagaatgctgaagtgtacaatgggaatctttttaggagaatcaaatcaactcatatttacaacactattttcgactgtaagcttttgcccggcatcagagaggaattacagactgtacaatcccgatggtattgcgatgtataatatctggtcacaggggtatctaccgggctgactttggatacttcttcttcttcttcgttactgttcatgtaagaaatgtggtctttttcaatttgtctatttttttgtttatttagaataattttcgatatttcatttaacactttataccgatatatttggggctgccagattgagcaacaactatggtgtactcaaggtaaatttacagtatatgcaaattcttttttctttccaagaagagagttttgtttttctttcctccaatttttttttttctctattgaaattgaaccagctgttaaagaaaataaaaaatgcatttttatcatcacaactttttttttgaaatgtttatcatcacaacttattctccaatgtacttccttttttggtgcacttcttttttgctatgattatctcaactcttttttagtgcttcctttgatatttcttggctgttaactcttactattttttttagttgattatgattttgatttgatattatttggttgttcttgtatcattgtacgttatttatttattcacatgaactaaaattttcaacaacgtttttctttttttttttttttcacaattcttcttcttctgctttcttctttatgttcttaattaaattgtgtcaattgtttacgatgaacaagagtagttaaattttcttttaggatgttagtagatattgtttgacatctttttatgattttaatatgatttaatttttttctctaaatttctagttgcatctttttcatttgttcttaatttattttaattgtctgatcacaaattacatgttttataattttgatacagccgtgagtatcaattaactataatgaaatagagacaaattttgacatataagacgagagtacctatgtgatttggatagcatttaaggtttcttatctaatgccttttatatatttaaatttatcacgagagtaaaaatttacatatagatttaaatttatatatatcctagtccaaataaaaattactttagtaatcctactattgcatacaattttgaatttaagaattaagttaattaagccatattagatagatacaaatgaaattgataaacttcaactctaatcataattaatttcaccataattaattattttcttcatttgttttattatttaatttatgcttagattattcaatttaaaatcctttcatttgattgctaaacaaaaataagaactggttttttattagattggattggatccatccaatgaatcccatggatgaattcaatccagtttaattaaccactatttaggctaatttcattaaaaaaaatatatatgaaaaaacataatttaaaacctaataatctaacatggataataaaataatatataaaata

SEQ ID NO: 114215 - DNA, 1257 bp, Cannabis sativa
aatatatatataaaaaaataagattgggaaactcttttaatttttttattcttttgagtaaattttgggaaactactctatttaaatttaaaatataatatttgagtcggtaattaaaaatagaaacaatcacctatatatataaacccattggtaatttttatttgtccaaaaacaaactcacgacaagtatagcttttggctgaattgatagattgttagtaaacatgaataataacaacgacgtggtcattcataaaattagtagctatagtaactcaataacagttgagaagattatcaatctaaataaccctaacaacattaacaattaccacaaccaagaagaggagcccattatacaatttcaattcaagatcacctaccacacaaaactcactactggctacggtcacgtgtcaaacattgatgacaactacaccatcgacggtaccatagccgatgttcggtacagcccaacatcagaagccatcttctcacgaccgttaggtcatgaggaaatccattgtttcgaggcaacctacaataccctttcacccgtattgttaagggttggagttagagaccacaatgccaaaagtgacgtgtcacaaaatattaccaagttttgtgagaggtttatcatcaacaacaacaacaattcaagattgattgtttgtgtacttgtggagatggagagagagatagagcaatgggagtgtgtttcgtgtagtatggaattagcaaatattggtgctaatcatgatgaggatgaatcttattggatggctgatagtatgggaattgtggatttgcatcttgaagcttataaagttggagaggatgatgagaaattaggagagagttgctcagtgtgtttggaagaatttgaagtgggaacaaaaggtgcaaggatgccaaattgtttacatttgtttcatgtgaattgtattggtaactggcttcgaaggaatcaatcttgtcctatttgtcgatctcaattatatcctacttttcctttctagaaaatatagaagtaagtaatttctttgttattttgtatgtaattttaaagaagttattttaaatattaattatttcgtgtaatcattaattaataattgtaacacaaatttattcatcaaaataattcatatatttattaatagaacaacattcatatacgtattgttgattctagggtttctctctcttgcgcgaaatcttgcgtcgtcgtaagtttttactctttgtttg

SEQ ID NO: 114216 - DNA, 4707 bp, Cannabis sativa
  modified_base (3780)..(3780): a, c, t, g, unknown or other
ttaagaactaaaccaatttttagtaaaaaaaatgtgaaaaataactctaatttctagagttatcaaaattctatcattttcatgcggactacgaccatgacatgaatgaatgtaacaatttgaagggagagattgaattcttgatcatataaaataacccgcacttacaaaaatatgtcaaggccgaccaagaacaaagggcccccgagacatataataataataataaccaatttatgcctccaccaatggacgggcatctgcaggtaatcattggagggctgcacctcactgaagactcaggaaatactttagaaaagtatgctcgagccttccagcatgaacaaaatgatacaattttggtcagggaggaaaggaaacctaaaataccacgtgtaggtgaaccaaaaataacattcaccgaggccaatgctagccaagttattttcccacataacgaccctttggtcgttgaagtacagattgcaaataagatggtagcacggactatggttaacaatggggcttcctcaaatattatattcaagacaacctatgagaagatggggctctatcttaaagacttgattccttgcactcaacttgtatgcagattctccagctagagtgtatcaccacttggacaaattcacctaccacttacaattggacaagttccaaagtgcataattataatggcacaattctcggtgatcgatgtcccatcagcttttaacatcatgttaggccgactagccctatatgacttaaaagttgtcacattggtattcaatctatgcgtcaagttccgaactaaaagtggagtaggccgtgtaaagcgaaattaaaggatcgcataggaatgctacaaccttgctctatctatggtcaataaggaaaatacctccgggtagagtttagacaaggggaagattgcccaataggaactcgcccaaggcggggatgaagacatggatccccgacttagggaaacaaaacaaatgtcaggccaatagcaaaattagaagaagtggaaatcgatccagctaccctgagagtaaatcttgacattttttcctggtcacatgaggatatggtcagtattgacctcactatcatgtctcccgcactaaacattgatccaggcttctatcctgtccagtagaagagaagactgttagacaaaaaatgtgcacatgcactaatagaagaggtagaaacgctacacgcaaacaagttcataattgaagctttctgcccagcttgtgtggctaaccttgtactagtacccaagccaaataaaaaatggcgagtatgtatcaacttcactgacctaaataaggtgtgtccctaggactgttttccactcccaagaattgatcaactcttggatggaacagtcgggcatgaaatcctaagctttatggacacctattcggggtacaaccaaatcagaatgcatccacctgaccaagaatagacaagtttccaaatagatatgggtctatactgctacaaagtgatgccattcaatctgaagaatgctggggctacatatcaaaggctagtaaacaaaatgttcaaaaacaagatcagacacaatatgaaagtaaatgtggatgacatgcttgtgaagtccaagaaggctggggggcacatagaggatctggttgaatgctttaaaattctcagaaaatacaacatgaaactcaatcccttaaagttttccttcagggtcagctcgggtaaatttcttggatttattgttaatgctcgaggaatagaagccaacccagacaaaataaaagccctattggatatgaagtcgccaacaaaaataaaggaagtacaaagtttaactggtcagatagccgcactcaacagatttgttttaaaatcgacagataaatgcgttcccttctttaatatcctccgggataacaagaagtttgaattgatagaggaaaggaaaaatgctttctaggagctaaaaagacaactcgcaaagcctcttgtactctcaaaaccctcgaacagagaagaattagggatatacttggtagtcaccgaatacgctatgagcgtcgtcctgataagagaagaaacaatgtcttacatccaatctactatatcagcaaacgacttgttgaagcaaaaggtcggtatcctttaattgaaaagattacttactctctgatcttagccacaagaaagttaaggcccttttccaagcttatcctattcgagtttatgccgaccaaaccttgcgccaagttttgcaagagcttgataactctggacggttactcaactggaccaaatagttgggtcagtatgaaataatctttcaaccccgcacgacagtaaaagggaatgctttggcagactttgtggtggaatgtaccggcaaagaggaagataatttaaaagatagcatagagctagtacatgagtccctactggaagaaaataaaggcaaacctatatggacattacatgtggacatattagccaccgatcaactttttggtgtgggaatcgctctcatcacacctggggtaacctctgcatggagcaattaaatttgggttcagagcctccgacaacaaagcagaatatgaagcactcctagcttgactaaagctttctcgagaggtacacgccgaatacattgaagtctcagtgattcaaagttagcgctaaatccagtcttaggggagtacttgggtggtggaaaaaacgatggcttatcttagtaagatccaaggcctgctcacacaattcaagggttacaccctaaagcaaattctgagggaagaaaacacaactgctgatgccttggcacagattgcgagcagcacggtgacgaataaggccaacttagtcccaatccaattcttggaggaatccagcatcacctgtgtggaaaaaataaaaataatagacacagtgccgaacttgatgatacccatagcaggttatgtcaacaataaagaacttccaaacaacagaaatgaggctcaaaagatgatgagaaaagttgcatggtacaacattgtagaagtttgtaatgtattgaagaggcttctccatgccattgctaagatgtgtacagaggaagaaactacacggttcttgtccaaagtacacgaagaattctttggtaatcatgttgcggggcaaagtttatcaaagaaaatactaaggcaaggatatttctggccaactatgatggaagattcaatgccccacttaaagaagtgtgataagtgcaaaatattttcaaagatcccccgcacaccccttaatgagctaatataaatacaaagtccatggccctttgccctttgtaattagttttggtcaaattactttttacccttctaattagcttttttatcctttagtaccattaattcactattggaagtataatttagatcccatctcaatttgtgcacaagattccagttctagaattaaaaattaaagggaaccaacatttgatttgttaggaaagtcatgattctaattgtaaatcatgttcccaacaatccacattattagaatcctaaagcaaaagttgtaagaatattattctttgagaaaatttaacgagtaaatcaaagaaactaataacatgaataggagttcatgataactcaagatttaggttgatctattattgatcatcgttatgatatgaaatatgtatttatgataaacgacatgttaataaagatagctttattcatatcggtccttgtcatatataatctntgttatatacaacaccttcactttgatgtcatactacatccgtaatccgaaccaagattacttgcactaaagaacgggcattagtgaaccatactagcaaccattgattacagattcccaaacttaaatatgttgttgactattttcttcatagttaatgggtcttagtactctgtacaactacaagcaaccacctcatatatgaataaggaattttctgatatttaatataatttattcaatcataatattaataacttaacattcatacatatatcaagtgttgaactctttatttaataatcaggaaaggtcttgacaggcttttcaggacataaaccctaacaccttccttgtgacattatttagcttcctatagtcaatgcaaacacgccatctagtcattattcttacgggaatcaactcattgttttcattagccacaaccgtaattcctccctttttaggggttaattgaaccgagctaacccatgagctatctgaaattgggtaaacaatgtcgtagtctagccacttgataatttcttttcgaaccacttctttcatgataggattcagttgttgtagttgttaacccaaaatatcagcagggttgatcctcaaaattagtctaaaattagtctcaagaagcgagagacatcacctttaagattcagctgaggaatgaccgagtcggcgcatatgtcgtggggccgctcgaccaaaccctagctcgggtgatcacttggctagggttgatgaaaagccattcgaccaaaggcttaggtgaaagattacttggtcatgagccctgagatgtcacttggccgtgtgcttgagatgtcacttggccatgtgcttgagatatcactcgaccattgtagagagaaagtcattcgaccatacaaccttgaagtcacttggcca

SEQ ID NO: 114217 - DNA, 7072 bp, Cannabis sativa
tgtgttcatatttttatttctatagcttttatttttctgtgtgaaattactactgtgagtctcaaatttagttaacaaaaatctgcgaaaacaattaatatatatacataatgtatatttataaaaaaaaatccttaaaaattaagtattgatatgtttaaaatagttattatgaagttttgaataggaaattatcgacctataattggtaatatgagtgaaaattgtgggatttgtgttagtcccacatggaaacttgaatacccttaaaaacggtatatataaaattttaaaataagtaaagaagctcctacttatccacactatggaatgccaaatcattgtaagtgaaacaattcgtgtccccggacccctgtttgcgctcgcgtcttgcaagtgtagttattcttttgtgcactagaaactcatttttgagtagtttgttcaatctttcttgtttgattatcaatgcagagcttccacaactgacaacaacctctggtgttgacaatgttctttcttattatgcacgcagtgggatgcaaattatcgtgggtggagaaaaatcgtatgggctttgtgtgcactcgcacgtcctcctgcacgcgttgtgctttttttgcaacgcatacattattttaactaaattatttcagcaatactccaataatattccctcaaactgtgaaaattgtgtgacaaccaaacaattcgcaattacccgaaattaatttgagtggttgttttatttttctagcttgattgttcatggagagcttctagcactgatatagacttatggtgttaataaggctcttcttatgcacgcagtggaatgcaaattatcgtggatgcaacgaatatgcatgcaccttctgtgtgtccacacatgcttctgcaagcgttgtgcttctttggcaaaccgaatattattttctctctaaaatatgccctcacactgtgttaattgtgacaatcaaacaattcatgtagatagttacccgaaataaatttttgaggagctatttaattttttctaaagttctaccacggacattgacgtatagtattgacattatgttagatttattacttgtttgggtataggtttagcttattctaggttggtgtaccattctatccatgtgtagggatatcctatacttagtatataaagaatatgttgtattgagctgaaccctaatgtactctatttttcatatcagaataaagcaatttctttttcctctgtaaaacctaatatggtatcagatatttctctccagccctaagcttccgccattttcgctggtctccttgcagcaagctttttctcgccgaaatcaatggcacgcactcgcagcagccatcttcctcacgcacgaccactggcaccacctactgttggctcccatgtcacctccggttcaagatcgtctcccgatcttcttgcaacagatatctcgggttccatcctcgatttttctcatccaccatctctcaacgatggcgccactgttcccgtggctcattctgccgttcctatctccaccggcaccactgatcccgtggtgcatccggttcctcaagatccttctcctccgattcaacaagatccacctcctccgcccgctgttcatgtaaatccggtcgcagcacctccttctcgacctccgatccgtcaagattcaccatctgtcaccattggtgatttctctgttggtgatcttcatcacggatccgagccccacattcctgctgctgctcctccgatccatgcgtctcaaccactggatcgacaaaatcattctcccaacgaagataacccttacttcgtcggatctggagaccatcctggtctcattcttgttacacctccactttcagatcacaactttcagcaatggcgacgagatttcaatcttgctctcggagccaaaaataaaactggtttcattgacggtactcttccccaaccggcacctacaagtcctctgtaccattcttggatccggtgtaatcaaatggtaatgtcctggatcattcactgtgtttcgcttgacatcaagagtagcatcatgtttcttgataccgctgccgacatgtggactgagctcactaatcgcttcagtcaaggtaatggacctcggctctttgaactcaatgaatcgcttactgatctacgccaaggagatgactctatcacagcttattttaccaaacttcgggccatttgggatgaaatcaacgagctgcgacctcggcttccatgtacttgtcaagcttcagccgacaatatcaaatttcaaaaccaagaaaaggttctgcgattcttgacgggactcaatgagtcataccatgctgttcgggcccaagtcctcattctcgagccttttccgtctctttcgaagggtttttctaccatcatccaacacgaaaggcagcgaaagattcggactctccccaacttggtggttgcagcgtcctcaaacacttctcgcaacaaacggcagcgtcccttttgcactcattgtgagaaacctggccacttaaaggagaaatgctacatccttcatggctttcctcccggttatggcgataaacgcaaaactgatcctccacaccgttccacctctgatcgaagtcagtcctctaagggtccttctaaggaacccgtggccaatgctgctaccaccagcacttctccttcggtctccgataagttggcctctctccatgacatgattgcccaactcactcaacagatccaccaaactcagtccaccatcaatactcctatggcgtcaaatattactggtaaaactgtatcatggatagttgatagtggggctacccaccatgtttgttttgatataacatgtttttcatcctttcctaaagttccagttgcatcttatattacactgcctaatggacttaaaatacctgtgcataaatctggtactgtacacataaatgataaattacaactttctgatgtactgtttgttccagattttcattataatctgctctctgtttcagctgttatagatcaccctaaatacaatgttttgtttactcataatgcttgtttttttcaggacatagttcagaacactcggattgggactgctaatcgagttggacatctttttctcatccaacaagtctcggcctctgctatgtctgtgttaaatactcatgcttgtaattcgaaagtcatttctaattcttgtaccgatgtccaaaaatggcatttacgcctaggacacccctctgttcgaattacaaaatcaatgaataaaacattacatttttcagattcagattcctttatttctccttgtcatgtttgccacttagctaagcaaaagaaacttccctttaattcagctaacaatatggcacatgctccatttgatttaatacatttagacatatggggaccctttcacactattagcattgagggttataaatattttctcactattgtggatgatcatacaaggtttacttgggtgtatatgctcaaaagcaaggtcgatgctcaaaccattatcccacaattttttaccttgatattgaatcaattttctacctccatcaaaggtattcgatgtgataatgccaaggagctccacctccaatcttttttggctcttaaaggtatattaccttatcactcatgtgttgaaagacctcaacaaaactctgtagttgagcgtaagcaccaacacattttaaacattgcaagagcccttgcttttcaatctcgtttgtcactcacttattggagttactttgtcaataccgcagtatatctaatgaaccgcacaccttcggttttactacatttaaaatcttcttttgagttgttatatcacaggtttccctcttatgaccatctacgggtcttcgattgtcttgcctatgcttccaccttggatagcactcgacataagttaagcccccgatctcgggcttgtgtgttcattggataccccgcaggtatgaaagcttacacattactagatcttgagtcccacaagatttttcaatctcgtgatgttattttttatgaacatatctttccaatcaagaacacttgttctaatgcgaccattgatgctttttttcactacactaatgtttcttctagtgactatcatcaggtacctagtgtcgccccacctccacccaaggaaagcaatgtcgcgattccagctaggacgagtatccctcctccttcaacatctaaagttggccgccccattgttcgcctgaaccatttacaagactacatatgtgagtattccactgctcatcctatatcttcttttttgtcatatgacaaattttctccaagttttcgggctgccattcttagcgcccactcagtttctgaaccaactacttttctccaagcctctaaaatgcctcaatggctaaaggctatggatgatgaaattgaggctctccttgccaataaaacttggattgtcgtatctcttccccctggtcaacacttcattggttgtaaatgggtttacaagataaaatacaatgccaagggtgaaattgtgcggcttaaagcccgtttagtagccaaaggctacaatcaacaacttggtattgattacctagaaacttttgcccctgttgcaaagttcaatactttaaaagtcctccttgctcttgctgccatctataattggcaattatatcaaatggacattagcaacgcctttcttcatggcgatttagaggaggaagtttatatgtctctcccgcaaggatacaaacataacggagagctccctcccaatgcagtttgtaaactcaacaaaagtctctatggccttaaacaagcctcgagacaatggtatgccaagctcagctcaactttactccacgatgggttcacacaatcaccttctgatcactctttattcattcgatcatctaatgatatttttcttgcagtgttgatttacgtagatgacattatcatcgccagcaacaatgtcgctgatgccgatgcctttaagaggtagcttgactccaaattcaaatcaaaagatcttggtcctctacgatttttccttggcctagaaattggccggtccactaatggtatttctgtttctcaaagaccatttacacttcaactcttaacagatacaggttacctaggtacaaaggccgtctctactccaatggaatccagcactcatcttagcaaggacactggctccctccttgccgaccccactccttataggagtttgattggtaagctcatttatctcaccattactcgacctgacatctcttttgctgtcaacaggcttagtcaatttctctcagcacctcggcaacctcacctccaagctgcccaacgcattctccaatacctgaaaggcacacctggccaaggcctctttttttacagcagctcctcacctcaactcaaggcctatgctgaaactaaccttgttgctaatgatcttcaacttaaagttttttctgatgcagattggggcacttgtcccgacacttgaaggtacgtgacaggctattgcatttttttggaacattctctcatctcctggaagtcaaagaaacaaaacacagtttctcgctcctccgctgaagcagaatatcgtgccatggccaacacaacttgtgagctcatttggctcctcgccctcctcaaagacttcggcctcaactcatgtattgtgacaacaaggcagggatacatatatccgagaacccggtgttccatgaacgcactaaacatgttgatattgactgtcacatcgttcgagaacgagttcaaagtggtcagctcaaacttctacacatcaacaccaagcacaaccttgccgatctcctaaccaagcctctttttccctcccaattcaaggagttactgtccaagatgaatgttaccaatatgtaccttccatcttgagggggcgtgttagatttattacttatttgggtataggtttagcttattctaggttggtgtaccattctatccatgtgtagggatatcatatacttagtatataaagaatatgttgtattgagctgaaccctaatgtactttatttttcatatcagaaataaaacaatttctttttcctctgtaaaacctaatacattaccatgtgtcttttgcctagataacggcgtaacaaatgcatcaaatttttggtgcgttgttattttacactttaaggacgttggtttagcgccaaccaacgtatagtgcttttcatcatacgactagatggaatgtcaattgaatatctatacgtcattgaaaaagtgatgtcccatacagtttttgtagtcggtctttactgaaatccttggctcgtcaccctcaatcataatgctagaatttgattaaaaggagtcaaggagttaaaaagttaaatgttaattatccaaaaagaagtgtgcatacggcaaattacatacacatgccgtaattaattgttacactgttgactccatatattaataatgtactacttatttcctatttacttttcaaaaacggtcatagccgtagctactcgaaatggctgtatttagttggcgtaaaggattggagaaaagattttaagtgcatcattgttgttgttattctctttactttcccaagtcaataaataataataatgggttagtttgaaagtaatcctaacacaagtgtaattatactatattttaaaggttaattggtaattttttttcctgaactttgacatgtactaaatcgtgctccttgaattttttttccgttaaaaattcttccgaactagattgttaaatttaaggacttttgtctcattttagtaaaaaaattctaacatggatgaaagttcaaagagcatgatttagtacatatcaaagtttgagaggcatgattcggaagatatcaaagtctagagagcattgtttagtacataaacaatcactgaaatagtaaaattaaataaaagtccttaaatctaacaatctatatagttcaggggaaatttttaac

SEQ ID NO: 114218 - DNA, 2449 bp, Cannabis sativa
cgcctacctctcatagagggaaaaaattataacgaaccaacataacatttcctctgaatttctctctttcaatctctctctctctctctctctaaacataacattcttttgaaatcgcaaaaatggtggcagaagtgggcgctccgtctagaacacgacgaccaccggaaacaacagtttttcccgtttcagaggctaatcttcacaagaagtcgttgtatgtgggtgacctggacccaactgccgaagaaactgaccttatcgaaacgtttcgttttatgggtcccctggcctccgttcgtctctgccgagacttttttaccgggaaatctctttgttatgcctacgtcaacttcttttcccactcccatggtatacacttttgtctattgtttttttttttcgttacttccttttgtattaggttctttcttgttttttgtctttcgcaattttcttggtttctttggttcatttcacgaaaaaatcattcaaattcgagctttcttttggaaagttgttctgtgaatgaatttttcttggcttctttaatttttagtgtttgcttaaactgatcaattgggtaatttgttcaatttactatatcatattttttttttgcttcttctctgttttgatgtgtcctttttctttctggtattacctatcttgctatgtcaacattctttaagatacatttcatatcccaccaaattgtttttgttcttccttggtggtttgtttaagtaatcatttataagtttctgtctatataacttttctttattcgctttctttgatttctcagcttctaaagctctagattgtctgaatcatactgaactaaagggtaagcccatgagaataatgtggtctcaaagaaatcctcttcctagaaaaactggtattggcaatatctttgtgaagaatctcgaccgttcgattacgagtgcagatttggaggagatgttttgcaaatatgggaatatacagtcttgcaaggttgccgaagcaaatggcgtaagtaagggttttgggtttgtccagttcgactcggaggactctgcaaaagctgctgttggtgatctccatagtacaaagatcgaggggaaaaagttgtgagcccccttctttgtttttctttattattattattatgctaaattacttcagctcatcatcatgttctgttttctttgctatgtactttagatatgtgacaaaatttgtcaagaaaagtgagaggacagcaaccaatgaagaagaaacatcatttacaaatctgtttgtgaaaaatattgataaagatatcagtgtggattttcttcgagccaagttctcacaatttggaaaggtttctaatgtagtcatacttaaggattacgagggtaactcgaggggtatgggttttgtaaaatttgagtcccctgaagacgctatgattgctgttgagaggttgaacggttcactgttaggtaaaacatggtgactttgttcatatcattttgtaaagccatatcagtatattttgtctgacttgaaacaatggatcaggatcaaggcacatgtacgtggaaagggctcgtaagaaacctactatggcgggaaacaaaatgctcaactcccagttggaaaaggcttcaaatttgcatgttacgaacctagacatacttgttgacgataacaaactaagaaaacatttcagttgttgcggaaatataacatcagttcgagtgatgcgagatgagaatggcgtcagcaaaggatttggttttgttcgtttctctactcacgaagaagccaagaatgctctcaaaacacttgatggtatacaccaaataaatctcattcctatctccttacctcttttctaactatcttgtctaatgccagtttattcgtactcaggaactgttttagaacaaaaatctttgcgtgtgaccttcgcttggcagaaagattatcaccgcaaggagtcgcaactccactaccctcaacaatctttggatattccaaactgggataatgcttcttgttcaatcccttttgtcccatacaacttcaatccttccccgtctttacattctccactcccataccagccatttgagtatctcaacattggcaatgatgttggtcatgtacagtatccctatctgttacagaactacctgcaacaattctccacatgtgtaaggacttgctttatttaggaaccttatatttattaaaaaaccattgattatttctgtagttgtcagcaggctatatgcttaaaaaacaattttgtaatgacaggttccaacaaggcaaatgcagcagccgcgccaccagaatttccgacccagtgtatgttgatttttctttcctttccaagtaaagtaaaagggatataagagctagcaaagatatgattgcttcacaactcaattgtttttttttttttttt

SEQ ID NO: 114219 - DNA, 1739 bp, Cannabis sativa
tgttcttcttcttttggtccatcatataaatgatctcactcatgtcatcatgatgcacgtgtgagagaaccaaagccattcgcaagagcatgaagtgctggattgaaggctaatcttcccaaaataccctgcttgtagggcagaaaggtcttcttcttcaaatcatccgacactgctttgttgaccgtataatgaagctcgtgagcagaaactggtggtccttttctcctgccagaattattcgaaccaaaactgtccgtagacctaaaactagcgttcttaagatcttcgtgttttttcatgtagtactttctcaaagggtctttctcattagctctcccttctgatgcgcttcgaaacagaagaaaatccctgaatctccatttcttcgaagaagaagaagaagaagacactttagttggattattattaacattagaactagcagtaaatgacctctccttgttgtcgtttttatttattggctgtcgttgatgatcttcttcttcccaacacctctgatcagaagctctcaaaggagataacgatctcgtagctcttcgactcgatctcgatgatgataataaattatctcccatgctagtaattatatttctttctctccctctttccctctcgttgttcttcttgttattgtaaattgaatcttgaccatttgaagaagaagagggttggtggttgagaaattgaagacgaggaggtggtttcaaaggcttgattttaccaccatcgaagagctcctcagccgagagagaagttctttccaagtcttcgctgaaatcaaaagcgaaaccaccaccaccaccaccatcatcatcaccatcattatctttctcaactactacacaaccctttttaggcgtcccgggattttcttcccactcaaatggaaccataggcggagaccgactactgccgtaaccacgttctgatccggcgccggcagctgtagagaattcctcgaaatctctatagaagtcggacacgcgagacgggcttgtgggagcgctgaagtagtactcgccgaagcgcttcggcgatggtggagctgttgagtatggggaatttactacactcatactattattaatattgttgaactcgaaatccatggattgtgttgtacttggtatcactacctccatatatttgtataaatatattttttaaattaattttgtgtgtgtatgtttaaaatagttaggagtagttttagatagctagatttggagtgtgtgggaaagcgatctaaaggtagactaattgttttgcgaatgaattatatataaacggcaaagtgggaaaggaaggagtagggaaagaacttaacataaaaataaaagtagagattgttgaccacagagtcgtaggatatgagccgccttttaatacttgtgttgtgtgtgtatagtattatattttttttatacataaaataaaaatctttagcaaattttattattactcaggtatattgtcattgttcttcacatggcaattgatatttgtttatttatttttgacaactacttgtttattacttgaattttatatgtttttcgttgctatgtatttatatatatatatagaacatttcataatgagtattagtcatgaacagttactaaataaatttaaatataaatattaattttaaaaaatatcaagctatcaaattttgatctaataacgaataatgaactcacaaatttgaattt

SEQ ID NO: 114220 - DNA, 4183 bp, Cannabis sativa
  modified_base (27)..(32): a, c, t, g, unknown or other
  modified_base (3621)..(3624): a, c, t, g, unknown or other
aatcaacatacttgtgagtatatctannnnnntggtaaaataattccaacagttacctcaacctccaaaggcaaaggtgttatgcatgctgatttgccaagagtttcttcttcgattattgctcaggggaatgtcagacctgtctctaggactaagagatccttctctaggcagaatcaacaagttggctcttgtgtgcgaactatgctgaagagagcttgtgattccaaccctgagtttgtcgtggttccatctatttttgattcgaatgaccaagcgggtgttgctcaataaccccgcaagaaaaatgagcctcattagttggaatgctcaggggttagggagttcccaagcatttcgtaatctctcccttctagttaattaacatcgacctcaaattctttctgtgatagagaccaagctagttgttaactcttgttctcgatttaaagctcgtttgtcttttgataatgtttttaaggttcctatgaatggtgtagggggaggtttgtttattttctagaatgatgttgttaatgatagtattttgtcttattctatgtatcatatcgactgccttgtttcttttaatgataatataaactatcacttatcatgtttttatggttctccttatggtaacagtaagaatgacttttggatgttgttcgactgcttataggattcttttttgtctgctccgtggttaaaaataggtgattttaatgacttttttaggtcttataatgatcataataactctaataaccccttcttatgctatccataatttttaaagttttgttcataagtttgatttgcttcctttgcattttgttagaaatcgtttcacttggaagcatggtaatcttatgaaaagacttgattggggcattgttaataaagcttagactaccatctttcctaatgcctccttattttatctttctttttttggttcggatcacagggctatataatgaccttaataatgttaggtgttcttctgggaggtttttcttagaatcattggcttacggagccagctttttttaaacgtgtataagataactggtcttctaataactctatctctaataatagtaatgatttgatgagttttcttaacaagcattctttttgtatacacaacttgagagattggagtaggaataagaataactttaaaagtaatattgagagtttgcaggttgctattgacaatatttacatgtctcctgttattactagtaatgatattgctaaaactaagagccttcaatttaatttaaacactttgttatataaagaagagttttttttagaagcagagttttaaggttaattggctttatgttggggataaaaatacaaaatattttcataacaaggctccttctaggacaacgaataattttatcaagtctatcactttggataataattctactgttaatagtttataggatatttttgacaattttgttcgtttttaatcaaatccactttcttcttaagatgttgatattgactctattaatattattctctcaagtatatctaatagtattaatagccaatagttctattttctagccaaaccttttgacaattgtgaggttaaacgagctttgttttagttttatggggacaaagctctgggccatgatggtttaaactcttatttttatcaaaagaaattgagctgttattggggattatttttataaagcagctctggatgttttaaataatggtgctaagttgactttattaatgagagatttcttattttttttatccctaagaataacaatgcttctagaattagggattatagacctattagtttatgatctactatctataaagttatagctaaggctattgttaatagacttaaatctatccttaatgaccttatcgcccacaaccagggtgcttttcattgtaataggattatttttgataatatatttatggctaatgaggttattaatgctattaaaaatagaagaagtagtaaaattggttgggctgcactcaagttaaatatggagaaggcttttgagaaagttgaatgggtctttattaggcacattctcaataagtttggctttcctattaatcttgtttcccttatattacgttgtatttgtactgtttcatttaagctttgtattaatagtcattttcatatgtggtagctgagggtctttcagctgccatccgtactaaagtgcattctaatagcttccagggtatttttatttgtcgttctactctctctatcttctacttgttatttgctaatagtcttcttttcactactgttactcctcaaagctgtaagtctatcaaagatattcttagtatttttaataaggccactgatcaatctatcaactttgctaagtcttttgcgcttttctcgccaaataccactcctcaggatagagctcttttccttaaatatctaggtcttgatgataaatctttcattaatgaatacctttgtgtgccccaatattttactcattcgaagaaagcttcctttcactatcttcttcaaagagccattagtaagctttctatctggaacaataaactttttttctagagctggtaaagaaattctccttaaagcggtcaacaaagctattccttcttatgcaatgtcctgctttagactccctttgtctacttgcaagcaattttaaaagcttatggctaatttctactggggttcaatgggggaataatcacaggaaaatatattggaaaaaaggtctcttctttgcaaatgtaagttatttgggggtcttggttttcgtgctattgttcatcacaatcaagtcgtgcttgctaaacaagcatgaaggattttcatgaaccctgattccctcctagccacacttctcaaaggcaaatacttcaaaaataatgactttctccatgcttcccttagtcactatccctcatttatttgttgaagtattctttggggaagagaccttctttgtaagggcttaatttggaaggtaggaaatggaaaatccattcaaactcttagtcctaattggatctcagatttgagaattttatcttataagaatgacttttctcctcctgaagatacggtctcttactttattagggaggatggattttgggatgttgacaagcttagagttttcttctcagataatatggtcaattcaatccttagagtcctagttgctcttgctaacaaggattgcctaattttggagtaccatccttctggaaacctcactataaactctgcgtatcaccttgctaactcggttctttattttccttcttcttctaatcctggttttcttaaaagttggtggaaaatagtttggtcctccaagataccttctaagattaagcactttttttttggaaagcctttaatcatttgctttcatctggccataatcttttcttgaaaaaagtgcttgataacccttaatgctctatttcctctcttcatgttgatactgttggaatatattttaccaggacctagatttactaacaagtatgattttaacattctaaatatgaatttctaaaacgatataaaataaacannnnaaaggtatgagaaaccttacattgtttggagcggaattaaatgactccttctgctcagatctctaacccttctatccattctgtagcagagtataatcaagatctgagcccaatactccttcagttgattggattctttacagtctttcacactatgattgaggaccgacttgctatgggtgggcatgcactcaatcactaaggctacaattttgatggtgaagaacactaagaatttcgaaatagtagaaagaaaagaagaagaagaagtctcaaaacactagttttctgacagaataaaaactagagttttaagcattagttggataatgatacctttcttttctttttatactaattcacttaggattaggattgaattatttggaataaacaattataaaataatagcaaaaataggacttagtggccgacccctatgtgggtccatcactagatagatttttgctatttctctcaaccatttatctatttttcacaaataccactttttggaatttcaatcctatatatgccaaaaatatttatttaatattta

SEQ ID NO: 114221 - DNA, 4787 bp, Cannabis sativa
tctttatagctcgagttttgaatataagcttttatattgtctttttagttcaatcttttatcatatttgagttttgcgttagaaacttccttcaaactgttttacttggtatatcatttagagagaaaaatgaagaaaagcacatgttaggccaaatgttttcggttccagaacacttgttttgagacttttatctcttgtttcttaatttgtgtacacaaaattggtttttgaaaaaacatttctttcgccagaaaggtgatttgtgaccaaagtagattgaaatgtaaaagattgagcatgccatgtagaaagtttatgttaaaaatgttaaaaataaagaaatccaaaggggagaaaatcacatggcttttgttttgttttgtactgtttttcctttattctattgatatttgctatttaccattaatactatcattatggagaacggataaaagggtgttcaattgggtctttcaggatgtggtccagcctttagagttgtactacttttaatgagtttgtggtccatgtttggtaaagtctttacccgagtcccatggcctttaatcatccatgtggggacattcttcgttgaagtttgatcgatcacaatggtttaaccaatcatttccccggatatttcttttttacatgttgttgtaactagtaacgttaggttaattctattatttatacagagtctgctaaaatggaatttgtctcagtccaccacatacactattctgtgatttgccaatgtcgattgatgttcccccagttttttatttttgtcttctttgtaactttgatttattcctgtcttttattcacgttaaagcgtctaatattcatgcaggtacgtttcatctgatttggcatcggatgtcatcataaatgttggtgaggtgaagttttaccttcataaggtatgtaccgaatgttcacaattgttttattattcgtatgtgagaatgtttttttttttaccatcactgttgattgattccttttatgctgtgaattttgccttctgtgcttattcttttacccgatgaccatacatgagaaaattttcaaattgacaagatttacagctgtctcttacctatgttaacttgggaatgtatccaaaaattgaaaccttttatgttaagcacttaaacttgctagtgtttatttacagtgtttttcaactttagtacattgggtacaatgaagttagcagtttttgagttaaatgataataatagtaggactgagggacaatattaccgattatttttgttgtttaaatataacagagttgtcttaaatcaactcgtagtaaggacctgtgagattttttttttaataaaaattacattgattctatctccattttttctttgtagtttcctctcttgtccaagagcagtcggttgcaaaaactagtgtcgaaagcaactgaggagaattctgatgaaattaatatggttgatttccctggtggtccaaaagcatttgaaatttgtgcgaaattttgctatggtatgactgttacactcaatgcttacaatgttgtggctgctagatgtgcatctgagtatctagagatgactgaggacattgatcgaggcaatttaatatttaagattgaggtatttctcaactcaagcatcttaagaacatggaaagactccattattgttctccaaaccacaaaatctcttctgccgtgggctgaggatttgaagattgttggaaggtgcatagattcaattgcttcaaaaacttctgtggatcccgctaatgttacttggtcatacacttttaaccgaaaattagcagagcctgataaaatcgttgaagatggtatgaagtttcgagaaagatcagagtctgttccaaaggattggtgggttgaagatatatgtgaacttgatattgatctctacaagagagtcatgattgctgtgaagtctaagggtagaatggatggtgctgtgatcggcgaggctctgaaaacttatgcagtaagatggttgccagattctattgaaaatttggtttctgaagctcatagcatgaggaacaaatcgctggtagaaacaattatttgcttgttgccatctgacaaaagtatgggctgttcatgtagtttcttgttgaaattgttgaaggttgctattttacttggagcagatgaattgttgagagaagatttgatcaagaggatcagttcgaggctgcatgaagcttctgttagtgatctcttgattcctgctaagcctccccagattacccaatatgatgttgagttggttcagtccattgtaaatcaatatgcaaagcgtaatgggaatttggaagctgttgagaagaatgaaaagggtattgatggttttctcctgggcaatggatctttattgaatgtgggtagattgattgatggttatctagctgaaattgctcgcgatacaaatctcgcactcttcagtttcatagaattgtcaaagtctattcctgaatcagctaggcctattcatgatgggttatacaaagccattgacacctacctgaaggtattaatttttccttgattcatttcaattagctcctttcaacgtcaacgcaatttactcatgataattatttgttgccctactgtttcaggagcatcatagtttaacaaaatccgacaagaaaaagatctgcggactaatggacgtgaagaagttgacaacgaatgcatccatgcacgccgcacaaaatgaacgtctgccacttcgagtcgtggtgcaagtactcttttttgagcaagttagagcctctgctgcagccgcacagcctgctgtaaacaatcatccccgcgacgcttctccatcagcaacgaacaccgacgaggaagaatgcgaaaagccagctgtggcagcacaaaaatgtaagaacgggaaactggcaaagaagagcagcaaaaacagtcgtagtggtttgcaattgttaccatctcgatcgagaagaatatttgacaaactttgggcagttggcaaaggaggtcacgtagagaacaggagctcagaaacgtctgcgagttctcagagtccaacttctttggttcctggtgatgccaagtcctctggttcatcttcaaggcagaggaggcactcaatctcataggtaaaagaaatggggggttatgcttatgttggctctaataagaacaaatctagcccaggaaaattcaaccgccgaagtgtaaagaaagaaaagatggtaggattttgttgtagctaatggtgaaatgtctacgttatatcagaattgctgctatatagtatatttcgggattgtggttttttttcttttttctttttacatatatagtagatatgctatccagtttattggtgtgtctatctaacatcagtggtcgtccaattgtaatattttcctactattatatatatatttatatatttctgttacctcatgctgtagagatccagaagcaggtgatgttgtaaatgtttaacaaattacatatgttaatctgttgttggagaaatttagatcaagtattcggagaaaactatgaacgctcgaagtagaaaagagctagtatttagaaaaccgagtcgtaaaaggaaagactagaggattataatggttcaacaaaacttgtttgccaacatttagattgaatatctgttatattaagtgatccttcacatatgattgtaattgaaacataaatttcaacaatctaaattgtttctatgtttagaacttatgcattaatatcatttaatgacatgtcgcgtttaagtgttaattgacctaagctcgtgggttatgaagggtcatcgcactaatggttatatgcgaacccatgtcgcagattaatatgaagacccaacatacgaatatagtggagaactattttgtctttgtatattttacctatatgttgcaactatatatgttctctattttcccgcaactaattattcatccatgtatttcttatgatgtgccaatatgttaatatggtgcgcggaatgtatatttctcatcgctctcattgcatatcttctcacatacaaacatacgaattaatatactttatacttaatgtaagtatgaaatcctaaattattctatgtcgtcctaatatgttttatacttagtataagtatgaagtactaaattattttacgtcatcagactttaggtttatgtgcgttttataatgcgcataaaagatgaaatttataaccataattgaaggtaaacaaccatttgggttaccatgtggttttgatactttatgcttttaataatactcattagtcattaccatataagtacaaatcatacatatttggtaaataaatttgagtttagaatgccaataatcaagagcatttagttatatggatcgaatttgagtttaaagtactacatatattccatatgagtgtacttttaatagatattcttatgtatatatatgatttcagataataaaatactagtaaagtttgataaatataaagtatcaaataaatatttactaatttagtattaagtcttataagctgcctaacaaaaatcgtaatttcactcctcttaacctttgtttggtaagaaaggtggaaatagctaagaatacttaagagaaataaaaataaaatttgacattttaataaacttgttttataatgtttatatatatatatttatatatactagcaaaatactacgtgcgaggcacgtatattaaatttatgctagtttttttctat

SEQ ID NO: 114222 - DNA, 2625 bp, Cannabis sativa
actaactaactaacaacataacataacagcagaaaaaagttagttaagttagttggtttaagtgagttggataataaattagtttagaggatcaacttccacagtaaaagtttataatttcttcattgttttttattaataatcagaaaattttaattgttaccaaagcactaaattagctataatcttttaaaagatgtcctacataattagtaacattatatgctatgcataataaaaattagaactatttatgtgctgaaaacaaaaagtggtgcatctctttctacggccggtcttgatatgagatgaacctaatacatacaatacaattgtttaaaacttttatatgtaaaaaaaatggcatttttaaaaattgtggactcgttaaatgggggcctaggcacaagtctcatgggtctactttggaattggcgtttttacaaatatatagattttgagcaaatgtttataattttactatcacacggaaattttaaaaaaaatgttgtcttttataaaataactgtaaaacaacaaaattgaaaaattaaaaacgagaaggtaataactaaaaaataaccatggaacaacattgaaaacttaacacagtacacagtataaaaatacataatatttttttaaagaaaaattctaccttacagtaaaaaagaaaaaaaaattcactgtgtggtgtaaataaaaacccctttagaatttgccatttttattgaagacatgagtgaataaatgataactaatttatttttaatgaataaattataacaaattgattgtttccattccaataaattaaaaaataattgggtttgacatctctttctcatagataaattgagttttgtattaaaagaaagagtattgttatttagtattattgatgcgtaacaccttttagacgtgttgttttgcgattagatagtaatactctctaaaaattattacattaaactatatgagactcaatacttaattgaattaatagtgatattaacatgtaagatagggcgaagcactaaagatgccttttatcatttctctaaactatgatatggattcttaattagacatgctctgtaactaattgtgtatatttttctcattatacctaaaaatttaatgttaattttgtagatgagagctctttcacaaatgggtatatggatacattgatagattggataccagcaatgaatgatatcagactaaaagatcttccaagcttcatacgcacaacaaatccaaatgaatttatggtaaaatacattataagattgattaaagcaacttccacaggaactgctcttatcttaaacacttttgactcattagagcacaatgtcttggaagctctttcttccatcttcacatgtccaatttacacaattggccctctccatcttcttgtcaaaaagactcaaccaaaaactttatcttccattgcctctaatctatggatagaagagtttgaatgcctccaatggttggattcaaaagactccaaatcagtggtttatgtcaactttggtagcattactgccatgtcctctgaacaacttattgagtttgcttggggtttggccaatagtaaaaaaccctttgtttggataataaggccggacctagtcgaaggcgactcggccgttttgccttccgagttcgtggaagaaacaagagagagaagtttgatttctaattggtgtccacaagaggaggttatgaaccaccccgcgattggtggtttcttaacacattgtggttggaactcgacgctggaaagcttgagcgcgggagttccaacaatttgttggccttttttcgccgagcaacaaactaattgtaagtttttgtgtgatgtttgggggagtggaatggaaattaatgccaatgttcaaagagatgatgtggaaaagcttgtgagagagttgatggatggggaaaaaggacatgaaatgagaaacaaagccatggagtggaagaaaaaggcacatgaagcaactgagcttggtgggtcttctttggtgaatttggataatatcatcaaagaggttttggtgccatcattgaaaccataataaaatttggtgtgtgtaagattctcttgtttggactaaagttgctatcttctttcataatttattttgatgaattaaaaataatctctccaaactatgattattgttttgttttgttggatgagctctaaactataaaaactattatcaatgtgtcctttcagttacattcggttaatttcttttaaaagtaatttacttatttggcattaagatacaagtataattatagtatgaatgtctactatttaactaacttaaaactagttcaaattgagtttattggagctaaacatactgaaaaaataggaattaaagctttatgattctcatatataaaaaaacaattgatacacttgtagctttatatcatttacagagtgtaatgtccaagttaaaaatagcattaaaaacttattgaggagttaattttgccaaaatatttgtactatttatttaatcaataccattataaaatattataaaattatcgagctgtaagaaagtgagagaaggatttttacgtggt

SEQ ID NO: 114223 - DNA, 3196 bp, Cannabis sativa
  modified_base (367)..(367): a, c, t, g, unknown or other
  modified_base (601)..(604): a, c, t, g, unknown or other
aaaaaagaaaaaaataagccttttttttaaaaaaaaaataaaaagttgggccttaaaaaaatggggaccttgtacaatggcccaagctgcccaatgcttgggcggaccctaatgaaacgtaccatatagaaatcaaacttttttttttctttaataaaaatcataatatttattaattaataaattagttcaaaacaatagaacacacttcagaagaacagtcttccaactgaagcacacgacctgtagagaaataagagtctcttcccaagcaataagccaacttatttatagatcgttttacaaaacacaaattgtgaatgcataaaataccgctctgaatcgctttgacacacaccaagctatntgtttctaacatgactctattccacggatgagttgcaatccaactcaatgcttctttaatgcctattatctcagcaatttcgagttgaacacatccaatctttcccttcttgaatgcttctaccgttgtaccgtgatgattgcgagctacacaacccatgccaaaagaaaagactcgaaccagaaaaaactaaaaagaaaagactaaagaaccatgtcaaaagacaagagtaannnnaaaactaaattagtttcaacacataaacacgatcacagcattaaattgatgtgggaatgagaaaaactttgacatcaatcaagaagataggattttgcgttaggttgaaaatatctatagttagtaatcaaacttattaatacatggttatactataaacttcctgtcataaatattaattcaataggaaaattttatttacatcaaatttttttaaaagatatcctattttaaaattttttattttatataaaatttatatttttaatttttttcttttaatttatattcttaaaaaatatatttatataataaaaataattatgaagaatttacccgaactcttatgtatttagttaaagaaattttgagtattttgagatgtagattgtacgacttagctaaaaagaagctaagtataaaagatcaatgttatataagaaatttatagatgataattttgtttgaggttgttggctgctttggctagctgtctttgttggttcgggttgtttgttggatgttctttgatcaataaaattttttcttttgattaaaaaaatatatttatcatggtgtatttttgttgtttttcaaatttctaatggtaaattgtttataataaattataaagagacatgtagttagagttacgtacgtggaaacactgttttaatttttaatgtttcataacagttgcataattatttttctaacagttatttcgtctgattgaaaccttcgtctgatgcaacgtccttcgaccaacaacataacaacttttgtcagattgaaaccttcgtctgatgcaaccttcggccaactaccctgcaaccattgtctgattgaaactttcgtctgatgcaaccaccgtgcaatcacacaacaaccaccctgcaaccatgattgtgtaagtgatattgtaagagctattttagtaattgaaatcacataaaaggtataaatactatccacaccttataaaaatgtttttgtaaataaagtgtcaatttatattctccgtctaataattcctaattaatattaaatatggtctaacgatcacttgcttggctgtggtcacataattaattagaacatttttagctctgttttttcttttctttttcaaacactatttattttctttttttagtataatattttcacataaagtcgtatattttttttttaaaaaatataaaatttcaaataagaaaaatcatattatttgaatcattctatattttaaataaataattattaaatctaaattattaaattatttttgtttaatatataattttgaagaacgcgtgattttcattttaatatcacattgtattatattatcttttattttttttagattgtttacgtatagaattttttaatttataaatttgtttggtaacttatttgtagttagtgatttttgtatgtttattaattgatagagaatctaatttctcatatagaatctactaatattttagcactataataaccccataaatcaacatatatgtgaatatataatatattgattagatgatacttataatataatgtttcactatgatttttttatatagatatatatggaacacttcttaatgaatattatccattaatgagtactaaataaatttaactataaatattaattttaaaaatattaagtcattggattttgatccgatggcgaatattaaaagagaaatttgaatttttatgcttaaattaactacttaattaaagaaaatatccaaaaaatatatattttttacattatatcaaaaataagtttatatgaacaatatttaaataaaactcaatatatttttatcatttttttgccgattttttttattattattttcttttcagccgatgaaataacatcagtccatataatgaaaaaataaaagatttttttaattaaatagaaaaattaaacataaaaactcaattttttttaatagtacccattcatgggtaatacccattaagagtgcacaataatttaatattacccattaagagtgcacattaatttttttttttaatattacagattgagatgtaagtgttataagaaacaaaaatcacactaatttaatttctcaaatataattaaaaacacagtacgaattaaatataatttaattagtagttatatacatatatatatattttatttttaaaaaattattctaaaaatatataattatttttttaaaattttaaattatttaaataaaattataacaatatacatcggtagttagaaattagtttgaaaagaggaaaaaaaaaatataaattttaacataaacccatattatagctaatatatatataaattaagtcgcgcatggactgacacaaataattcgtgtttatggatcgtgctaggcttgacgtaagttgtcatattgctattatacgaactatgtttcataataaaaatagaattttggaaatactggtctggttcatctggttgtacacttaacttctcatatatattataaagggctatttacaaaaatatgggaaaataaagataagttttgatatatatggcat

SEQ ID NO: 114224 - DNA, 1158 bp, Cannabis sativa
ttttagtcacaacatacgaatgatgatttataattagtcacaacttttttacttttagtcgcaagttttattgtgactaaagtaagattttttgtagtgaactcttcctttaacctcctcaagttcacgattgacaccagctaagaacatatgcacacaatcattctcctcccgaaactgatgccgagcttgattgttcttgttttcccattcatcatagttacctttgtcaagctcttgccatagttctaccatttcattataatagctggttacatctctacaaccttgtttggactgcaacaattgtcttttaactcaaatattttagatgaattttcaagatcttagtaggtttctcttattaaatccaagacttaagcagtcttcatgaacatatatatgtttttttttatatataattaatttagggttagttcttataccatgtaggttttgatattttgaatttaggataattttttttattaatcagccgtatatataggcattgtataataatattataataataaattagagaaatgctttacacaaaaggacctaactaacccaataagatattatctaataatactccacgacaccactaatttattctaataatcaattaatctaaaaagaatattttttctacactctatttagatttttgttgagttgaacttgaaacaaaatttataaattcaattttttgcagcttttcatgagtagattttgaacttagtcaaacttagtgtgactatgcgtttgtttcacgaccagatgtatggtagagtatatactacgattagatgttgtgggaatatgtactacaaacaaatacattgggatacatatgtattacgaccagacacattgaaagtatacactactacaatgtaagcgtttagctttccttttttcaactcaatttataaaaagggaagctaaagggggtgaaaatatctgcattgacatttagatgcggtttttttgataaaaaccgtaggtatagaatgtatatatatctatgccatcagttgggggttggaaaaatcagcatttttttatataaccctatggcgtcggttattaggtattaaccgacgccataggtgccacctttattcgacacgtggcacctatggcgtcggt

SEQ ID NO: 114225 - DNA, 3893 bp, Cannabis sativa
gagagagagagagagagatttctccaatcgtactttcataatatagcttcttaatcattataatgtgtaaatatttgttcaagctttttggtgatccctattcaatcattttgtgttctccttcatcttattcttctatattttaaatactatactcacttctcttcttctcaatatcatatatatacactattatatataatattattctctcatatatagtattatatattatatcctggtgggctaacgaactctggcgcaacctgccctaagaaacaataaaagattagcatgcactcgtgcggtgacccaaattactatatacactctcacatatatatatatatatctactatatagttctattatatacatttttctgtattatacatatatcttatatcatatatacactacattatatatatgctcttatattaattttatacttatatgtattttgagcattgagttattattctagtactctgctaatctcttctatatacttgtatttttggtcatatagctgtaacacttatttttaagtctttgtatttgtcgcatagagttgaaattttttggtcatattgttcatcttttatttacttggttgatatctcatatattgtctaacaagtaatgaaacattttaaacaatttttttttttagattttaaatctaaaatttgcagatttttgtagaaatttaagggatttcgatgcagctcaatgattgacgatgattttatgaaaacataaattttttcatcaaggttgagagtcctaatgaaattacttctcttcttggaagaggctttattatggaagaacttggtaattttatcccctgccttaagctaatgaactttggatctttgtttttaaaaaaattcttgtttataaagaagactatcttattgagattggagtttagaagcttcaagcaaagtctccttgaaggcagggagagaggaaaaaatgttactaagctctttgtctgttctattaatcctagtagctaagctattgaaataattattccaatttttaattgctttaacacagttactttgtttataaaggaaattatacaaaggctgattactagaactaagatcagtatggctccaagagttactaacattatcaaaaaaggaatgatcagtaagccaatgattttcaaaattaaatcttttatttttattttatgcatactatcatcagctaaaacaagctttaacaccctatgatccgagccataaaagctgagatgatgaagggtagcttgaggataagaatctagccacttattattagctataccccaatccaaacgctcataagttgatccatatttccaagtgaacttatcttcaacatagtgtataggggataaggaaaacttactaacaaaattttggaaattaatcatagcatagttaaggggtgaggaactactactccgatcgttaatagagaggtaattgttaaaatcatcgagaatgagctaggggagaagaggggcattatcaaaaagtctatctaaaagtttccaagtatgaattttatcattaaaataaggagaaccataataacaagaaatatgattagttatattatcttcaaaagtggcaatacaatctataaaatttaaggagtaatttaaaatactgatagtaacctccttttccaaaataacaataaaccaccacttaaaccattcctaagaacttcaaaagcattgtcaaaagagagtctagccctaagaacatcacaactacctgccaacaatttagactccttaataaagagaaaactagggttatgattttttacaataagggagatatttcagaatgctcggggactccataaccctctagcattccaacacaaaagactcatttttctgggcggggttgctcagcaacacctgcctgattcgaagaagaaacaacaattgataaaacttcattgataacagggctagccgttgctcttttgagaatgttccttagagaatctcccaccatgacagagcaaggtatgaaagctaaacatttagctcctagcaatgtcctgaacgggatcaggatcaacctgaccatgaatatgcacagtgatagcagtagtgggaggagcagtttgagaggtatcacaatgaataccaaccagagcaacaccatggaagtctaagatagggacataactctgagcagtagaaaacatgtcaagatcaagattatcgagagtagaaataggaaggctattcaggagcccttggggatttgtctcttcccttctgatagccgagccagaggaagaagaaccaacacccatcctcagtggtaaggaactggctaataacagcagccaagctttgatcaacattaccataaggcagaggtggctcttcaaacaaaaaggagttacataggtcaaaagggttacatttgaactttgatttagcaggagctttcaagggaattttgtaatgaagtagatgtggataggcaagatcattacattttttcaggtatgtaatgcatttagttaaagtgtggtcaaacatcccacaatgaaaacagatattgggtaaattttcatacttaaaattcaactatttttccttgtgaatgtttttgaaatcaactaagatacctctaggaatcagtttggaaacatctaaaagaactttaacccacaaaaatagacctgaaactttgaaaagggtggttttatctacttcaagaaaatccccaacctcatccccaatcattttagccaatttataggatttcataccgaaaggaatagagtgagcttgaatcccaaatggagaatacctgagttggttgggaaggagagtgtcaagaccagcaggatttgcactggtgaccaggcaatggtcaaagtgccatggctggccttcaattaccctacgcatatctccctcacaaccgaactcgaccatgaacatcccattaccatactcagaaaatattataggagcttgagtgatccaagcatttctcatagtttctttgaaccactcaattttgatagttcgtggagtgagaacacagaagaccaaacaaaaatccttcccaggttgctggtcccctcccatgttatcaagaagctcatggacagtagcttctttttccagtaagatttaaaacatgggccatattttcagtaatttcctctatttcccaaaacagaagacagaaagaaaaatggcagtattttttagacaaagaaagtaaaagaaagcagaagagtaaagatctccaaagtacctacacccttaaatagttgaaattagaaagatacttgcatgtccatggcttacataggaagtcagctacggagatctccatccaatcgtttagaaatcataagctaaatcttcggatcttaggtataatcatcgtttttcttcttgaaagagctaaaatggcggcatcgtttttcttcttgaaagagctaaaatggcgacatccatttatggttactttttcgattttttattatttttgttaagcataatttctcaaattttgttttagaaagagtaggttgaataaattaaattgaatattatgtcgtccttgtttaggtgtgataatatttagtattataaattagatttaaattaatttaattcacaaaaagatgtaaataagaaggcggaactattcgtattggtactgcatcaaccaatacaattcttgtgacaccgtttatccatttattttatcttttcaatacaattgaaaagtcaaaagaaaacaataataataataataagggtaaataccattttggaccctatattttgtaaaagttacaaattagatcttgtgttttgttaaatgacaaaa

SEQ ID NO: 114226 - DNA, 2702 bp, Cannabis sativa
ctaagtctaaagtgatttcaaagtggttataagtgctatcaagagtatcatctcaataaaactagattactgtttgtttgaattcttccaaattattgttgggatgtaatttttgtaagatatctcattcctttaataatactaagactagatatcactgataatattgatgtcacatctattccgatgaacttgatttttaacaaccaattggtgtagttgttattttaatatatcaaacttaaattaaaaaaataataagaaaaattagaaaaaaaaaaaaaaaatcttttttgacaaggataggataataggaccacattgggtcccgggtgcacataaatccatatggtggaaccacagtgaaacccaacccacatgcccatccacatgctcaacacaagtgcttattacaataataagataagtattaaggaattatttaatgttatgttatatacttgtgttgtctatatattttatatttaattatttaactcatctatacaaattcaaaaacattaaattacaaaaatctcaacatatattattaaaaataaaatagtaattttataaattaataatgatctatccttcttaccaaacaatgaaagaattattactttccttttgcttgtttataattttttttatcttattctcttttcttcctacctaacataagaagaattaatgcaaaagcatccataaatgttgcctacacaccaatatagtgatcaactctattgctagctcttggaatttaaataaccttaacacagttaaaaacatctaagctactaataagttatagaaaaacattgtaaaattttcagaaaaaaaaacattatgagcactaacaatcaaagcaacaacttgataatcagtaaaaaaaccaaatgacgaaagaagaaaagttcctttagtatttctcacttttggatacatttgttagcctttattttttcttcctctattgatttttttcttggtcaataaagtattttatattgagtttgatcttcacaagttttagaggagggctaatatagtttataaaaaaaaaagtcctattttcaattaataaaaataataattagaagagggtaccctagtaatacaattatgaagtgatttgttaggtaaatttatagaaatggaccatggtattagaaatagtcaacataaaattttaaaccatttatttttttaattttttactaaataattaggggtatcatccaatctaatctgcactaagtgcacatttcatattcttttaagagttttttgtagtaaaaccatccaaactcaaattttgacggtaaaatcctctaaactattgaaatagtagtaaatttaagatgtcattcgttaactgtcattatggattgcttatgtgtacactcttgtacacatgacacatttatattggtctacataatattattatttaaaaattatttttaaaatcactataaaattaaataaaattataaaaatataaataaaatatttaaaaaaaataaaaaattataaattttgaaataatttatatacttttaaaataataatattagatgtaccaatataaatttaacacatgtacaaaagtgtacacataagcagtctatattagtaattaattgtaaaaaataaattacaccttaaattaattgctgggatgttatttttaattttataaatataaactaaaaaatacatatacacactccatcattaaagatactcttatatacatctcatttttattgtctttctattttattttttatgaatgaaaatcaaataatttcattaattattaatattagataataaaataattgtcaaactaacaagttcaaactccctattagaaattggattaggtaaagagctagtagatcgactaaccaattacaatagaaatttacaatcataaatataagtccaaagggtgatagcatagaattagagagctttgagtgttggtgaagatgccaattgaagtgtccaagttagcaccctctttgattcaattaagtacctctttgaaaccaatagcttaagcaagatgtggttctacactcctcactctttcaaactacataggacacacatcaccaccaagtccaactagtttaaagtgagtgggcctaattttgtttgtaagataaagacaaaacttaacttaaaaaaaaattaatagataggatttgaatccacctctattatatatatttgtaatggaggttaattattgcactaaaattaatattatatctataaatatcatattttattacaaatatatatcataattaattaaaatatatattatttttttaactttttaagggcaactgttttcttatttttacgtggaactgctcttggataaattgatgtaccatatgtctattttttatggtcatgtgcgttatacatagtttgtacatgtaactcttttattttatacgcgtgtaaaataaattatttaaacaaaatttaaattattttgaataacaaaaaaaaaagacaatttttttggtagaagccaaaactataaaaaatgcattatacctttggatgaatcctaaaagcaccttatacttctctttcaaaagaataaataaataaaaaaaaaaagtacgtatatccctcgtatatattttgtgttacctcaaaaaaaaaaaaaa

SEQ ID NO: 114227 - DNA, 6388 bp, Cannabis sativa
  modified_base (38)..(38): a, c, t, g, unknown or other
tatggtttcatgtaataagtttttaaaataattttttnttgcacattttttgtaattatgttgtttttgttgtacatttatgaaaaaagccatattttttaagcatgtgaaataaaattttccattacaaattagtagggtaccttcgcaaggaagttcaaatgtttagatagtacaaatattgaacgtattctctaatggttgtaccttttttgttttttgtattttttttgttatcaatttagtaaagaatctattatttttagtgagcatcatctttaccatgggtttctcccgacaacaaatatcctcggtagaagttctaccaacaagatatcgttggcataaaaatataaatgaattatactttaaaattacaatccatttagcaatttccccagctgggccctccacctcacctttcttgctctcgtgaagtcttttccatacttaagatctatcaatatcgataatatggtggcctgcctctttctccatttgttcttgtaccattctcacaccacctcatctggtgcgatggttgtaaacattttttgcccttctcttttgggctttttcctcttctccgcaaattctgtactcaatctcaatgccacaaactctttccatttgtcctcatcaattatctcttcatacaatctcagtggcttctcaagaaggtggggagccctatctttaaatttgaaaatacctgttgttaggatatttttccaatccctccatttttctccagctttgaaatggtttgtttcgtcgccgtctttgacaaatcaaactcagactgaaaaaattgacaaccatagttataagtacaaatcataatcaacagtataatatacgaataataaaattaatattacctcaatgtaattacataattggtttttaagttcctcatccccattaggccacgatatatctcttaggggaatattaactctcacccatgccccaattcaggtaactgatgcagtcgctctttttccttaatgttgtctatagttgttgtactcaacttccatttttttcccttgctttttgttttatttatatcgactcatttgcttctaccacgagtatttttttactttggttcttcaggttcaacacttggttcttttggcatggatggtgcttcttcacgatcataaacgaaatgatctcaattattccaatccttgtctggtgatggttccataatgaatagtcctacacaaatttgaaaacatacaaaaatatgtaaattgatagttgaaagtaaatatatcaaaaaagactaaataccaatacgtgttcaataactcacgtattgataggtttgttcacccatcatcacgagatgatataataccgtccccaacggtaacatcaataggttatggagtgatttgatgatttggtcactaagcattagatcatcgccattagactcttagatagcataatctttcagttgtgttatcaagacaactgacaagtgtgcatctaatgaattgctcatgtaaaacgcttgagtggcttacgacaccattataaacctaccagacttgtgaccaattcgattcaagtccactaacttgaatccaaattcatcgtcattaatcccatcatcattcctaacccaaccataaaggaaaacaaggattcgaaaactactgtaatctaatttccaaatttcttgaattacactgtaaaaagacatgtcttaataagatttttttttcttttgaactagatatttggaaagtcttagcaactatcataacaccgctattctgtattttttctagatttatcacggtcttgggtgtaaaattgagtactatttatatagtacgatcggtacttgagtacatcacacgaaggacctcgttgtatgcaaagtagtgtgttaaatacgttgcttggggattcacacatttccacatacaagtggattagtgagaagatgtaaattaatataatacgtaacaaaacaatatgttaataatatattttttaaccatgtattgaaattttgataatgttcatcttgtacccatttttgattccctgccttagtcggattagtagtcttgattcaattaaaatgttctcttcaagtatttgatttattttagtttcgattgaatattattattttttaagtatgaaaaggtatgttaaacttactcaatgtatggttggacctcatcaatattttgcgaaatgagtcagtgcgcttcttcacgatcagctcagcttacaccacaaacaaaatcccctctactccttctacttatttcaatatcggcctgagtagggtgaaagccaataattgtaacctttgacaagttgtctaagcaaaattcaatcgtctcttcattgatgtatgattcaacaatacaactcttggacacttctatttctgacataacccttcaaaatttttatgtatcgttcaaatgaatacatccatctcatgtacataggtccacacaactacacctcttagactaaatgtattgttaggtgaaccactatgtcgaaaaaagaaggtgagaaaaatagtttcaaatgacacaaaacttctacaatttctaacctgaaattctcaaatttagtcacatcaaccactttataataaagagatttgaagaacaaagacaacctcgtgaatgcatttcttaggaaacacaaaacagatactcactggtagaatatgttgaatcaatatatgatgatcgtgagatttcagaccactcaaaattaatttgtccatatctacccaatctgagacatatgaggagtacccttcaagtaccttcacctgggagatagaacaacacaaagattgctcttttactttagttagagcatgacaagcgggtggtaaaaatgtttgtccaccaacaacttgtgggtctaaattggcccagatccctaactatttcaaatctaggcaaaatttgattctatctttgctctgcccagtattattgaacaaggtaataagcaagttgtctaacacatttttctcaatatgcatcacatctaaattatgatgtaacagcaaatgcttccaatattcgagctcaaaaattattgacttcttctaccatggctcctgaggttcatttgtaacgtcacatttctcacacagacattttcttttctttgaaattaatttttgctttccaaggtagaattgaaatttattcaacttttctaactgttgttctccatgcaaaggtagctgtggtattttaaattcctgcttaccgtcaaatactttttttcaagtccgaaatacatgttcgactggtgaaaacttttggtgtcctatataactagagcatgttttctcctcataaataggacatgtattgtaccctttcacactatatcaagaaagattttcgaaagctggaaaatcatttatggtccacactaatatggccttacgattgaattcttcttttctaaaggtatcgtatgtaggaacatcctcgtacaacaattgactcaagtaatcaactagagggactaagtacacatcgatgtcattaccaggctgtgaaaggcctgatatcaacaatgtaagcatagtgaactttctcttcattaccaacctaggcagcaaattatacatcacaagcaaaagtggccaacaactatacttacttctaagggtggtatgtggaatgatttcgtctgcagaaagatcaagacagatattcctaggttcattgccaaattcatgccaccgagcatcaattgatttccaagtgggtgagtcagttggatgtctcatctaaccatctaattttctatcggtggcatgtcatgtcaaattgttagcatgattaacatttagaaagaaccgaaacaaatgatgtattggggctaagtaccataatacctttatagggacaccaacctttacctcatcataattctttttctttttctacctagactcaccacacgtgggacatgatattgcatccacaaacctatcacggtataggatacaatcgttaggacatgcatgaatttttttcatattgtacgcctaaggaagataatatcttctttttctcgtagaaagacaaaggtatcacgttacctttgggtaataactctactagaaaaactagtaaatctgtcaaactcttatcactccacccgtgtttgattttgtattgtataatctaataagtgtcgataatttagtaaacatagtacaattagggtaaataggcttgtcaacatcctctacaaaactttaaaattttattgaatcgacatttgattcaaattgtgcatctcctatcacttctggaatgtgattatcctcatagtctaaattaacacccttaaccttcttagacttagatgttcccttgcccagaactctaaatcttttccccatggtgaaccaaattttataactcttgtctattctctttctaaaaaatgctcttttatcttagtaatgttgatatgctccatgttaccacatttatgacaaggacaaaaaaccaatttagaaaatttttttcaacaaaatgttttgccagttaaatatctcaccagcaaaatattttccccccaatttcgctacgcacattttccttagatgggatttttcccaccaacattttcaatagttttgccggtgagtaaatgcgcccgtaaaaattatttttcccgcgaaaaactccgtgtgctttggctattcccaccatgactttttgccagtgaattaagtcaatttcattggaaaaaccacctttcaccgtcaaaattatgcgcccgaaaaagtatttacttaagccaaaaaattggcaaccttatgctggcaatttagtttgtttcactaataaaatacaatttttgtcggtgatattcatgaaattttctgataaaaatactttttcttgtagtgagaatcaatgcataacaaaaataataaaattattcaaacaaggataacaaaacttataaacaactaaaacataactatatcccttgaatgaaaaatttaacaaatgcatcaacaaaagcatcacaatcactacataacaaaataataaaaaataattcaaacaacgataacaaaattcataaataagtaaaacataacaataatgataaaataaaaaactacaaaacaactaataaacagcgataaatcaacataacctataagaatttgtaaataaatactaaattataaaaaccaaatcaacaaaaagaacaccagaataatatcataataaaaacaacttaaagaaaaatagaaattggagatgatttctttctttaagacatttcatcaaacatatggcaaatgtacctctatatacatatatatacaaaaactcaacttataaaagaagaaacaataaaaaaaattgtgggcaaattagcataggcaataataaataaataaattaacagcaagattttttaaaaaaaatactaaattcaaaacttctattcataaaattcaaacaagataagagggaaaaaaactcacaaatcttaatataaaaatattaatagcaacaaaataaactttgaatcataggtgatagttttaagaacatatgtacaattctgagaaatccaaaatgttattttcccattggatcgcaacataggaggggttgcgttcttcacaactaggaactggtgacgacgtacgacgtttgggctcagagacaaaatttgcgccggggaggtttggagacgagaccagtgacgacggggattagagacgagatttttggcggtaggaggttggaagtggctgccattgaaagtgagaagtgtaaaatgagtgaggcaagaggagaaggtatttttataaattgttaatatgcatataaaaattttaaatatcatgtagaggtagtttagtaataaaaattagtttttatattttttaatgtaagtatatatattcaatactatatttatatatttatgtaaaaatatatattagcaatgagagccgatcaaaatgaatggggactggaaagatgttctgttctggaagggggacgaatggtggactagaagtggatgtgaggcgagctggagggggctgggagcctgggacaggtggcggaggggctgagattggctgaatggtgcttggaggtaggcggaggaagtctcgccgtcgggggttgaagagaagaagagaagaggaaaaatgagaagcagaaaaaatagttagtattttttatatatacaaaactattagcggcggacccatagtattaatggtacttgttgcccctaattttgcccaaaatacgtggaccaactggatgatgacacgtggatgggaagggtttagcatttaaataaaaca

SEQ ID NO: 114228 - DNA, 1810 bp, Cannabis sativa
ctttaggactgttagctatcattaccaagttagttataattcgattcaattagctgttgtggtctgtttagttgtaattgtttgtatataaacctttacttcagtaataatagatgactctttttgtcctttcccttttgtttctctatctttcttatttcatcttctttagctctaagctacagcaatggcgagacacttcaagattccgcaatccttcatcaaccactctcctttcacaatttcactctagtaagaatatagattgattgtcctgtttaataaagagtgttttaacttttaacaaattagagtgtaacatagagcaattagtgtaatattgtattacctattttaatttaaactaaaatatttagaagcccatatcacatcttaagttttttgaaaacatcacctccaaacaaatagctcaagaagctgtcgagtattagaggctaaactatgaactgtcaacagtcctacataagcatattagtcacataaagtgcttttacatttttttttttttgtgaaagatttaaatataatatatttcatcaaataatttgccttcatataaatataaacatattaaattatagggcataacttcatttacgggaaataaaatctcttcttttgtagctgttaagttttagagagttgaattccaaaataaaaaaaatatcaagtgcaatatgaagtaaaaggactcgtatgttgccaaaactcagaagacaaaagcatacatatagtattcacatggtaaaagaaggaaaaggaaattaaaatctttctaactagaagaatttacactttggttaagcaaatctgtaaatataaacacccctgccttacgaaacgaattacccatgaaaaggcaaaggctggcactgtaatttttctgtgtaatgtacaagctttaaaatcaaatctaatctttcaaggaaaggtgtagtcactgtttacctaaacctgctcatctatgtacaaagtgctttgtcgccactgccacttcaggttcagtgaaaagaaaggaatatcctctttcatagcgatctattaaaagaatcacctataagagggaaagaatctataaagaaagaatgtagtcagagaacaatggaattgccctcactcagtctgagaataactcttccagttctggttgttcagatttattcatagcagttgtttcaaaatctgttgcattaggctgccttttcccccctaacgcagtttcattatccatataatcaaacccaaactgctcatcctcacttatctgctcatctgttacatcatcggaatctttattttccttgatataactattatcattattgttgttgttatccatcttatggctgtgactttgattttgtggacttatttcattaggatttttatcagaagcgtcacatatgcaggcttctgggttttcatgaaactcacccttgcctggcttaatctctttaggctctcccatgaatccaatctgatgagttcgaactttggcagcaaaatcttcccatgtcatgttatatcggttcatgaacagcttatatagctttttagcattaggacggattgttggtttgtgtccaaagtatctcctgcaaaagattaataccatttcaaacaagtgatcagattagtgtttgctaatatcgtttacaaatataaagtacaagaatatattgaaaccaactgttaggacctaggattagtgtggtgtgctaacatatattaaataaaagggtaattgagtctttgtattgagggtagtgttttggagggaatacaatag

SEQ ID NO: 114229 - DNA, 2083 bp, Cannabis sativa
ctacttgtcatcctataaagttgaggtacatttatgatcatgataattaccaatcaatcttcaaaaccacgaaccaaaaagagtagtattactcctttatcatataaagttgaggtacttaattttccttgtttactagaatgtcaaaccttcaaaatgtttactttttcttttttaacacgtcacagtcattccagtccattccccaacaggtagtttcgttcacattgagagcttatataatataatatcattataatcttaatttatgtatatatatatatatttaattatatgagtgagtgagtactcatcctcggcctctgcctcttgtccatatataaccttacaaaactttcattatcttcctctttccctcactactatatatatttatgtatatatatataaatacaattcaagcatatcacttagcattgagtcccttctctttaattaattatttacaaaaatgaaagggtattcgaagattaacacgatgagcaacttggtagagagtagcagacacaaatcgagatccatagatttctcatcatcatcatcatcagcagcagcagatcttcctgatactacgtcgtttcctgaccaaatcccaaaacctaatattaatattaatactactgcaaatggagatgttgaacagttcagcactacttctactactaagaaagttcacaaagaaagggaagaagaagaaatggatcatcgaaacggcgccgttgaggtaacgatgaacggatcaggtaataataatgtggcggttctgcgtaggaacagttcggtgaaaccaacggtgaagaggggttggtcgatgagaagatcttcgtctgtgacggacaggtacagccggatctatgaccactcgggcattttagcatcagctgatgaggatattcaagaagaagaagaagaagcggttacaacgagatctggtaataagaaaaaacacatcaaaatccttaaggcttgtaaacgcttgtttggactttaatttattattcattttcatatatcgaccatctccattttctattttttttttcttttaagaaaatgaaattagtatcaagtcaagtagttattcaacttttttttttggtgattaccctccatttttggcttagtcctgcttttatattatgatgtatttgaccaataaaatatttttcttttttagtttataagatgatgaataaattgaatgctcatgtaaattaattagctagatttgtctttaaaaaaaacttgggttgagtcctaattctgatattagaggggcttccgaaagctaattagtttgtaatgtaacagtatcttattatgttgttgaccaattaatttattgattgaagaatcctatgtaatttgaccacttgcgatccataaataggtgcgaaaattttctcaaacattgctaggttggtcggttacgtcatatatatagttcgttagggaaaataaggatttagctgggcatggttaaaacgtgatttacaatatatcatgttgatcataatcattacgaaatcaatggagagatcattatcaagtaatatatttcccactcaatttcagctcttacttttccttgtttgattaaataatggatttctagattgtcacgatttggagctcgactttcctagttgcagtacagaaatgatattttattgagttgaatttcgttttatatacattcaatatatattctactaatataaaaagattaagaaaatgtattgaataaagaaaaaccaaataataataataatttggatttttagaacgtgaggggtgactggtgactggtggtgagtatggacaacgtgcactttgtgctacgtattggaaaattagaatacatatgtcgaattattatgcttccatattatgaaatagggtgagaccgctagttttttaattaaatttttttatggtgtatatagagttatatcatacatatctcaaattaatttttagaaatttatgaatattgagaaatcagctgtttgaaaattttttagattgttggatcttttttatgaattgttataaaaatgga

SEQ ID NO: 114230 - DNA, 3675 bp, Cannabis sativa
ctcttttcggttgtaactgattttggttgttgtattctgttgcttgttcacttgtatataatctgaactattgttgataataaagtaagattactctttcaatcttcatccttttctttctctgcctttctctctttcgttctctttgatttcttttcttctgttctgttatggctaagaggttcaacatccctgaatggaaagttgttgctctatagaggagattcaagctcatgaaaataatggggcatgggtgattactgatttacctactagaaagaagaccgttggatgtaaatggattttttagagaaaaaagcttgatgggagtataaaaaggttcatagcttgcttagtggctagagctttcacccaatcttatggaatcaactataggcagacttttgcgcctgtagcaaaattaaatacaatttgagtcatcttattggttataatatatggatgttccaggttttgaaagtagcttctcaaagaacaatgtaaactctataaatctttgtacggcctcaaacaatcacctcgatcttggtttaaaaggtttgctacactacttaaaatagatggttactcgcagtgtcaagctgaccatactttattcgttaaacactaagctaatttgaatagctatattaatagtctatgttgatgatatagtagttactagaaatcgtgaggagaaaattaatcatccaaaacacttgcattctaaggagtttgagatcaagtattttgggcacatgtgatacttatggcacttcttaaggaatggtagttgctcgctcccgccaaggtatctcagtttcccaatatgttttggaccttttaaaagagattggaatgagtggatcataactagttgagacacccatggattctaacattaaaatggaggctcgtggtcaaggcattgacagagccactcttgaggatagggggttgtagccctcccaagaaaaacaattatatgtattatcatataccaggtattattatattttcctaaaattttattaaaattgctattatttaattattaatataaatagtaatattacaaattaattcttatacaattaaattatatttttttaaatatataaaatttaatctagtcttaaatttatttataaaaagatatatctaactaatattattaaacaataaaataagtaaataagtttaaatattttaaataatataattaataaatttttaataaatgtgattaattaattaaattaacgtccaatttaaatttaaattaagatttatgttaaaaaaataattatttaatttcgttgatacttttaaataattagttaagttatatttagataaattaattaattttagatatttaaaactatttttttttaaaaaaaaataattaatttaacagtatttgtcttcattggaacttggaagtatagtgttagaatatgggaataaggtgaatatggttccatctcaaaatcaattggcaatggaaggactagcccatttctattatatattctattatctttttacgcattagcaatgtgggactctctaacatcccctcaagatggtagctattttatttgctcaccatcttggacaactcgatcataagcggctttggcttactatccctgatcacaagtggctcttttgctctactttttagatcggtatttttagatttttggctcttggaagttgtttatcaaatcctaaaatacccccagttccatgacatctgcagcttatgtatattattggctgtttaggggacgatcatctcattgtgttttctctctatagtttgttacataattatcatttgtaagtgttaagtcaacttgtatttccttctgtctattagcaaaacatattattacctggagtagcactgattgctgaaatggaaggtccataattaccagctgttggtatgcaacaagttccttttccagcccaaaaaagatggatttcaaggtagttctgtgaaacccgagccttgaattccatcgggactcgcttgaataaactcccacctgcctctttttttatatcaaaattttgtattactctatttccctatgataaatttgcatttcaaatagtcattaatgcatgttcaagagaaaattaagagagaaatcttaggacaattaggtggacattacttggatataaatatcgaatatacgtctgccaaggcttttccaggtctgatcattttccatagaaatttcagcaaataggagtttgacagtgtagttaccattctcaagtcccagaccatagtatctcagtgatgaagaagaaacccttgcagtcaagaagagctcagtgtcaaaagtatctgtgaattgagatgatgtactgttaatttggtcggaccataggaaatgtccaacattgcttactgcccatcttttagagctgctgacaaactgagaagctgcaccaagactctcatcatctttctcatacacaaggccattagaagaggtaattcgttcaccaccacagttgatcccaaagttataatctgcagtgatcaaggaagaaaaataagacattaaggcagcgtttggtttggttggaggtaataaaatagaaagaaaataatttttattacattcttttatttggttgcattaaagccttggaatattattctaatggaatgtctttccacaactttagtagaatgactattcaattttgaaataaaaaaaaagaccattacaatgcaaaaaatttaataattttttttattaattttgtttatgcatttaaaattttattctatttcatttctattcttattataccttctcatttctatgcttatattttcattcctccgaaccaaacaccacctaaattaagtgtttatcattagaaaaaatataattaaataaacaaactgtacttacacaagggtcgatctcgattacatggaaaatttctttgaaggcagttcaaacctaaaagaatattactaaaaacaaattaagataaattagatcacttatggaagttaattattcaacaataaaatatagaaactttatttgcttagctataggcgggaaattattctagatagcttgagagaaaatggaaaatacctcttctttttatcatctataatgaaattgtttccaaccaaattactgcaccaaaaaagtgaattataaatactagttatgcatttatttaaatcatttttttttatcatctttacgtgttttattatgcaataaaacaagaattaatgattacagaaacatggtgtataacacctttatgagatattataattatatcgtgcaattcaataccatgtatacttattttactttactaatggctctataaaactgctaactatttataagaagttatttcatagtgttatactaggtacttattgtggacattgtcccacatagaataaatagaagagtattgatatataagaatatggctacaccactcatcaccaattgattttgagaggagtagcctatgttcttatacatggcccaaaaggtgaattataaatactagtcttgtcttcatgtaagtcgttttttgtcatctaagtctttactatgcagtaaaacaagcatcaacataacacaaaagtactaaatc

SEQ ID NO: 114231 - DNA, 1489 bp, Cannabis sativa
aaatcatgcccctcaaactttgatatgtactaaatcatgccccctccatgttagaattttttttaacggccaaaaaaattcaggagacatgatttaatacatgtcaaagttattcgggggaaaattgctaattagccaagatcaaactttacctttaaagtttacagagtaagtgaattgcttggtctatttgaattacctcttacttttaatttttatatattattcaaagtcaaacaaactaaaactcagaaaaacatacttaaaacattatagttatctacatctgcgtcctatatctaagaaaaaaaaaatattatagtgctctaaaaaaatataaaaatttatttatttagaaaacaaattagatgtgcgcatacatgaaaaagttgcacaaataatttttcattcctctaaacaatttaattattttgtctttgaacaataattaactgtggccaccatgcgagtatagatgactcatgcaaagggattcctctcaaattggattaatcattcatatataagttaacctcaaaattaaattatttattactttaaaaaaagactatattttttaaagttaacgtgggagagggatttgagaggagatatatttgaggagagagcttaaatgtttccataactgagaaaatgaaagcaaaaatcacatacccaaaaattcagatgaggaaaaaattactatatatataacagccaactttgatggtggcctgtgcaaatggtggattaattctgttgttggtgtaaccctagaatataacagccaaattttgcattgatcatcaatttaataagttcttattatttctatacttcaattatttaatgaaatttcttcatcacttcaagaacaactattctcaacttcgtccgtacctttgttgaaacaaatgcatcttaatcaacaaaaatcaaaatggaattgttgcaaaggatagcccccatagctgcttggaggttttgccaaacagtagtgtggtttcagagttggagtaatactaatttatattctagttgaagggttttagggtttaattttttttttcaaactaaaaacaatcgttaaaccaacaaattttgttagatagccacattttatatataaaaatataaatttttagtatgaactaaaatccaaatagtgagctttcaaagactagaacaagacttcatgaataaatatggtggtttcagtacgcaaacagtaccgttttgggatatatatcgtcttttttgtagcctgaggtgagtggtggtctcatgtttgccctggttgtagtcgatagagacatgcttttcgttgtcgaggaaggtggaggaggagaagttgttggcagagctgttgcagcggtgtgagattcgaggagaagtgtggagattgggtatagtgaggaatgatgggatgtggtggttgattgtaaagtccttttttggcaagttaggtgacaaaataatttttcctttt

SEQ ID NO: 114232 - DNA, 3616 bp, Cannabis sativa
  modified_base (32)..(61): a, c, t, g, unknown or other
tttagaaagttcttatttaggatgttaataannnnnnnnnnnnnnnnnnnnnnnnnnnnnntaaaataatttccaacaataggctggtctgtgttcaggctatccaagtgagttgcatatgccgtctgagtttgggttgctggttaatgattgcagaattgttttatcttctttgagtcatgttgctattcagtttgttgaacgatctgtgaacaaagccgcccattgtttggcgcgtagctcttatttttacccaggtcgtacttttcaagattatcagttaagtcctgaattgcgtaatattgtactggttgattttgccggttaataaaagtttacttttattcaaaaaaaaataaaaataaataaataatatattattagcttttataattaatttacactttttatattagagcactaataaaagactaaatataatttatcttttagactaaatttatcttaaaatgtacaacataaataaaaggtttaggtataagtaagtccccataaatattgatgagaaaaaaaataaaagaaaattgtactgccctttcgtcctccgtctcatctcgttcattcatcgtcaatggagaaactgaggaaggcagtgaacgagatcgcgtactgtaaggacctcactaagctttctcctctacatcgtacgttggtccctgtgctctcattcgcatccgctctctacagcgttgctctttctcttcgctgctctctctaccagtctggcctcattcatcgcaatcggtacgatcctttccactcccctttctttttgtttggatcctcagaaaacaaaagagaagagaaagaaaacttggagtgtcgtgttaactcttattacataccgaacacttcttccgtacgcactaagcagtatgctctaattttagctttataaagaaaagtttggaatgttatatgctttcgctaaacattgtgctctaatgtttgttggatgtagcttaatttttcgttcgatttagaagaatccttaatgcatttttctttctttctttcctattagtattattattttaactttggtcctgactgttttgtttttctttcgatttcaaggttggcagttccgttaattagtgttgggaatttgacatggggaggtaatgggaagacacccatggtggagtttcttgcgttttggctagccgattctggaatttcacctctcattcttagtagggtactattcttaatttctctgttttatttctttttttatttgctacaatccgtagttaattctgtatcgaactttgttagaaaaaaagaaagaaaaatctgtatcgaactatctttttgtctcactttaacaaataattatattgaaactcactactctaatgaaagttgtagggtttaagaatctggcgccaaagaaaagcaaattctaagacaatataatgtgaaattctaatgttcaggggcaataatctgggaaagaaacaaaagcatagtgataggaattttcctgtcaaaattaatattcagcagcaagagaaataaaggagcaatagaagatgaaaatgcaatccatattcgagtccctttcaacatctttacaacatctccatcaaataagtgttgaaaaattaaaatatagctcatttataaaaaaatgtgctttaatagtgtgtcaaaaagtgatgtaaatttgacacatagcaaattttgtgtcaaatttgacacaacatttgctataatgtaaaatttacatcacaattaatacactatttttttatttatatttatgccatttgcattattttattaatatttttaactaaatcactaaattatgaaatgtttatattatttttttattgttttacatattaaaataataataaaattgataataaagttattaatttttatttttttttaataaaaacattaattaaatattaaattttagtgtattaatactaaaatttaatgtaaatcaaccacaaaactactttttgtgtcaaatataacactatttttacatttttcattcgagatggtcttatctcaaaaagttacaaccctcataaaatgctagacaaaaacttacaaaaaataacaatccttatttatagctaaacctgaagaggcctactgctcagctctacccaaacaaaacccctataaaagaattactacacagcagaattattcatccccaccattatacttcctagtcttcctagcatagacataagtcaatggaggtctatcactaccgctcgacttgaagtttcaacttatcctcaaggtgaaaggaaggtatatgacagagaaatcttcccaagttgcctctaactccagtaaattctgccatttgatcaaagcttgggggctggtcttgtgagttttacggcatattccaagcacagtctcaggttccaacatccactccaggttagctgtaagccccggaggcagaggggaggcttgttggttgggacctaaagcagtacgcagtaaggaaacatggaacacgagatggatggttgcttcggaaggcagctgaagccaatatgcgattgttctaatgtgagctagcacctgaaacagaccacaatttcggggagacaacttctcattaggacgtttagcaacagtatgctggcggtaaggctggagcttaacataaaccatgtccccaacttaatattgaacatcacgacgcttgcggtaaggccggagcttgacataaaccatgtcttcatttgttgttgagctcagaacaaattttgtttcaacaaactcaaaatagtatcacggtcctggagcgcttgttctacagcgaatgccttggtgctagcttgttcaattcgaagtaggggggggggattacgattgtacaaagaacgaaatgttgtcatgccgaaagatgagtgatgacaaacttgctatttggtaacaccaaatattaataggcagcgcttgtaaaaggctggcaggagattgagccaaatatttgttttgttgacaaatggagcactcaactacgaacttctgaacgttcttgtacattctgcgcaataaaactctgcaaccagccgatgaaatgtcttaaaaacccctgaatgtcccccaatattgttgctgtaatattcccttaagagcaagggaataaaaggtgacacagcaggtaacaccagcctaccacgaaacttgagacatccttgcactagcgaaaaccccccaccatcatggttatttgcgagttctttcaggactttagagagcgttggattcgctgcattacgagcttgcaagtcagggatagacaacacacttgggacaaagatggcagcaagagagacctcaccatgaacacgcaaaagagcatcaacatctctattttccaagcccgacttatattgaatttcaaagtcataccccagaattttagtgagccatttcagatgttccatcgaaactaaacattgccccggtaaatatttcaaactcttttgatccgtgcgaactagaaatcttcttcccaaaatatcgcagattggttggaaagttgaattatctaactgtgacttgtccagatattgcattcccagttagtgtcatt

SEQ ID NO: 114233 - DNA, 1354 bp, Cannabis sativa
  modified_base (1262)..(1264): a, c, t, g, unknown or other
ttacataaaaatattacataaaatacaattcaatataatacaatacaatacaataccacttaatacggcgttccaaacgagccctaaggttcttaaactaggaaactagagctttatttcctataaaacagagcttggttcaatgatcaaattggagaaagttcaagatcctagagcttttgtattcaactgaccaattacataatcaaaaagaaaagagattaataaattcgatgctatagatgattctcactttggagacatagactcaaaggaattatggtagtgaagaaagtagcaaaagttctttaagataagacattgttgtctaagaatgaaccaaagagggaagaaattgtctactatacaataattttgtcttagaacttgtctatgaagaaagtaaggtagcgtttgattgaaaggaatgacttttgttacattctgtaaaatttattgtccatatttccaatcatgcctcagaactttaatatgtaccaaattgtaacttttgtctaattctgtttagctgttcaaattgtgctcccaaactttaatatgtattaaattgtgtttcccgaagtttgatatgtattaatataccctttaaaatttcatcaacgtcaaacatgtattagtcgattgaacgaaagtccttgaattcaaccatcttaatagtttgggaagaattttcaatgaccttgaaaattcgagatgcaaaaattagaattatctctaatattttcaagaagtgtgcatccggtggcagattcagaatttaagtcgaggaggacatactttttttcttaaaagtggggggacatactatttttttctaagtaatataacatgttaaaaatttgtatttttatagtattttaaatataaaagtaaaaaaaaaaaataacaataaaaaattttacttcaataattaaaatactaaatacgaatcttattaaagaggttaaaaaaaaattaaaatactaaaaagtaaatatacttttgttgagatttgaacaacctccactatgtatgattcaactaccataccaaagtttaatattattatttttaatagaaaatatatatcttaactaactaaaatatatatacattatttttctatttcttgagaggcatctgtcccacctcgcttcaacgtgggtatgggtgcattcatgaattttacaatgagatttaattcatcaaaatacttgttcaaaaaagaaagataaaatttaaggtgtgtttggaagtaactnnntaattactaggtagggtaattacatagtttagtaattacactatggtggcgtttggttactaagtgaaaatggaatgggaatgggaatag

SEQ ID NO: 114234 - DNA, 3188 bp, Cannabis sativa
  modified_base (362)..(363): a, c, t, g, unknown or other
  modified_base (490)..(516): a, c, t, g, unknown or other
  modified_base (3144)..(3144): a, c, t, g, unknown or other
ttggatatccaactttttgtaattggattggattggatcggttcggttcaattggattggattggatgatgcccactcctagttttacccattacttttaccactcataattagcttttctatttattgaatgtcaattaaatattataaaaactaaataatactcttcattcatttagtaatcaattgatcgatcatgaaactcatcataaaataatcatttgtctatattcaaatatatatatagaaatacttttacacctcacaaaataaccattacactctaatacttttttttaaaaaaattaagcttaaactaatttttaagtagaattacctcatatactattttttaatttttnntttcaaatttacagtttgggtttcaaaagtagttgcagcgctaagttgcaataggagtttctatactattttttattgcaatttaggttgcagtgcaggttgtaataggggtttctatgtagaattnnnnnnnnnnnnnnnnnnnnnnnnnnntttgaagtgtaaaaatgaaaagctcttttttaaaatcactcttaatatttttgtaattttttttcttctaatattattttgtgttgattttaatactgattttaattttttttcataatttttttctaataaaattttacgtattttttatttaattttttattataaaatttaaaatataatttaatattattgaatagatccaaacataatatgtacctaacgtacttataacaataattaatatattgcaggattcacgtttttgtcagataataatatactaataataactataagaagaaaatcaatgcaacaatgaagtcaagaacaaagataattaatatattttattaacttgtctatatcaagatatatatattagtaaattatttacatttatggaaaggaaaaatataactacctacaaaatgtttttattgtaaataattacaagttaattcgatcaaatcactttacagaataattttgtctctgtcaataaatttatattttttttaagcattattacgacacataccactggttttggtgcagtattacgaaactgtagtggtgaaatcattaattacaaactaatcaaattaatgtttttgatttttattgtctgttatttcttttttagtgtcccattttcttaaagtttaaatttctcatgtctatagaccggttaataatgctactcatttattagctaagcatgttttttcgatggacatcgattgtacttggtttgagaatttcccatctcctctaataattactatattatgatctttttgttttaataaaatagtattttctataaaaatacaaagtgtgatataaattattatttattttttatgatattaattaaattaaaataaataaaatatatataatattaaattgtatcaataataatatattttttgataaataaaaaaattatattgctcaaaaatcaattagattaacgttgaaagacacgagcgacacctagcactattttaagtattatatcactattagtgtaattagtatcaaagtttatataaattaattttaaaaatatcactaattaattataggggtgttcatataatccgcaatctgtgattctaaaccccaactaattcggaccaaaccatttgagaccagaccaaatgactccgatgtgaatgatttgatcatttcggactatttttacgatccaatgaagggcaatgctaatcgcaagaccaatattgaacatgagaaagatccgactaaccagtcaccataaaaaggatcacaactgataaggagcccatccctgaagatccgatgaacgaagacgacaatcctaaaagaactaatttcactggtcctagtgatgatcatcaggatactcctaacgatgataatgtggaacaagagtactatttcttgaaagcaatataatatgattgtattattattagtgtaatttaatattaaatttctgtatgttaatttaataattactaaatattagttcagcatggttctatattacctaagagaaatactcaaatgtacaaatattagttctagtagtatttagcaccaccaaatatgtacatgttatatatcactaattttctaactaataagtattgaattttgctattgggtattagtagtgtctaatactttttataggtgacgccttatgatttgttagcgatattttctaaaatttatctttttgaagttatatggaaccaatacttaattatactaattacagtatgacaccaaagagaagatacgaggtaccaataatattttttaacaattctcttaagtaataaatcacacaaatttaatattaaatatcaataaccattaacaagtagtattactagacaccattaatacataatagtagtaataatggtgacctgattattacatgctaatatatgtaattactttttttgttataataatgttgtctcttcttactaacaacttttaatatttcctttttaattgatcattattaattattgaaagtgagacacaattgtgatgggatgggatgttgtctgttaggttttaagggtgtttattggaccaacatttaatatgtttagatttattgggatccgatccaattatatattagaggttagattttaccatccgatctaactatattaattccagtaatctaatcaatccaacaatatccgttgaatattgatttggatcgtttatatctattgaatgtatttcacatatatattgtattgtttcggctttattaaaattttagacttagtagtttttagatcaggtcgaattcatctaatattttagattcaatatttattgaactgatgcaatttaaaaaaataataaagtaaaattttaatcttaatttttatatatatatatataaacatctatatttttaagtataacaatataaaatccaattactcattaaaattaaattaagatattaattagttcgattggatattgtatgtatttgatttttggatacctcatgcaatatccaatttgattcggtcatgttgagaatcatggggttctatctcaaaaccaattagcaatgagtggagtagcccatgntcttatatatgactcaatacttttacatttaatccatgtaggac

SEQ ID NO: 114235 - DNA, 1017 bp, Cannabis sativa
attatttatatatttaaaattattagttaaataaattattcataatcttattaaatatataattgataattgtatttaatgtaggctaagatgcagacagcaatacaacttggacaactagtggcaagcattgggagtatagttctcacttcacaactatgtaccataatgtgattattcattattatatgtatacaacaaacaataagctttctttccattttttctttatgtttttttaaatgatggtattttgaaactgttatgacatgtgattgaaaaactagtcggtcaactctctaaacttaaaagctcactaattgtttcttttaagctagttggttgtcaaaagttagtttagtatgttaagataagggtcaatgtactcaggtctttaagtgtataaatagactataaattagttcagttttgagggttaatgctttagagttcatatttgtaattactatgttaaagagaggagagagagttgttaaggaaggcatatgtctatgatcatgctcttcccattagtgaggattttgtaggaagttatataaactctgttgttgttttgttcattcaatcaacaagctccctctctttcagtcattgtgtatagattaatacaatcaataaagctaagtttttctctcaaagtttagtgcatttaattctgtttaattgttgttcatcttctctagtttattgttgagttttttatttagtttattattgaattatggtgatcgaatctcaaaaattggtaccaaagctataggctattgatccaagattcaagaatctattatccgcactttcaaaaattagtatacacagtggtaatttagttgacatttaactgtgaaacctaactggtacttcaaattcgtaaataaaagtaaacttaaggaggtattaccaaaaaaagaaatcagagaatttagtgtataaaattaccctataatatataactctgttctacataatcaataaaattgtgtgttttctctaatt

SEQ ID NO: 114236 - DNA, 1811 bp, Cannabis sativa
  modified_base (34)..(41): a, c, t, g, unknown or other
tatttctgatcattattaataagtaaatctgatnnnnnnnnaatgggttttatttagggcatcaaacccaacagttagctctatcggaggggctagaatggagggggcgtgtttctaacatttttcacatttcttggagtggtctgccgaatcttcccggaatgtcagccaataatacccttgcctttggactctttgggcggttacccgtcccccagaatggctgccacattctccttcatgaacctctgttagaattagctttccttcttgcctcttcacgcattttaggtatggcccattgtaggatctcttatacagctgattctggagcaacgcgtacgttgaggctcttgtcacaactttcctcgcctgtttagggtctgattgcaatttatcatcccttaagtattctagaatcggttgcctccagtcttccagtgcctccgccagaacttcagtgcattgaaactcttcttccttcgtgatgctgagctccgtgacaaagtcgaatggtattgttcttgtgatgtggagggaggaagaggatcctaggcctgccagggcatcagcgtgcatgttttcttctcgaggaatctggttaatctggaaatactcaagggttgacgctaatttctttacctcggccagataactgatcatttttggctctttggcctcaaatccccttagacctgctgaactattaattgggaatctgactgaactaataccctgtcggccctcatctccttaaccaatttcattccatgaattaagccctcatattcatcgtcgttattggtggctcggaatcataatcttattgattgctccatcatttctctgtctagtgataatagtactattcctaccccgctccccctgacgtttgaagacccatctaccttcagcaaccagtccctttcgacgggctttttctcataaggaattggttccggagctatctcgactaagaaatccgccagcgcttatcccttgatcgtagtctgtagaaggtattgtatatcaaattcgctcagctctactgcccatttcattagcctcccagatatctcaagtttatgcaagacccgctttaatgggaacaacgtcattactgagatcgtatggcactgaaagtacggtcggagttttcttgccgatatgactagggcccaagctaattttttgattaccgggtatctaccttctgctcctaaaaaggttttgttggtgtagtaaatcggcagttgtgcctttccttgttctcgtaccagtactgagctggcagcatacttggacaaggagaggtaaaggagcagggtttcccctgtctcaggctttgataggacggggggcgtcgtcaggtacctttttaatgcttccagggccagctggcatttctcatcccacttgaacttttggtttcccctcagtaggtcataaaatggcaggcttttatcagagagctttgaaataaagcggcttagtgcagctattttcccagttagcttctatatttccttcacggtctggggttgtctttttacttggaaagcatctatttgatctggatttacttctacgcctcgccgtgtcactaagtggtctaaaaactttcctgacccaacagcaaaagcgcacttagccaggttgagcttcatcgagtgagcaaggaggatctggaagcattcccggaggcgatcaacgtggtcagacctgtctttaaactttaccaacatgtcgtcaatgtaggcttccatggtcagacccagctgctgagagaacattttattcaccattcgctg

SEQ ID NO: 114237 - DNA, 1648 bp, Cannabis sativa
agtaaaaaagtaaaaaataccgcttggcagtatttttgtaaaaaaatgacaaaagttagcataccatataaattttccaaaataaaaaaagtaaatcatctcaaaatagccataatacataattgagatacttttctaataaatatatataatgtcgatattttatatattattattgtagatacttgtatcatttataataaatatataaaaggtagaaataatagaattgttttctagattataaaacactagcaaaataaaatacatgtctcattcacttatttgagtgtgtgcaaaaaataaataagagtataataacgagtaaaataatatttttgggcaattccaatgggcctctataaatttaaaaatagtgagatttcaaaactaaactcttccaaacacagggtaaaagtcattctatggtttatctactgtataatttttgttttaatttttaataattaaataataatttaataatttaatattatatattatttataatatatcttcttggtgtaacacatgcttttattatattaataaaataatgaagaatatatattttagtgttgtgattggaattaaaaaaaaaattaataatgaaattatactttttttagtgttagtttaacactatatttaacttttatgtttggagatggccttagttaaagactttgaaaccactaataatatagtttgtatatgagtagtgagtggacatgtacaaaggcttttgccttttaaaactcacgtgtggatggtggtggcatatttatttaaatcggattaaaataaaaattgtaaatctcgaagtggttcaaagaaatcaaataaaaaataagcattgtcataggtacgtacatgaatattagtttcttccaatttaagaaaaattattgaggattttgactaaaaactttgtatctaacataatttatttgatttaatcttttttttttttaaaaaaagaacaatatttgagaaacttctgtaataatattttcttaaaagagagttttaaattgaaatgcaatcatatcaaaccctataaataaaacaatgcacgaggaatacctaatatattttttagtaataatacatagtacacttcttttgagcatcttagtaatcagttacttattaatggtcaaataagttattaatggtaatcacttattaatgataattagttattaatggtaatcagttacttattaggcaggatggtcatttatttttctatatttttcttcttgttagggttaatgagcttgctaatcagtttaagggtattcttatttgtagatctgcctggttattacatatttaatttttaatgatgataatattttgtttgatactgttactcctcactcttgtattgctattaagggcattcttactctttgtcaatagtttgggtctccataaaaaaccttctatattagtaaatatttgagtgttcctcagtattttggtaggtctaagaaatctacttttaatgacttagttcaaaatgttagttataaaactaatcactacaaaaaatagatacttttagtgataattttttggtcacaacataaatttttgtaactaaatgtgacttttagtcataacaaaaagttacttgtga

SEQ ID NO: 114238 - DNA, 2805 bp, Cannabis sativa
  modified_base (2744)..(2767): a, c, t, g, unknown or other
tcttattccaattcttatcttatagtgctttagttacataaagtgatgtagtagtagctagcaaggctttaggcttagaaatgtcagctctggctctagtaattatcatgtaatgagtgctttgagatggagctgcaagaacaggtgcaaggtcaggttgggaaggtggagaatgtgatgtggatggagtggatgtagaagtgttatgagatgaagcagtggatggagactacttagaaccagaaaaggaggatggagaagtagatgaggtagacacaagtggtgggagaaaaaacaggtgtagtagtaggcatggataagtatttagtttgagagtttggaatgggagtgtgttgagtggcaaaggaaaaagagaatttattgaataacacatctctagaaatgtatattcttccagtaggagacaaatatttgtaacatttatgttaacctaagaatgtattgactaacctaaattaaagcttattcttgttgtatagcttgatgttagaaaagtaggcacaaccaaacaccctcaatgaggtctaattaggagatctttggaaaagaacttgaagaggagattgttattgaagaacaacattaatatgtaatcgatttataaaaaggttgcagttcacacaacttcatcccagtaagagagggggcataaatgcatgagcaagaaaggtaagatcgaatagactcaataaaatgcttgtgtttgcactcagcgacaccattcagttcatgagtggtgggacaagagactggtactcaccactctagtctgattgaacaaatattatggcacaattaaatttattttcaacctaatttttgaaattgatgaaagtttgtaaggtcccaaatttctcttttagcaaaaaaaattcatgtgtacctagagtatggatctatgaaatgtatgtaatatttgtagtcatttcataaaaaaatgagcaaggaatcccaaatgtcaatatgaatgagttacaaggggtgagtgtaaaaagtgttagagtgaggaaaaggaaactagtgaattttacttttgcaacaatatatttcacaaaaattatgaataattttattgacatcaaaaattttacaagattgcatgtgctttacacaactttagtagatggatgatccaacctgctataccacaaaaaaaaaattataacaacttagtacattgaaggcagaatttgtaacattattgatagaacatagtggagatgattgaagagaggatgaagttgaagagggatgatgagagagatgcatttgagattgctgaatgacataaagtccttgattaagctgcccttgtaggaggatttccctggaagtttaatctttcacaaaatagtgattaggaaagaattcaaaataggcattattatcagtggaaaattttgagatagacattaagttcttagtaatttgagggacatgaagaatttgattaaggtatagaggtttagatgagtaaggagttgtgaaagaggtcttaccaacattttgaatgggcataccgacaccatcttccacatgaacctattttgagccaaaataaggatccttgtttgtgaaattatttacattagtagtgcaatgagatactgctcctgaatttggataccaagcatcatctgcaatggtatcaatagtgattatgttagtagatttcctatcaacattggttgcaccaactcctcgaaacaccatattgaatctttggtagcagcgggaagcaatgtggccaaatttggagcagagttgacacataggtcactaatgttgccagaggtgtgagagtaaaattggggtgaattgaggacgagtattgcggccaattccatgaggaggaggagtagacagaccaggagagaaattgccatgaggattaataacatagggattccatgaacctcgaccaactacgtttgaagaagtaggtcgattactagaaaagggagaataacttagatgcttgttacaattagatcgattcatagccagatttattgagccaagatctttagaatgatatccatttgatgctcttgagagagtagcaaagattcaatttcaatgactgtgtataaaatatttttagagttaaatagatgaaaagcgtgtcatagtcaagaggaagacctttgaagatcgcatctacatgttctttagtcgaaatagcatgaccaacgaagctcaaacgattgacaacaatcttgatacgcatgaggtgttctgaagttgagtaacaaactgatcaatcttggtagatgtttgagtgacaaagtaaacctcgagcgttttcaagacctaggcaaagatttcacagccaattacatgagtgagaataccttcagtcatagaggaaagaaaccatgagtaaagaagctgattttgaatctcccactgagtgaactgtggattaacaaattcaactactttatcctaattggtgagaaatcacgatgaatgagcaaaagattcatagataaaattcaatagctggtaacctttaatggcagagagaatctaaggtcgctaaagaagaaaattatcattgtcaagcttaacagaaagtttgtgagaaaaaatttctagactgaacgaagcagtagtagtagtgtgagatgttgttgtagtggcagagattaaattagacatcgtcggagcaaatgaagtgaatgaaaatgttggaatttgtgccctaaataaaatccatnnnnnnnnnnnnnnnnnnnnnnnntaataaagatcagaaataaaatttaatgttgcatggtt

SEQ ID NO: 114239 - DNA, 1544 bp, Cannabis sativa
  modified_base (946)..(948): a, c, t, g, unknown or other
gtattttttaatgacgtggcaaggtattattgtaattgagatttgttaagttatttttgtaattattttgtattttatgtatatttttaaaaaaatccctattgtattaatcttgatttgtctaaaattgggttgggccaggcccgacccaaaataatatatacctggccggattgggagcccgataaaagcccgaataattcgggccaaagtcgccccgtagggccggaggcccgacccgcgaaaatagccctaattgccatccctacttggtggtgtatttggttccgtcgaaacaagcaagttcatgaaaacaccattctccctccacagttagtaggaccatgggtctccaatttcttggcttcttaccagttcaattgtcgcaatttagggtctaagaatcttgctccacctccgagtgtagcaccgatggcaatgccctcgtgaatgacatttgtggtttgagtatggtgtctcgagattttcatggggtagttttggctactactatttggaagtaccagaaatggcagaagctcttgctctacgtcatgcggtcactcaatgcaatcattttggttttcgcaacattcagtttgaatttgattgcaaagacttggttgataagcttaatcattcctccagtttagattcatccttgaaattagtcctctctgatatcaaaacatcttgtaatctttttaatactatgagttttactttttgccccagaactattaatattgatgttgatactcttgctaagtttgctatatcaacaactgtaaatacagtttagtggcctggaatgctcattgtattagacactttattttggctgatgccatttatcaatgattctcctaactctcggccccattgagttctttactctatgatagtgttttctgaggctattttttcaaaatataataataataannntaataataataataataattcttacaactaaacaccattccaaccatgattccaaccccaaaattgagaataaccatctttaattcataactaacaaccacatacactaattcacaacaaatccaatttcatatatacatataaaattaaggtataaaactcaaattcatacctcaaaacttctaaaaactttttacttagcagtctccatagaaccccttgaattcttgaacaaaattgattgaaaagagatgatgaattcttgggtttggtcttgtctatggaggttaaaaggaggtttaggaaagagaaagttttccaaattttgatttctctacctatggacttttaccaaaatgcccttactcacaaaatcacatatacttaaattaaaggttaaaagggtaattcccacataaactcataattcttaaatatctataaaaattctcggtacctcttaaatactaatccgtactattgtgaccagggccggcctcaacattttgggggtctcgtgtaaaattttaaaattgggcccttttaaaaaaaaaaaaaccatatatattaaaactacaattctattagtagctttt

SEQ ID NO: 114240 - DNA, 2776 bp, Cannabis sativa
gacgtgtcattcgaaaattactccaaatagttttagctcttcgctccttaattctctcaattttaaattttttaatatttatatatatattaattaattatttaattaaaatatatatataatctactataccaactgtatttcacaaatttcaaatttcaaattttcaattttataatctatgcataaaattaattatcaactacattttggaagttttaatctaattttattatgtttattttattttaaacacatcacattataaaaataaaattttcatagattataaaaaactggtatttatgttttggttctatcttgattgtaaggtggattagtattcatttatttgatactatcttatattaattttgaaaatatattgattaaatagcgtttttgtgcttcacaatagcaacggtatacataagaaatcaaaataaaatttgcttattcaggaaaaaaaaaaaagataaaaaaagaaaaaaaattgcttctaacttatggcacatgatgttaacaaaatttagattaatttggagtatttagaaaagtactaaaatctttttctacctgctttttttatttagatttttgaaattagtacgcgagtatacaaatttcttatttcttttattttttttttcttatttttattcaattttttaaaatttaataaaaaaaattttaaaatatatttatcattgtaatatttttatgcatttttgttagtgtactcaactatttaaatcgctatctaaatttaaatttatgacatctttaatttcatagagtttgacatatttaatttaaaaagaaaactctttataataaatagtattagttttctcaattaattttcaaattttaattggaagatttatcaagtaacttataaagtaaattataaaattctcttatacacttataattttctttagctcctattttttttgttattttttggttagttttgttaattttgttttttttaatcaaataatagctttgaatatagtggcaactacaagtgagatacgatgataataacggctttaaaattatatgataagatatctctattttatgagaggattcatcaatttttaatattttctttagtataagatatctctttaattaaatgattacaaataattaaaattaaaaatcaaataagttgattaaaaattttaaaatataaatataaatttgatcagatacaattctatttatttacccattattaactaatagatttatttagtatatttcttaatatatataactgtaaatttaaagtgaataattaactcattgtttatttgtttatttattttttctaatacaaatctatttttcttttttgattagtggttaacctgggaaccacaacccgaaaacaacaaacatagaaacagaccaaacaaaggccaaagaaactacaacaggccaaacacagccagcccctgctaactaaagcaaagaaaaagagagagacaaataaaagaaaaaaaaaccgaactaaaaaactagactaaactacaacatgaccatctgcattaaccagttgcagggagtcatcaaaactggccaaatcgataacccaaaacttgttgttacgatttgcccattgagccacgagatgggccacacgattgcaggatctaggtgtccaaatgatttcccatagattgagattagcagccattgaagagaacctttgaaccaggtcctggatgttgtaatgcaggttatgtatctcaggggatgtgctttttaatgttgcgacaacatttagagaatcacattgaaacacaacatttttgtaaccgagatccttggctgctgccgcactagtacagacagcgtaaatttctgcaggaagggggtcgcaatgactcattctgcaggagagaattttctgctagtgatctcccgaattctaatacaaatctattggcaatgatagttatgagcaaagtgagatactatgataaagatgagaacgaatttgaatgtaataatgaccacaaatgagatacggtgataatagtaattttaaaatcatatgataatgagctttctataaatttatcaattgttatacaattttgttgaattctaatttaatttattcatacaaaatatatatttaaaaactaatcatttaataatatatctataaataaaaaaattaattaaaaattattatttattatgtttaaaataattaaaaaaattaatattctacaatattaatttattttagctatattactaagattaaaaaaatgaaagtttactaatatttttttaaaaatatatttcaaaaaaatgatcaaaatttaaaatttgatatagtttttaacttaattatcaataaacaaaatacaaccgcacgcgaagcgcgaattgtttcctagtatatatataaaagagaagtatgaagtggtgatccttaattctctcttttttttttaattttgtattaattttatatatagtaattaatataaaatatattttttccttaattcattttttttttaaaaaaataataactaaaaaaatatatagttattagctttttttttttttgccacgttgtgcctttttttaaaaaaaaaaattaaaattttaaaaaataatatatacaaaattattttctaaatattttattactttttaaaaaaatcttctattaccacacaaaaatttattttctaattattttataattttttttaaaaaaatcttctaccaaattcta

SEQ ID NO: 114241 - DNA, 4848 bp, Cannabis sativa
aaatatattaattttggtgtagttttcaagagttgatttgaaccattggattaaatcaagggctataaattaatatcccaattgataggtaaaaattacaatccctattgtattagctcccttaatttatatatatttaatacataatttatatataataatataaatatatatataatatagatttagttttgtttggagctaataatgattttaacatattatacacaaaaatgcaaagtcctcaaatgctaaaaaactaaagctaaatgcatatccaaagcaccaaactgaagtgaactaggtaagtgttgaaatctccataagagtgagtctttatacagcatagtttggcctataatttacttgctattacactgattttcaagtccaagagaaagattaaactaacactatcttttcttaaaagaaaaaagaaaataactaacactatcttaaccacattatataagcagctaacttggtttaggtacactgtccatcttttgttcttgataagattatgaacggaaaaaagaaaggtcaagtggaaactttcctctgaaaaatcgtaaagctagcttgttgagaaaacatttgttgacatgtaaggtgacacacacccttgaacctgaaaaagggcagatctcatttttataagaaactacaaatcagcttcttacactaaactgttaagcaggtaaacggaagaaaaaaaaaatagaacaagaaaatgggaataaaatttttcctattgatagaactgtattttaacagatgatataaattaaaatgccaacattgacagagattttaggtttttgtttgtgttttaagtgttaactagctaaatatctgtccaaaatatgcacacagcttggctcaggctacaaataggatggcattgggagaaaatacagcaagaactaaaatgaccaattgaccaggaagatatattggataagaattaattacctgcaacaaggaagtaggaatttggataaaaccctgtaaaaacagatcaactttttccagagtgcttggtggaactggcgtaatgacatatagcacacctttcaaagtgtcaatacctctcacaatccctggttaacaaaaaccaaagaacagcataaagtcttaattaagaatgctgccaatatattgtataatgcttccacacaaaaaacaacacatgccataataaacacactagttagttatccttgaccaatacaaaacaaacaaaaaaacagattcctgcagagagagaagcttgttactaggaactgaaaaatctacttggaacaatatgactttaagcataaaaagaggaagaagataaattagctacttaacattctgaaagtagagtttactatttttgtgatacaaatacaggacaatattagtattcaaagggaagagctaacaatacatcaggtgtattagcacgcttatcaatccttaagcaacaaggcaaaattactccacattcacaacgattgttgcacaaatccactaggttgatctagtggtgaggaggagggtgggtcgggaaatgggggagaccaacgttcgaaccttggatctctagattgttcttagagccattaagcaccaagtgtgccaatgatgaaaaacaaggtctgttgtgaaacttcactttcagatcttttggtcaagtaagaaaatcatggccaattagttgaatcttaagcggcataacaaatgtatgagatttcatgccaccagtaaattaaaaattaggaataaatacttcttaatttcaatgaatacttctaatgagtcgttaaaagaacaacatacatctgtcatttagtatagacaattaacaatccattgaattcagtgagaattgtagaagtaacctaccaagacccacacaccaaggtaaactttcagactcttcaaagctaacagccaacccgactatagttgcattcaaactgtaaaagatttcagtaggtgggacctgcaatgataagaacaaaaaattaaaaatcttctcctggttgtgaaattaacttagaagcagtgatacagaccatcaatttaaaaaatgcattacaaagaaacttgatcaactaacttaaccaacctggctgtagagatgtctaatcttaatgcttgatattggaacttcataaggaggttgtgaagccagtgcatttgcaagttctttgatggtagagatgttcagattacttgcaaagcactgcctgaaatatgccataattcgtaaatcacgcataagatgtgcatccttctgaattagaaccctaggccacaagagagataagatagtatgaggaaagggccttgaaagaaactctctatgttctcgggacattaaataacattagtcataaaataaaagtgacaacttttctagacaagtttagatttaattgactttaaataccaatcttgaagatttgaaaatactgcaattaagattttagactaccacatgtatagaaactttgttgatgtgagtcttctaaacaaaacttaaaaaaattaaattcactttgattcaacttcatacttgagaaaacaggtatattcacataaattgaattagaactcagaaattgaagaagtaaaatcaatcaatattaaaaattacttaactaaaatatgtgaatctccaatagggtattgcagtcatgtaaattgaattggaactcagaagttgaggtagtaacatcaatcaatctttaaaattactaaactaaaatctccaatagggtattacagtaactaaaagtaatgacaaaaacagtaagctgcttttaattataaaggtcgaagagttttgagcattttaaacttacgatctattatatgaatcctgacgagcagcatttatctcaattagattcaccatctcttcactgtggtagtctaaccaaaatgccccacctggtagattcttattcttagtggatatgtttattttcacaacatgggtaggagcaatgtacttcaacatatccaccaaaatttcataaccaacacctgcgtatgagaagaacatgaaattagtcacattgcagagcatagaaagggatttcaccagagctttgactcaagatggctcaagtggaacccaagtaggtcatagttaacttgaagtgatgcaaaatcagataaatggaagatacctttcacccagcctggtgtattaacaaccaaaggcaactcactcttagtagtcttttccttgttggctgtggagtactcctttctatagtaatcgtatagggcagatatgtaactcaaatatccctttggatccctttttgaggaagtatcaccgaagaaaaaggatctaacaatggatagaatgtgatcattagattcaattcaagatgcacttttcaaataaatccccacacaagtgaaaataagaacattgccagtaaaaaaacatgaagtggtgagaaggctttgatatcttgtacctctctggagtcttgagacaaggaattgtcaaatctgttttaaataaagaaaatcacaaatcataatcttaactaacgagaccagcactctcaacagatatacaattacataatgttaacaagattttaattcaaacagacacttcaattttatttattattcttttttacctggagttaatttgtcaactacagtgagagaaagaaacccaggagtagtaaactcagactggccaacatctgtatccaaataagctacttttttatacctgcaaagaaactgaaaatagccttagcatataaacaataataagaattacaatctcacaattgattggactaagactacactcaagcatgaagcccaaattcaacaataaagccactaaatttcatattttggtacccttctcaatgtaaaaaataaacagatatttgaaaaggcaagtagaactccaatacaggcataatatatatacatagctatactaccaagcagatcaaagtttcaatccagtcgaaaagaattcatgaaaaacttcggaagaacatatatatttaggaatgaagagtagataggatggaaaaagacctcttgagaagaacgttgaggaggtggcgagaaaaggtggtctttccagagtttttggcgccgcagatgaaagcaacaggcggaggcgaagtgattgagtcgtaggctatggactcggcggcgtcggaccattcttgaggtatgtaaatgtccggcgaaggctgttcaggttctgctaccaacgccatggctatagctctctctctctgctccaattcaatgtaagattttaaggtgttagcggcgatatataaatatagagtatacaagtatatacacacaatggccgtgtatataacatattaaatgtgtgattattcatttggttgacactgtgtcactcaagtaacatttttatttttcttaacaaaaaattaaaataaagtaacaataattaattataattatttgttttcaaagggaaaagaaaacaaaattaaaaaagaaaattttttatctttctcaatactaaaacatgttcaataatttgattaagaaaaatgaataatacatgtggtcatacgagtggcattattttcaatgaaacaaacaaaaataaaaaattaagaggttgtttggcttagtaatttaaaaattgttgtttgttttgtaaaattaaaaaataatttttaaaaattaataaaagttgtttggcaaaaaattttagaaaactgaaaatatcaaaatgttattttcaatttttaaaaacaaactctttatcaaaaaaaatttaaaaacaaactttttttaacatattatattttatat

SEQ ID NO: 114242 - DNA, 7412 bp, Cannabis sativa
  modified_base (1048)..(1054): a, c, t, g, unknown or other
  modified_base (7362)..(7362): a, c, t, g, unknown or other
aaaaaaaaaaaaactcataaccctatagtggtatttatttatgccataaaaaagtaaactataccctcaatttctatatttatgaaaattcccaaaaatattatacaaagcactataaacatttatattgtctagtaataaaaatttatagaaatacttttttctctgaccattcagtcgcacaaaccacattcttcaataataacagcttccagtaacaaaatcagtaggccgaccgtgaagaaaccaaactagacgaagaatcacataaattccagcaacttcacttaagaagaagatcgtaaaaaatctaaacacatatagttttggatttatacaaaatcaggcaaaaaaactagttccaaactaaaatttaaccctaaattacaattaaaattgaagaaaaataattcttctaatatcaattttcagattcataaaatgtagatttgtctgaaatagatctggagttcctcattaatcgaagtcaagtataaactaaaataaactataatttgggaaaattacaactaacagtgcggaatcaaatcaataaaactctagacaattaaacaattagcaatgacaatattaacaaaccgagaacaacaaatagaaatacaacataggcaaacagagtatatataacgctagaaataattaatatagaaaataaagaaatcaacaccataatattggttcaagtcttatagatcgatgagatctatggctctactccagttctagaactccactgaaatctttctttattgattgagcaagaatatgtacaatatagtcgagacgagattctctgttgagtcctcacaaagtgtttcaactcttacactttacacccagtaatcttcttaccaaatccaaacccaatctctctcttttctctacacctctctctctctacctctcgatctttttctctctcaaactctcaatctcatcttaactatgttctcaaactcgtgcctctcatctcgtgttcagtctgtcaccaaatgataagtgaaggtggtatttataggcttaggannnnnnncctaaagtcagtggctgcaagaaatgaggttgttaagttagttataactaacttaaccaactcctctttgagcgaagtctccacgctagcttaagtatcagggcctccgggaacataagtgagctcccaaacccaaggactacgagacactcactgaagatgcttccgcataggattgagtatgctagagtcgactatctgaaactaccattccaggagggacaactagccaaccagaattccatcatggactgaggctagctatcctgagtactagatctggagtggacatgatagtcatacgggaactccctttcgaactcgactatcattctacaagactccttccgggattggcaaccgcaagtgaacaattttttagaaatgatgtttacggagacatttttatttggaggaactatacgacagtatcaatacactagccaatgtttctctcgttgcattaacattattttccaaattttcaatggtgaatttattcatatcaaataatgaataacaatgaaaatttgagcgggattattgtttttgaccattttacccctatgcttaatagttgcttaagttttattacgaagggtattttggtaatttgaaaaagggatttggtggctgcttgggagagtggcagctgaccactttgttttatctcagttgaagtaaatggtcttatacattattcttttagaaagaaattaagaaaaataaagagaaccttagaatttcaccttttttctccatctttcttgctcgacttccacacaaccagaaaacaacccaaccaagctctttatttttatggaattcaacaaggtatcagcaagattggaagttgctcaaagtcaaggtaaaccctagatcattatctttgtgttatttaagcttttagttgagtttagctttttattttgagatatagtggttgtttaggttaggatttactctagggcatttctagaggttgttttaagtttgaattgattatttatcgttggttttgctggtttatttgtggaatgagcatgtttgagcttgagaactcatacttggctcattaatggtggaattggattctacgattgtatgttgtttttagtgcttgaaaattattgttggatgttataggtgttctggaaagtttggctaagtttgaatgcgttttgggcaagattttgattacttaggcaaacctgatgcaaaccagttaaccggctttccaggtcctgtaaaatcagttaactggttttgggacaagtttcccgtgcaatccattttgtcgattcatgttgtattcaaagccttggttggctaattttttgatggttagggtattgttatagtagtgaccaatagcagaacccttagttggagtttgagtttcctagattagggttttgtttgacatgtcatttacccgtatgtgactagggcatccatctagcacgaagttttccatttaggtcggccaactcacttgaatttagaaatgaggtaagattagtataatgatattcatatgtgttcacatgtttagtatacatgtttattaagcctgttagattacatcgatagcggtatcaatatgcgtagagttatatttgatactagtatatgtatgtttggctcagatactgatcgatgctatcacatcactacagctagagtatgactagcgtactaagtataggctgatattatggtagataatattatcctatgaacgttttagactcattatcgtgttagacacagggatagggttatggttgggtgtatgggcacttaattataataaggtttcagttatgttattaattatgcttttcttactgagtctgtcgactcacagttgctacttccatgtgtaggtaaatgaaaggcgaaagttgaagaggagtgagctctgagctaggatggtgtttgtacatgtcatggcgacacgacctggagttttcggtctcgggacatttgggattttattttgtagtccctgtacgaccagattaaaatatattttgataatattgtaaaagtttaaatacaggatcccgacttttgtaaataattgtatgaaagtttgtaacgtttagcaattaaactaaaagttttaatttgacacgattttcaagaaaaatcctttgaatagcaaaggtggactgtaattaaaaaatcattgtaacgcgcctaagtatcaaggcgttacaaaaatgttttcagcagcattaaccttcgatgtcttcttaacagggcgacaatcacttttcttggtaagcggagcaaagtctaaatcatcatcttcaacaatgggtcgttttcctttagacttgttggcaagagacttaacatccatttttcaaggttttttcagtaatggtgatggggaagatgaagacaaagtagtggccatttgcattttagggtatttatttctctatcttttttagcaatatttagtatacatgtttaccatacatttaatatatattatcacataataatatgtttatcacattttaatttatacttattatattacaaaataatataacaaaaggtattagtgtaaataaaacaaaatgaaaggtaaaaatgtacgttggagtagccttgtaagagtataagcgtaatatttctgggtttttgtatgttttatgtaaatttttgaaataattaattatatataattaaatggaagaaaaatacatttcttttttccttctactattactattatttacgacgataatgagtgattttgttttcccgttagtcagacataaaaatgtaataactcagattacaaactgaaaaaagaactcttagtattaattttctttacaaccacatagttatatatatatctttatttttattataaaatgtggataactaatagtttttattagtttaatagaatattttaaaaatataagaatattttgttcaatttaacagtgttagttgggttagtttataaatatataaatatttatattatttattttagattaatttaaatatttataaatattaatatattatttgttatattattattttttattgttattgtaatattcatattttttaactttacatttattttccttaattttttaagtgaaaattacatgaaagatgagatttgataagaaaatttcaaaaatattgcacttataagttagccactctcttatgatattttttcacattaaagttttttatagtatttgatatgtcacatttttgtaactctaatatacaaacatatattttatatttttgtttctagcccaattaatttatcttttttttttttggtttatttgacatttgcattttggggtatttatttctctatcttttctttctactctaatatttttagtggattttgtatttgcttgggatataatttgattattagagtgtataacattgacacacttctatttttgttgttttttatatatgatttctctccatcctttatttttattttttttatcaactcagatttttgagcaagcaaataaaaaataaccaaaatagtgaattatttaccgaaattttcagaaaccgattaattagaacttaagaaagaagtaaagtaataaataataggcacacagttttttgacgtggttcagacgtttattatccttagtccacgagtccattttattagcttcataggcaagcgttacatattacaagtgtctacaattcagacatccacctcctattccttttattgctctttaaagaagaagaagcttttaagaattttagcagaggttctataggttgaagatcctcttccctttgttcatgaaataatggggtatttatagaaggtttctttatcattatgccttcagagctagccctactaccagagatctgacagtcgatctagtaggtggtcgctctatcatgaggtggatagagattcgatgagtaccgtctaaacactccctacgtatcatcccaaggtcttccatataagaatcaccctcttaaatggtcgctggataattgataggtacgatggtgcgcatgccttgtactatgacctaaaattggggagaaaaactgacgttgtaccagaaaaagcattgtcatcactcttgtggtctgacaggtacggacgaagcctttatgtataaggaattttgatggggtggtctatgttcactagtggtgccttgtattcctctggcagatgttcagtcacctgctcacctctagccttcttttccacttgtgcctttacctgtacctgttgatcctgaccctcttcaaccacttgctgctctgccattggcctctcatatttcttcccacatctcaatgctattaccttacaagtctcttttgggtttgccttcgtagtgctagacaaattatcttgggtgcggttggccatttgagtagccaactgccccctttgagtctccagagttctaatcgatgcccttgtttcagccgtaaaattgtagtagaaaattaaactaaacactagaatttccaccattttttttgttgagtgggttgttgagtttgttgggtttgctgttattgttgttgcatgtatccttgttgatgacgattcccttaaggaaaatttcaattctaagggtagttcccaataacttgagcttgttccatgggcaggtcatcaacttcaataaagtggcattgctcataactatggggtcctccacacaactcacatttaacttgttgagcttgttttactttggttgtcattagtttagtagggcttcaacttgagtagttagtttcatgattgcatcaacttcatgcaactctgccactttctttgaattgctccatccctaggccactattgatttttcatgaccatctcttctaagagctcataagcttcattggcactctttctcataaaagccccacaagctgcaacgtcaatgagagtgcgagtagtacagcccaaaccgttgtaaaaattatgaaccagcatccacttttaaattccacggtgaggaaactttctgatcaagtctttaaatctctcccaagcatcatagagagattcattattaagctggtaaaagttattgatttttattctcagtttggcagctttggctggaagaaagaaatttgagaggatctttagggccggttcatcccaagtgttgattgagttagatggcatagacatcaaccaaatcttggctcgttcttacagtgagaatgggaacaaacttaggcaaattgcatcatcgctaactccattcatcttgaatgtttgacaaagctccacaaagttagctaaatgcatgtttaggtcttctgatggcaatcccctaaactgcactatggattcaactatttgaagaatggctggcttgatctcaaagttatttgctttaatggcatgtgatttttatataggactggatccctgccgaagtgggtagcacataatccctcaagcatttatcatgtggattgcgaccattgacctggtcttctacgacacccccattattgtcattattagccatggcttcttctaattcaacccttgtagaagctctttctaaccttttgtttcttctattttgcctacaggtcttctaaatttgaggatcaacaggaactcttctagtttgtccttgatggcgcataaactacctattcttgagaaaaaaattaacacaaaaattagcaaaaagcagaaagagaaaacccaattagaataaaatttaaattttttaatattaacttaaagtagacaatggaacaaaaacattatgtgatttttccaacacgcaagtgtacgtatcgttttatcaggtaatactcaagtaagtaagattgttcctacgaggactgtagctaaataccaaacaattaaattcctgattctatttggaaatcaaatgtaaggattttaaaacaaaataatctaagaaaaaattaaataacaaaataaacaattagttatggtaaaattaacaatgattaaagtttagggtaattaattttaattgaatctattttaactggtttaacataatttaattctaaaagtccaatttttatgtgatagcgaatttattaagaaactaatatttgggctaggacatataaatctcaacctatatataaattttctattctcgtgataactttaaacacataggaggcattaaacataaaaattctaaaagctacatagaccatatatgtaaagaccgcttagatttaatttggaaattagcagatanttagggctttattatgaaagttaaattttaatattgaattaattatttat

SEQ ID NO: 114243 - DNA, 3232 bp, Cannabis sativa
  modified_base (3186)..(3189): a, c, t, g, unknown or other
ttctgtcataattgggtttcacatataaattttgttagcagttgcctattgtattctctttaaattgtttgttcaaccatttacgctgctctaattctgattttgatacgtgtttgtaattgtatatatccagatatacctgagcaaagcaacaaacagctacttctcttacttatgtcgttctctcttgttgatatgggaatgacagtagctactcttcccaaatcaggagggagtttggtccaccaccatagctctccagaaaagagtatatacaagcctgcatttaaggttttgttgcctttgcgcaaccccaacaagtcacatgctgtagttccacttatgaagcccaagtcctccagttattctcatatatcaactaaaaggaagaagatgagaaagagtgttccctttaccaatccagattgcaccacttctgatgttctgaacttaatggatgccctttgcctccctgtctctccagacatgtacaattcttttataagagaatgcacaagctctgctcactctcatcgagctgatgatctgcacgcgcatatcaggcgaagcggcctccggcaaccacccttatctttactgaatcgcctcctccttatgcatgtgtcatgtggtcatctagaaatagctcgccatctgtttgatggtatgcctacaaaagatttcaagtcctgggctactattgtagttgcttatcttaacagaaatgattatgaggaagccatgaatttgtttctgaaaatgctgcaccatatcagtatgctggaatttcctgcttggatcttggcctgccttcttaagtcgagtgtatgcacaagtaatatggacttagggaaacaagttcatggctgttccttaaagttgggtcatgctaataatttgtttttggctagttccttaataaacttttatgggaaatttaggtgtctggaaagcgccgaaaatgtgtttaaccaactggcccgtcataattcactcacatggatggctagactgatcaacaactccaaagaagagcgcttctttgaagtatttacagactttaaggagattggaaagtcggggatcaagaagaatgccttgatgttctctactgttttgaaggcttgtgcgagaatgcatgatcgtgggcaatgcggtcgacaagtgcatggaaacgccatcaaacttggattagatagagatgtgtatgtgcactgtggattggttgatatgtatggaagaaatgggcttgttagagatgcaaaaagggtgtttgaaatgagtagtgacaagactagtaacgcatgttggaatgccatgattggtggttatatacgaaatgggttatatgttgaggccattaagattctctatgaaatgagggcaactggattgcagcttcaaccatctctgctcgatgaattgaggattgcttgtggtagtaatactctcatttccatggagaactttaccccaaatagagaatgaagttagaaattgggataaagaaaaaggcattgctgctattattcttgttaataatagattttagaatcattaactcgaatgatataatgttgggtagaaaatttagtattattttgtaaatattaatcacagttcaccgtcttttgttgtatatgtcagttataatagagtcacagttggtattgctataatctggtatacttcacagtaacaagtctcgcagcacacatggaaactttttcatttctcatttgaatacttggtaggtactaccagtaccaccaagatcagcaccaacagtcggtctgccttggcttacgccctatacttgagcctcaagtaggagtgcaaagcaaagtctaaatttagaatttagagctccaactccttgctaaaataagaggcctcgtgttaagtttttactggcatgttaagagctcattctcaggtctgacacgcaaatatcatgtttgtagtcgtagactatgcttggcttgagttacaaataaaagaaggaactattttataaatactctaaaatagcaaaagtttacattttacaaatttatagtttttttaacaaatatatttttaagaattttagttttttttgtaaataaaaatacatagtgtatttttttcaattgtctttacattgctgctacgagaaataatatttttctaaaaaaaaattggtaaaaagacatagaatacgtaaatatataaatgtatatatatatataatctatagatgcatacataaaaataatttaatttttaagtatattgtgtaaacttttctataattatatatttacagcactcacaatatcttctttaaaataaggaagatttataatatttgaagaattatactaaaaatagatatcaatagtcaacagatgctctaattttttttaaaaaaaataatttactatgatttacgttatagaatactattaattactataaacatattttattatttattttaaattttaataattattttttatgagaatatgtgtatatattaacattatatatttaaaaaaatttattgaaaattttcggagaccgactataaaataaataagattaagaaagaaataaatgaaagaagaaaagaagaatttttatgtggttcgagagttaatgatctctagtccacaagttaaaattattaagttagaaaagttttttaaagtattttttacaagtgttttggtcttagaagatgaaccctaattcttagcacttgatcccaaaacatgtgtttcaaacgatcgatccctttgcatgaagggatcatgttctatttataagtgaaatctgagtatggataaactcgaacccaatagggtttaaaggtgtcaattatgctcaccgatgggtaaaatacaatatatattgactttgggtcaattgagtgagacctaattcacaaaataacgatcgttcgtacgagcgggaactatttgagaatgccaggtgtcgtgcgcaatcatgtctttaccaaaaatatcattgaatattgagttggaaaaaaaagtggttgcctctttgtggtacacgcactacacatgcctaaagtagggaacaaacctttgacacagcgggccccgtgtctagtggacaccacagaaggtgatatctgaaaggagaaatgctaaagggcaccactggtgcctagcaccnnnntacgtgtcaatatcgctattggtgcaattaagtatcgggtccc

SEQ ID NO: 114244 - DNA, 5560 bp, Cannabis sativa
ttattattattattattatcttcctctgcttcttcaaacttttctttatttaacaagttatttttttttttcatctgggtttctttttcaacagttcattaaaagggggaaaaaataaataacccgatgatcaagtcattttgttttgttttttcaaaacgattttttattttttttcctcaattttcttatgagtaataatatttaaatgatctttcccggattcatatccattttcccatacgtattgcgtgcattttgatatatatatatatatatatgtgtgtgtgtgtgtatacacgcattagtattagtgttgttttacctgaccattcattaatgcagtaataatgaaacaaaaatctcatttttattatcttgatggggcgtcctgatctttgatacatgtaagaggttttatacatgtctcatgtgtttcttcttttggtcttaaggaaatgtattttgttttctttggtcatctactctttcctttcgttttagtcaatgtttgatcactgaactgaaatctttctgtgtttttgctacagaaagggagcaagctctggttccgaagaggttatttcctttttgggtttgttatagttcttgagataatgctgaggaagagaagcaggtcaattcagaaggatcaacaccaaatgggtcctcaaccagtttctgattctggttctgactcctttcccaaaactgacatttggaataatatgaaaagcaactctttttatagtgttcctggtctgcttgtgggtttaagccccaaggttttagcagatagtgattcagtcaggagtccaacttctcctctagattttaggctgctttcaagtctaggtaacccatttaggtcaattaaatcgtctcaagatggccaacatagaaactggggaggcactaaccataaagtaggcctaagcattgtagattctcttgctgatgatatgaaaaatcccggtaaagttatccggtcatctgagagtaagaacattctttttggaccaaaattgagaatcaaaaccccaaatggtcaaacaaataccaattatttcgagtcaccaaagtctctgcctaaaaactatccaagtttccatcgttcaaaaaccaagtctcctctccagaagggcagctctaatgttctttttgaaattggggatagccctttagagcctgacccatttggaaaaatacggtcttgttcactagattcctgtaggacaatttccaatcacccttccttgaacaagtctaacaagcccaattctacctctttgaaattttgtttggagagagatgttaccaagggagttggttcttcccagtttgttgaaggaagtcctaagtcaaacctatttcctggctcaaagctgagtacaatccctggatccataggttctggcaatgagtttggctctctttcagccagtgaaattgagctttctgaggattacacgtgtgtaatcacacatggtcccaaccccaagacaactaggatatatggtgattgcattttggaagctcattctaatgacttgagtaactctgttatgaaagagtataacaaggatattggactccgtgagctcataaaagctcctaagatatctgttcctctcccatctgataactttttgagcatttgtaaccattgcaagaagaaattggcagcagacaaggacatctacatatacaggttaggatccattaaacttggctattgtgtgtttatccaaagctataaatggttttgcttttaatagtatgatctttcctgcaggggtgagaaagcgttctgcagtttggaatgccgttcattggagattttgattgacgaggaattggaaaaatccaataataaaaactctgagaacccatatgattatggtggcaaggagcttttttgaaacaagcctcattgatgcttcataaagactttttatttctttaattagccttccaagcctctgattgataaacaattgacaggaaaaaaacaaaggatagacgtcactgatcatctgtctatataggagctgtttatgtgcatcttttggcagccatagatgatcgtttttgtacattgttgcgtttactaattacgtttcagctccatggtcatggtctttgtgggtgatgggttgaattcagctacgctcttttttcttttctttttaattagacatttcatatgttagttaaggtatcatttccctatattgctttctctgtataagggtaaaaaggcctagttttttggccttcccaccttttattttaatattacgcttttgatctattacaggctctaccatgtaaacctgaccatgtattaagaagtactattacatatttgatgaaaaggaaaacaaaaaagattatagtatactacttctttgttctttttcaatttctgcatttatgcaagttatttttagcaatgatgatcttactgctaatactatctacagttttgatttaccaatagtctttacaagaacaacttccattaacaaaacggtgaaatctatagttatccctaatgacaatttctctgttgaaggcctgagataaaagtttcatggccgagtggcaatcttcacacatcctcaaattattcacaacacgaataagggttgttctagagttgcttattaaaccaaaagccacagctaacctttcgctatgatgagcagatgtttcttgcagtcctagtttttcaaacctgcctttcatcttatccagcaaggagtagatttttgatgagtgggggcttgagaaatccgcagttgtaaattcatgcataactccctcgtcttctatcagactacatcccggcgtcttcttaactcctaaatcgaaaagcttctttctcgtacggcttgcgtcatcccatctaccagcttttgcgtaagtattggaaagaagaacataagctgcaacatttagagggtccaattctatgagctgttgatatgcatactctgctaagtggacattttgatggcttttacatgctctcagcaaagagctccatatggagatgtctggtttaacaggcatcatttcgataaatttcagagcctcatttagttgccctgctcggcttaggagatcaactatgcaaccgaaatgctgtacattaggtgtaatgttgtgaaatttactcatttggttgaaatatgagagcccttcattgactaagcctccgtgactacaagcagataaaagggctatgaaagtgatatgatctggctttattcctgcagcttccatctccatgtaaagatctatagccttactggttcgcccctccatggaatgtgctgctatcatggcagtccacacgtatacatttttgtcagtcaaagcagagaataattcttgagcttttttaatgcacccacatttgccgtacatgtctattaaagcagttcccaacatgttatctatcttgatattattcttctgaatgtagacatgggtccaaatgccatgactcagtgctccaacactggcacaggatgatagcaagctgatcaaagtaagcttgtccggcctgatagtcgcagaacactgcatttcctggaagagcctgaacacttctccagatcgattgtatttagaggagcagttgatcatggtgttccatgaaatgatatccttgttcggaatcttaccaaagaagagtgttccattttcgagctctccatttctgcaaaatgcatccagcatcgagttccaggaggcagtacttttgttaggcaactgctcaaagatcaactgagcctcttttggttcaccaaattttgcataaaagtgaatcagagcatttccaagaagtccttcagccattatcccacacctcaccgccaagctttgtatagattttcctaatttgtaatcttccacatgagtacatgccgaaagtactgtcacgagaagaacttcatctaccatcacattttgaagcctcatttctctgaataactgtagactttcgttgtagtgacctccctggacataaccggaaatcatggtcatccatgaaattatgttcttctcagttatatggtcaaacacacacctagctgcatgtattttcatggacttcatataccctccaaccaaactagtccacaaagcaacatcattaccagtcttgcttctagtcacaatctcatgtgctttatccattctcccacattctatatacatattcaccaggcagttcaacaaatttccaccaatctccaaacaatttctcttaatatagaggtgcagcttctctccagtttccaaatctctcagtttcgaacaagctgaaagtaagctgatcatggttatattgtcggcagcaactccatcaaattgcatatcttgaaacagattcaaagccttttctggcattcccatctgtacataacatgaaatcatggtattccaactgatgacatctctatgaggcattttcttgaacacctgccggacttcatcaagctttccacattttgaatacaaagccatcaaattgttattcaatgacttattccttcccatcccagacttcagaactctgccatgtacctcaattcctttttgaaaggccaaagttttacagcaagcatgaattaagaagtgaaaagtggatacatctaatgccaccccatgagtaaccatgtcagagtaagtcgagaaaacttgtttcggagaatcatttttgaggtaattctgaataagggtattccaaataatggtctctggcccttgggtgtgactaaagacacgatgagcataacacaaattttcaattgagaggaaaaaacgtaagacatggctggccgtgataggatcatgaatgaggtttgtggtgatcatgtgtgcatgaagtggagtgaagtctctgatattagaacaagattttaacaaggaaactatactggttggtccaggagctggattggagatgtttttggttggttcttgagttggtagagaaagagatgagagaatagtgggaattgctgcagccattttccaatactagccgttagttccctccattaagaatgtgttgtgttgtttgtggatagtgttatggataagaacacttgcatcaacaatatttggcctggatatgaaggcgacaacatcaaatcaaattcaaccaatcttacaagtctttagaggttacttttttctttctttcttttttcattgctaatagttggcgaaacaacaaaaaaattatagcaacaataattccaactatttcactttatacgataaaatgtgatggaaaagcatatcaggttttattttgtcattgaaaatttagtatgtacaacactttgcaacaacttaatacatgagtaatgctagcacatttacaaaatttataaaagaagaaataagatatcttattaatttcaaatgaataatttaaagggaaattactctatatactatttacttaacttttttattttattttttttaatttacggtttgggtttctaaggtagttgcagcgctagttgcaata

SEQ ID NO: 114245 - DNA, 1589 bp, Cannabis sativa
  modified_base (1488)..(1514): a, c, t, g, unknown or other
  modified_base (1540)..(1542): a, c, t, g, unknown or other
aggatgttaatgaaacatacatggtagtaaatctagatccttgggaaaatatttccaataggtttaacagtgattatgggatcacgatcaacatgaggtaaggtcgaactagtcaagatctgacgaaaatcagaaacaattattgaaattaaatttttatggtttaggtaaattattgtattatagtacggaaaagttatttcaagatctcaacgcttttaacagagctagtaaagagaaggtagtgatctatgtggacagaaaaatatttaatcggattccaagagctgaggttataattgaatataattttagtgttaggttggtcatcaaatcaagagaagttcatgttctattgaaaggcatccagacaggatctggagtatgttctaatgtaagtcgatacggttactttttattcaccttgtcaattaaaggagtataagtagtactacttaaatcaatatctagaacttataaatagaggttccatacctagaagctgatagaatatggattggaggcaatgattgaaactagctcaagattgggactgtacaatttgttaataccccaggaaggccaatacagcggcaaaagtcctacataagaaacatcccaatcaagttttagtacaaccttgattttcttcttcagctagcaaatgtcctagtcaaagttaagaatggagtttgtactaggtaaactcataggtgcttagttggtgtaagtaaattcggggaaagcccataagaaagccctaacaggctagctcagaggtaagcttgaaattagatcacagaatgctacgtcataaaactcatgtttgtgtttcaagcaatataaagctcagaaatgagtttttaagggaagtttgcaccactccttagttgttatactttgatgctactaaggtatactaagacttgaaattttacttgatgtagaatgctaaaggatgtggtgaacaataaattcaaaggcttaatttgtcagtgaattagggttagtattccgaagttgataaggttattgtaatcggtttagtttcacgagtaaaatgagaagaagttgctggaaatcttgtggtcggattacctaaaaacatgaatacgtttgattttgtatggtactacttgggtacatgagttagtatggaaattttttaagggaaatagtaggatttatagtatgttattttggataattaagaaaccaaaattcatctttaagttttagcaaagtgtacagagagctgacattatatagttgaagtttagcataactttctacccttagaaaaatagccagttcggagggacaatttaagtattgaaatatatactgcaagttaatgtgataaattacaagaacttatggagcaaatatctaatttgatcaagttcttgtgcaaccagcagttgtcagagtgtaatagggtgttagaatatgttttactagggtatagatttactaccatgtatgttnnnnnnnnnnnnnnnnnnnnnnnnnnnaaacaatgtaatttaaacacatatannntttgagaaaccttacagtgggtgccgcggaattaaatgactccttcc

SEQ ID NO: 114246 - DNA, 2978 bp, Cannabis sativa
aataaaaatctttttctaattggctaattttaatttaattatttaattaattcaaatattatttatatatattatccagttctagcgaagaagatgaagttagttcaacactgaaaccaaccgccatggctctctctccgaagccctaccttctctattaccctctccattctccgtcaccgtctccagcaccggcgaagctctctttctgctcttctctaccgccgccgccgaagaattttgagatctccgctgctctgttcgctccgatcgcgctcagggtttcgtggagagccaagtgtgttcgatcggctactcaggaagacaaccggagtgaatctgatgacgctgtatcggaagatcagagctcgatttcggctaattctaaggtttcgccgttgaaggttaatacgacgtcgtcgagcgattctctatctcttgggattcgtgagcctgtatatgaggtattattactaatcactttatctttactatgattttaagtatatatagtggaaattgattgagattttttgtttataaggtggtggaagtgaaatcggatgggattatatctaatagaaaaatcaataggcgtcaattgttgaaatcgagtggtgagaatagtcaattagtttggatgaaatgtcttcactgtacgccattgatgatcttctttgttaatttgtatatttttcagggcttcgtcctcgtgatattcgaagtgttgacccttcattgtttttgactaattccgctccttctttaatggtattattatgagattttactaattattgttttagtcactagacattgtgaacaatttcgagaaattttaaataatttacaaaaataaagttgaaaatagttaattacactcgtttataataaaacagtcagtgaaactgattatttgaattattttttcatcactttaaattatttagaatttcccgaaaacaagcctgaaacatacaataaaaaaactataatatactcgtaaggtagtggcaaaagtgattcggctacctaaaatctttcaaatattatgtacatgaatgtaacttaaaatggcccaaattcgttagttttctatttggaatccttattttgagtacactgtgagtaagagagctttgaaagttgagctatttgataatttacaggtccgtgagcatgctattcttctaaacttaggctcattacgagctattgcaatgcaagaacaagtcctcatattcgactacaatcggtgagaactttatcttcttgatatactacttttaagtgttaaaattactaacagtttgatgaactgtatatgtttaatgtttacagaagaggtgggaaagcttttgtagacactctgttgcctagactgaacccaaaaaatataaatgggggaccatcaatgccatttatgcttgaggtttgtgttgtgacagctttgtaatctcagagtgacaacttttcaagtcttaattcaatcaaaacatacatagaagatctgaagacaacccatttcatgctaatttcaggtcgtggaagcagccctactttcaagaatacaccggttagagcagagactaatggatttagaacctcgtgtgagtatggaaacatagtgagtataaatgtttttggctctttttttgttttgttttctttctcttctgtatttctttgggattctttcagcagcatgattagtcatccatgcatgaagtacctaatctgctacccaacaaagacaatgttgggttgaatgtgattattctcatagtcatcatgtatcagttgataatttagctctgatagttctgagttaaggaaaaagaattataatatgatatcatatacagttattccttgtttctcttatttttccattaatttctgtaggttcaaggtctgcttgaagttctgcctaatcgattaactgcccaaatactggaaagacttcgaataagcaagcaaactttggtatagcccatgggaactactcatttcaataaattatctcttagtagcaaagtagagctataatgttgtctctatttatccatttgaaggttgaactagattcaagagcaggggctctcagacaaatgctgcttgatcttcttgaggatccacacgaaattcgccgtatctgtatcatgggtcgaaactgcagactcaagaagggtagtgaagatttggaatgctcagttgcagtagaacagcaaattgctgaaggtaattctaaatttgagatccaacaatatttgtagttttcttctatataaatataataatcactgcaacaaattcaattttggttaagtttggtttggtttggttttctttttatgcagaagaggaagaagaaattgagatgcttttggaaaactatctccaaaggttagctctttgcattccttttattttgttttatgtcaactctgtaaaacccagtgttatataatggctaattgttgttgaactttaagataatatattaaaaatttaatatattgttttggaagatatggttagtttgaattttctagcttagcagttatcttgacatggctataaagacacaaattttctacaattgaggttgctctgtcttcaaaatttgacctcgttgtttttattacatttacagatgtgagtcttgtcatggtcaggctgaaaggctacttgattctgcaaaggaaatggaagattctatagctgtcaatttgaggtatgattaatgtgatcctaaatagtgaaacaataagcttcaatatatttccattccaagaactattgaatgagaagtatatgcctaacagtaattttaacatggtttttatcagctctcggaggcttgaggttagcagagtggaattgctccttcaagttgggacattttgtgtggcggttggtgctcttgttgcaggtacattaaatgtcatctctgtctcttttgaatgttttttttt

SEQ ID NO: 114247 - DNA, 1291 bp, Cannabis sativa
aacttaatctaaaattaatactaaaaataacctaacaaaggcaaagaagtggctgacagttattgaaaggatcttaaattttatgggcttcaccggtaatgatcggggtgacctgtgctacgtttcaattacaagaagacgctctggtgtaaatagaaatggtatcccttactcaggacgttactagaatgatttgggaagaatttcaggatttgttcaatgtcaagtactataatgaggcagtctgtagtacaaaaagaaaagagttcactgagttggttcaacaaaagactatgttagtgatagagtataccacaaaatttgaccgactcactgagttggcttcgggtatagtacccacgaatttcagtaaaaagagaaatattatgcgggtttgaatgctaagatcaaacaggatttggctatcactactaatgatactactacaaacactaaaatggttggaaaggctcttcgagccaagagtgtggttgagtttctattggagtcgcgagggactcgtagtgttggtgggactgccactcttcctacttcgggatttggtagggatggtggtgattctaatatttatcagaagaggaagacttttctgatgccatgtggctcaaatcggagtaagaggttccatgggaaccaaggcagaggtggtcgtcaaattcatacctaccctgaatgtcctcaatggaagaagcaccaccttggtaagtgcaacaaaaaaaacatgtttttaatgtggtctggttgggaatttcaagaaagattttcccaattgaagaaggaagagtaaaaataagaggtgaaacttactccagctcgggtgtttgccattactcaagcagatgttgcccttctatggttacaagtcagcttcttgtcaacaactcctattattctgtactgtttactctatcacctcctacacctgcacgttgatctcctttaagtggagtcttattgtctccaatagacatggcgtttacttttgctggctctgatactaagtggaaaagttgaaaatgtaaattgtagaataatcttagctagctcaaggcgagattgagggagacaacttcatttatagaaatggcttaatgcccaaatgattacagcaaagaataataaaggtggcaccgtacattctagaggtaattttacaattgtgtatgcattatattaattaattacaaaatatgtgcaaaaaaaacatattatcattttctcatacatttttatatataattaaaagcttttttcaattttttttataata

SEQ ID NO: 114248 - DNA, 1721 bp, Cannabis sativa
gatgttcgagggtgataggttatgtcgaactgcccctgtaacgccctaatctatagggacgccacggtccttggttatgcatgggggactttaatgaaattctacatcaagaggataaagttggaggattgctcagaagggaatctcaaatggatcttttcagggaagctattgaagagtgtgctctctccccaatcacctatattagtgaacgtttcacatggaagtttagctttggtgcggatactattcaagaacgtctggattgggctttgatcaactctgaatgggaagagtctatttctttagctaatctaacacatttagactttttttgatctgatcatagaccacttttattaacaattggcgaccttcctaaagttggcaacagtttttatctcataaacgcaaatattttcagtatgaagctatgttgagtatcgatcctacgtgtcatcaaattgtgtcatcctcttgggaatccactccagcgtcatctgtgatggaggctgtgcttaataacatctcctcttgtgctcaaagcttaggtaagtggcatgaaaagaaatatggtaagctgcctaagaatatttggaacactaagcaaaggttagctgaagatgaaaataaggatagttatgcatgtgatcagttggaagttaatgagttagaatctcaactttcagatttactagaaaaagaagaaatattttggcagcaaagatctagaatacagtggttgaaagcaggagatcaaaatacggaattttttcatcaatatgctaatacaaggagacaaaataatgctattccaggtttgttttttagtggtatttagtaacttctttattatcatatctatgtaagtctacttcgtttgttgtaaatttgacaatactaattaatagtcagcatggtaggataatatttgaacgtctagttgaaattactcagtagttgtccagctttatctttattaattcctttaatatgcattaacaattcatgaataatatagggttttttgttaaaaacagtaatttattaatttcttaaacgttttgtatttagatcacaagaacacaatcgtatttttaacaatatttcctaagggaacaaggaagcttcttagtgaccaagataattacctatgacgttaccttctttttatctcctttcttgattaatatatatgtatatatacgtagtacatagtagatatataatgttcgtgtatgtcttttgcatttatattgggcctcttaccggcaagtattgttggggaaatattaagatgcaaataaattaattgattaatatctaaaaaagaatgtcaatagtttatttaataaatagtactaaagtatacatatttaatattaatttgtgttaccttagtattttgcattatgatatttctattttaaaaaagttagaacaaattaattattgtcccacctgtctcctttttccactacaattttagtaggttggcagaacttgaaagggtcttaatctttatgtttttcataaggtgttcatagcatctctttaatcctccacaatctaaattttttctatctttcgactttttaggactgattaatgaagttggtgttttgtgctctgatggggatgacattctgagtattattgaatgatactacaccaatctcttcatgacttctttccctgccgatgaggatactgaggctgtg

SEQ ID NO: 114249 - DNA, 2388 bp, Cannabis sativa
ttcatattaggatgttaaacaacatacattttagtaaatctagatcctggtaaaataattccaacaaactcttctaggagctcagttttccccaactgtttatggactaactacttttagtcttgcccctacacatacccatttccctgggttcagggcggcacaaactagatgtagtgtagctcctggacaagcaaaactaaggtcccagattctaatgcaagccattcctggagaaaaagagggggtaagagccacaatcacaatgattctttaaaaaagccaaggaaggattatgatccaaagtacaccgagtatacaagcgtaatacacacccgagaaaatgtttataaagcgacctactacatggtccattacaagaaacctcctcgaatgtcacagagagggaggaatagacgtgatcaaaatgaagaatgtgagtatcatggggagaagggtaacaccactaatgagtgtgattatttgaaaatgagattgaaatgttagtccaagcaagaaatctaggacagggggtccgtattccaatcatttatcccaaacaggggttgtacatggacacatgatcattcctagacagcagaatgtcataaaccctctgtagggggtggacgttctcaagctctaagaacatcattacccgcactccctactctgctagccttggttggagtaacattgctggcaccaggaccaagaaccccatatcctcctgaactcgctctacctcaagtggacggacacgtggctacaatcttaggtggacctcatgtcactggatgtacttgaaactcacaaaagagatacctaaaagaggtagaagaagggaaagtgtgcgtgatggtacaatcccctacacatcgccctagaataatgaatttgtccattacttttaccaaggatgatgccaaaaatatgtgcttcccccataatgatcctctagtgattgacgcacagatcgccaaaaaatgagtttatagggtctttgtggacaatgcaagctcagccaacatcttgttcaaatttgcattccacgggatagggcttattgaagggacctcactccttgtctaatctaatttcaaggattcaacagggatgccctaatgccgatgggtaaaattcaattgcctatcaccctcaaaggagagaataatgcaagtgcttttaagcactcaacctttgtggtggtggatttttcgaccgcatacaatgcaatactagggcggccaaccctagtgggcttttttaatcaggcatttatgcatgaagttcccatgtgacaacatatgtattggcacaataaaaggtaatcataagagcacgagaaattgctacaacgtctcaacacaaactgtgttcgtgatctgggaagagacactcatgggtcttagaatagaagatcagatggatactgaagccattcgataagattttcaagacaaattagatcccagagttgtgacagaaaggaacttagatttaatggaggaggtagaggaggtaagcatcagtgatgaagaccccacaaggactattagagtgggaagaaatctacctttgtccataagagagaatatcataaacactatcagaagaaaccaggatgtgttggcatggagctatttagatatgactgggattgatcgtaacaccatctgccatgctttcaacattcgagaagatgcaacgccagtccacgagaagggaagactgctagatttggtaagagcgaaagttgtgaaggtggaggtggataagttgattgccaaaaatttcttctgggaagcgttatatctggcttggctcgcaaacccggttttggttctgaaacccaatggctcatagaaaatgtgcattgacttcactgacctgaacaaggcttgccctaaagattgctttctactcttttggatagatcagatggtagatgccacgtccgagtacaagttgctcaacttcatggatgcgtactctgggtataatcaaattaaaatgcacattacggatgaggaacacactagcttccaaaccaataaaggtgtttattgttacaaggtgataccaattgggcttaagaatgctagagccacatatcaattaagattgaacctaaccatatcaagattaagatccatagacctacgatcaactagtgatattgacttagaaagatataacgataagtttatgatatcttatccaagatcaatatcagtccaatccaatgtatactccatacatccgatactggtattctttgctagtgctctagaaaggacataatacttattcaaaatgtaagtataccttatcgctgattatcatatcaggctaaatcttgtgtactgacaaatcatgggacttaaa

SEQ ID NO: 114250 - DNA, 4654 bp, Cannabis sativa
aaaggcattatatggctggttttgggccctaggttggagtgggccctaggcacgggcctagtccgcctaggcccagggctggccctgcatcttagacaccttcgacacaggaaaaaaattcaacaactcgatgaaaaatcctaaaaaaactcacttattcgattagtcaggttgataaaaaaaaaaacaaacgtcaatcgatcagcaacaaaatctcatagaaaaaaaattgcttacaaacaggtatgaaacattcgaaacacaaatctcaaaatgaactgagtaatagttacacaacctaacctaaaatttattattggtaataatagaaactaaaattaaatatcaaatatctcacaccataaaagtactcttctcactctaaatctgtttatttattttttaaataattataaaaataataaacttaaaagaatacaaacatacatatacatattattatatgatttaataacaacttaaatttttttatatattattatacatataatatataattacagttattattattattattattgttattattattatatttttgtacaatatttattattctctcattaaaaaaaaatatttttaaatggtaaattacataaaagattgttaattatttttttttaaaaaaatacttattattttatcatagagtgctttcatttttttccttttcaattttatataaatcttttcactcttaatttattaatttttattagaattttcttattaataattatatatattagactatttataatttcataatttctaaactatattgtttgaatattatttgcttctccaataaaaatgtataataatataattagattaaatgagtaataatttatatatctatataaatttatttatttatataaaactgagatgtaaggtagtgatatgaccatctcaaatttaaaatggaatctaatattaattttaaaattcgggaaggagagtagtaacaactataagtgagctacgctgatgacaacgagtaagatacgatgagacaacaagtatgatacaatgatgataacatgtgagatttaaaaatgacaataactttaaaagatcatgatatataaaatataaaaattaataatatagaattatataatataattttactactactatatattgaaattatatttttattatcatactaaaaaaattaaaatagccgcgcaaagagcggctatattacctagttgaagtcaaaacgtcaaaacaatgaaatctctttcttttttatttatggttttattgaaattattttttcaaaatataaaataaaataaaataaatgataatttgatataatatatttacctaggcttttaagttgaagaaagagttgtttcagtatgagaaacagagaataggggttctttttcgccccaaatcatagtttttttcttttgaatcatttttagagaaagttttttttttttttttttcatttcttcacaaacgataatgaacaaattccagaaatgcctagtatatgtatatatactaatacttcgagattactatccacatttcccatttatttgctctgttcttacatttttccctcgtctttttccctttttgtgttcgtgatcttttgttctgttctatcgatcttccatgaataacaatgaaaacatcaatcagattcttgccgaagaagaggaatgaggaggtgtacatcctgtattatctcttcattgctctttatgttctacgctctcaacatctcaacctgagttggtgcagcacagaagaacaaaacacaccaacaagtccaagaaaaagtgttgcatttgcggttcaactttcagacgtcgtgccgatttcgatgcacaccagtgtcttgcattgtctggtatattatatatatatatttataaaatcttattatgaagtagttaaataatctgatgtgttttatataggttgaagtaaaagattggagctttaggaaccaagaatggctgcaactgactgaatcaaggtactttaccttctctgatttacaattccatctgtctttctttaattctctttcttttttatgagctaaaactaggtaatatagtcgctctttgcgcggttattttaattttttttagtacaaaaataaaaatataatttcaatatatagtagtagtaaaattatattatctaattttatattattaatttttatattttttatatcatgatcttttaaagttattgtcatttttaaatctcacccgttatcatcatcgtatcatacttgttgtctcatcgtatctcactcgttgtcatcaccgtagctcacttatagttgttactactctccttcgcgaatttcaattttaatattaaattccattttaaattttaaatagtcatatcactgccttacatctcaattttatataaatatataaatttatatagatataaaaattattactcatgaaatttaattatattattatacatttttattggagaagcaaataatattcaaacaatatagtttagaaattatgatattataaatagtctaatatatatatagttattaataataaaattctaataaaaattaataaattaagagtgaaaagatttatataaaattgaaaagaaaaagaaaatgaaaacactctatgataaaataataagttttttaataataagttttttttttttttaaaaaaataattaataatcttttatgtaattaccatttgaaaatatattttttgaatgagagtaataaatattgtataaaaacatcataataataataataactactgtaattatatattatatgtataataataatataaaaaaatttaaattgttataaaatcatataatatgtatatgtatgtttgtattcttttaagtttattatttttataattatttaaagaataaataaacagatttagagtgagaagagtacttttatggtgtcagatatttgatgtttaattttagtttctattattaccaataataaatttataaaaatagaaaaaaaaaagtgaatcatctaagaaaactaccctttaatagcatccatgtttaaccactttttagtgttctaaattaattaaaaatattgtcaactttttcaaaagctcctatcatacaaataagaaaaaaaaaacaaacataatatgatttgattaggttgtttgaatacaaaatattaagcacagataaatataacaatattgcttggtgctcttcctgtgtatatataattattataattatgtataaaggtcttgtcttttgacatgttggtgaatgttttttcaagtttctagattgattctttgtcgtgtgattcaatggcttcgagtagtcatgctgatttcaatttgaacgagcaatatgttcatattagtttggaagatgaggaagaaggaatcttgattggtcgggatgatgaaaatgaagaaatgccgtttgatgataggtggtgcttggtagggaagtttcttacggggagggcggtggattttgatgcgatgagaaatttgatggcctcgctttggcagctgggaaaatgtgtgtttattaaggagttggatactaatagatttctttttcagttttaccatgaattggatgtccaatctgtcattgacgggagtccatggacgtttaataggagtcctcttgtctttcaccgattgaagaagggagaagatccgaaggttgtcccactacataagattgatttttgggttcagattcatgacttgaaaactggtttcatgttggagcgtgtggttcgaagtgctagggagtacattggtaagtttgtgaagtccgaccctaagaactttaatggattttggcgagactatctacgtgttcgtactacgattgatattgagaagccgctaaagaggaggatgaaactttgtaaggaaaatggtgagtggatttgggctaattttaaatacgaacatcttcctacttttttctttgtatgtggaataattggacattcggaaaggttttgtccaagacgttttgaacaacctatagaacagctagccaagccttacggaatcggaatgcgtgcccagatgaagaagaaaaactacttaataggtgctcaatggcttcggactgggaatgagagtggaggagccgccgttggtggtggtagggaccggatgtatggtgccggagagggagatagtgctcatcctaaaatcatggatgttgattgtgttgatcaaggtggtaatcgtgatcccttgattgtaggagataaaaagaagaaggagataattaaggaaggtgaggtgtgtgctcgacaggttggtgggggtggctttagtcaagatgtcgtggatgatgatgatagcattaatgaggaggatttgattattcttttagagagtaaaagaaagcgtacagggagtgatggagtaattattggtggggatgagaatatgaccaaattggttaatggagttgttggtaacaatggatcaaaaaacgagtcacaggtgggccttggttttcaggcccacccatcatcatgagtcttatatcttggaattgccatgggcttgggaaaccatgggctttgcaattcttaaag

SEQ ID NO: 114251 - DNA, 3521 bp, Cannabis sativa
ctctcgacagctggaggcaagctgtgggatgacttgtagggtcaccctgtaaaaaacattagtgaattcaataaaagagctcaagtgtttgtacaaaagaagaagcaagaaaagagaattggacctatactctaggatatagagtttggaaatggaattcaaatcacaaaagaccagaaacttgaaagtatattctaatagtttatgggttaacaaaacacttgattctaattgcaaagcgcggaaggtcatgtttgtttggtattctaccattgaaacttccattagctgactaacttgattattaatatcttataactcatcagtttctcttctttctgttacgcagctttaatgcttgaaatgtcatatcactcttccactttatccccttttcttagaattaattgtaccaacagatcgatatgccatgacatcgaaagaaatctttacaatatataaagtaacaataatgaggatcaacatattatacaacagggtggtgtatcagtgtatgactaaactaagtgccaaattaaggggaaaaatcaaataattgataaatttatcttcaatctgtggagtgaaacaaaaactacaagtacacgcttaaattcgattccactcagacaactagaaatcacacaatgacagtggcctgacatagatttgatcagcgtcccaataacgatcaactgaaggaataagtcacaaggtgcaatttcagggactagtcaaccactcaagctgcaagacaaaaagttcaatctgtgctcaactcaattatgatttcaatgttgaaatcttcatctctttgatagtatctcctggtacataagcaagccattttaatagcctccaatatggcctaggttgttgtaactgtgtttccattttgattctcataaatgcaataaagtgggtttggaagcttaaaaatgagttgcccacaatatggacctgttaaagcatcgtagcgactgcttatagtgcctgctatgcggaaaccttccttctgcaatgctatccttcttctggcaaagtattcataattatccacacgcaattcctcttctgatctgcaagagttcttgacttagccagctataatatgagtctatcacatcatttataaaatgacaatttccatgatgctatcagtctatcacagtacaaaattacaaagcctgctatttcgttagggtatcaatagaccatgttgaaatggaaggagcaaagcataagtacctcattatcaatagagaccaatctttgtaacctgcagaaataaggtgctttacagtggtgttcctttgtctctcgggctttcttgacagcaaaattaaaggccagcctctagcatgcagtttcttgtatatcataagaatagactggagcttcagataaattgcatctccaatacaattactacatccatattgaccatatctgtaccaagcaaagctctttctgattaatttacacattagaaatataaaatcaacaaaggaaaacccaagtaagagcttacaagaccaaaggagttaatagtatgaaaattgttaaggagcctgatttatcacaagtagtttaaatacgaagttcagattggttttacacaaactcaactgtaaccaatcatataacagtacataaaatactaaaattacatataagaaactgaagaaacatagcacatgtatgatattaaagggttataaggaaattacccttgaagtaataaattatcactttgagggtttgaagaggaaatgtcatctatgtcaatcaaaaccacatctagaccatcatctagcgggtcaactgttttaaaatgattctctaccaccacaattgtagagtttaaatctctagcatattggccttcttcaatatattggacagcgaaaaccttgcaaatcataggaaagtgacttgcttccaagttgttgagctctgcatggagaccaagattcttgcaggcattatagtcgtaactcgatttcacattctcaataactcctgcatttctactttgacaagattgcagcattactgttagcgtaatcaggaaagtagtcattaaaactccaacagtaacaattgccccaatgaaaatcgtcgcagcaactgatgtcatgtagaaaccggtttccatcacgtaatggctatccccatctgttcaagaaaaagggtacgagataaataatacacattaagctcaagattcttattacatattctggtcctaacaagtaacatgttaaattctgattaaatcctgcagcagatacttaacgagaaaaggcatctttctccagcaaaagtgttatagtatgtcaaggaacccatgtttaccaactactatttcaagttctgattttcacaaagatgtcaaaaataactctataccaataccaaatctagagcataactttctgtttgagtatgttcataatcatacatctacagaagtttgtcaaaactgctttaattggaacctcctatgtataaatgcatactgctaaaaacccacaagataggaaaacataccagaatctccattgccagagagactctgtgcagagtactccctctccatttggtgaccataagcagacatggcaataatgtagccagcattcaacaactaagttttctggaacaatactccagattccttcgggttcttataagggtaatctgccaataaaaaaacttgactcactcatactgaaataagtgaatctcaaaaataatatgtcaacagaattaggactccccttcaaacagtcatggttattatagaaattttcatcattacttatctcaagcactcggaaagaagagtttctagctattcttcatctctaataatccagaaacttcatgggcccgtaccttgttgagcatgtacttattagaatcatcactataaacttcaccatccaatgaaaacccatctccataagggctcaaccaattaactacaccaaaatttagaatttttttagtgatgtgatgaaccaattacaggtaaataacataaaattgttatttccttgattctgacccaataatcagaatcttaccatatctgatcaaccagtttcatgcaaatcacagaaattatgcttgattgactctcacccaatacatatttggtgtagctataatcatgaaactattaatgacactcagtattcaaagattgatgatgagtgaggtagaagcagagtttatgggagagaatacctgagagaagcatcgaaagatgggaattttaggagggcaagaaagaataataaggccatttaagaagaggtatctcagagaattggccttttaccattgatgtctttgtcactgactctctctttgtccttcgcgtgaggaagcttcctttgtaattaccatggccgtgcctcgacttggagtgggggacctgttgtaattttgagttttgacattacccaatacccatatcacattttgcaccgtttgaaaaaaaaaaaaaaaaa

SEQ ID NO: 114252 - DNA, 519 bp, Cannabis sativa
ctctctctctctctccattttttcattctttagtagttttgatatgagcttaccagagatgctaggcttcttataaacagaaaagtgttttgtgcgagggggttatatctcttatggaggcataagtgtaataatttatgggtgttttggtgagaccttttctgttagtatctattgttatagttattgcagatgtttcctcgataaactgggttctttaatagacaacaaaaaaatcacaacaataaatgttattattgttttgttttttaaattttttatctacagatagttatttagtaggtattcctttaaatcactttttacactacatacgaaaataattatagaagtttctgaaagaaataatattttaacattttcatggttataatataatttagaaaatttatgtagtaagtagaccccttaaacgaatattttctataaataaaattataaaaatcataaaaatatttaaaattccatacaactattttataatgttttttttttttt

SEQ ID NO: 114253 - DNA, 3181 bp, Cannabis sativa
  modified_base (1629)..(1629): a, c, t, g, unknown or other
tcttgtgtcaagtgatttaattttctacaattatttttatattctgtctgttctattttgtcgctacaaaactggtttctgtagtaacagaattatattgtgattctacagacgtatacagttttacatttttgtatatactgtattattgacatctacaaaaattcagttttctatgtattttttgttgatggatgtgtaggtttataggaaagtgagcaaaattttaattagagaaaaatgaaaattatcgtgaagtaataagagtaaaattggtagaatgactaaaaaaaagaaataaatataataaatttcaaaagaaatagtaaaaattaaaaacattaaattagaagagatatatactgtaattttttcaatattttcagctgctctcctcgtttaattacatacaaaataaaaaatataagtaaacaaataaaattttattacatgcatctactcccatcatatggtggaattcatatgacaaaagaaggtgtcctacaatatatatttatatgaagtcgttaaatttaagcattatttgaaaaatatagcagttttatattcattcactttttaattatgtgcttggacatttcttttattattttatggtatttattatgccattatttttttgttattattaattttaaataccatatttcgaagttcaaactctaatttttcagattctttctctctctctctctcttaatcgctctaactctcctccattctcttctcgccgccatctctgggttctggttccgaagctttttctgccattgatggatcgaagaagaccacgtatatcaatagcagtacgttaaaagaagggatattattattatttagaaaaataaaagagcaaagttggatccgatcttagctgatgagctcccacgaattagaagggcttggcttgttggagagagttgcacatgtaattatttcttattcttactggtgttgttctgtttcttctctttaggtggcaaccgaaggttatggtgtaaacactgttatttgatgttagtcgtctatattatttcatggaccataatgttatttgctttgatatatatatttgattagtatatatacttactgatgaatgttagaaaatgttgtatatttattttcatgttaattattgtttagaactcatctatactactatttaaatcatagtgtcatttttactcatgtagtgatgtttgattattatactgctggagagaaacataatctattttgattttataaaaaatgaccctttgaggtaagtcttctgagtggaatatatctattttggctttatagaaaatggcactttgaggtaaactttttttttttgggttaggtagatatctaaacaaacaacttgatttttttcttgactgctcaagtttttgtatgcttggttctagttaactagttggttttggtgatagtttatcctttagctagatttattatatgagaagtactattattaccctcctattacaattttttaatcaatttttacgctcaaagacacatgtcggaatattttttttcaatttttttttacaggagtgttcggtatgcttacaacatcatccctgtaaatttttgaanaatttcgaatagtttacagtgtcgaaaatacgcttgaagttttttaaatagcgtagtagactgaaagatcaggaactctattttcggtaccataaactattcgaaatttttcaaaaatttacagagataatactgtaactataacgaataccgctataaaaaaatacttcaacatatgatttcaaatattaaaattgactaaaagattgtaattagcactcctccattattaattcaatttctaaaactctactacccaattaatgcttaactacgagtgtaatatactttctcacacaattgttgtatattttctcacacaattgttaacttttctttattgtcaaaaaaaaaattgttaacttttctttgttcattaaaatattgttgactttctttaatttgcactcattaatctcttagccaccgccctattatatttgctacactattccaattgccaagctcgctagtcgctactctacctacacaatttattttcccttttgaaaaataagactagctagctagcaaccacctctaattaaggtaattaagggtaaatatgatcttatattttataaaaattatagattaaactttttattatattaaatgacaaaataaatcttgtattttttaaaattataaaatagcgaacttaattttcgataatttttttaatataattaacataaagacaattgctaagtacaaaaaatataagcagttttgtcataaatacatttagatcagattattattaaattttattttgataaaaaatcagttaaaggtcttgtactattttaaaaaatacaaacaaaacagaagatttaattaataatttttacaaaatacagaaaattcaaaataaaatttaccctcaaattaatttttaaatatttctgttagaaaaaacaattaatattttgagcattattattattattatgataattattttgtatatatatattatataaaaaaagatagtgtagtcgtaattagtaaaatggagaagtttttgtaagcgtacggcgatgaataaccatattcatgcaattttctccttcatgatttatggagaggcagattatatgaaccgctgatttcttttcttatgatctgtttgttatctcttcagaaattaattatgatatatatatattttaagagtagaaaaaaacagaaaaatgggtaatggatattttcgaaatggaagccttcccttatccacatcaacctggccacattattgtacacgtggagcttatctacgaaccttgcttttctccgccgtcggctatttttctcagggatgatgtcacagcggtcactccccccttcttcattatccactttccctgaaatgtcaattctaccctttttatgcttatttatttttacccttctatttatgatacatatatattaataataatttctaaaaatctgatattgatggacataaccacaaatgatatgggaaatttgattttttatgcttacatttagttaatttttttttttttaaacaaataataactaa

SEQ ID NO: 114254 - DNA, 5744 bp, Cannabis sativa
  modified_base (34)..(48): a, c, t, g, unknown or other
cgctcttccgatcttaaacaacatacttgtgagnnnnnnnnnnnnnnnggtaaaataaatatccaacatacaactatatatagatttgcattgttgccaaatatatctcttaaatcatcatggtgcatttataccgccataaatgatcaaactcaacaccagcaacaataatctacatcatcttgaaaaatgtgctttcagtacgaataatccggaagctttgtaacacacaagccttccagatacatacataacttcatccccatgtgaaccttcaagactgacagagctgtccgagagtacacctccgatttaatgacaagccttcctagagagacatttcatacacagtacaagcttatttggaagtaccttctgaattcaacaagacctcctacacagggttttctagatccacactaagcttccagtatctgctcttcggattcacagcttctaattccaaaagacaaaacttgtaaccataatctacagtatcttaaccttcagttattttgttacaagcagtggaagagagatgggccatattgtttcaggttggagtatcctccaaggtgaccctttattcaccttatttgtttcctatttgtgctaaaggattctattctttaattaaaaggtttatggtaaggcgtgatattcatggtgaccaagttttcaatggagctcctgttaattctcgtatggtttttacagacgatagttatatttattacaaagcaaatgagtgagaagctaggagtattattcagctattacaactctttgagagagccttaggtcatcgaatttatttttctaaattaaccctatattttagttcaaattcttctcaaccctaaaaagatctggtttgtggtctgtagggtatggtggaaataagaatgctattatgggtttcttgagggataaaattcaagagtgaattcagagttaggatgttagattgttatcaaaggttgttaaagaagtgcttataaaaatggttacacatgctctatcagttttttttactgctaggttatacatgtaataatagctggagggattgatgagtaagtattggtggaattaggggtcctctgaatggcatggtgtaagttggttaagttggaaccatctttgtagtcataaataccatggaggtcttggttcttggcatttacgggattttaatctagctatgttacggaaacaagcttggaggctagtaattaatgactcttcgttggcgagtcgtgtttataaagcccattattatcctcaagggacttgtcttaatgattcccttggggataattctagctttatttggaagagaatttttgaaatgtaagatttaatcaaagcaggggctagatggctagttggtcctggctcgtcaataaatattttgcgagatatgtgggtcttgataataacaattcatttgttacttctaatttgattggtgcaaatgtctttgttgacaaccttatggaggttggtaggagagtttgggatagggaaattgtagaagatatgttcaatctttgggatagggagttaattttgaacactcaaattagtcaaccggttgcctcagatttgtggtattggtctcatgatatcaaagggctttataccattaaagaagcctataagtttctgcataatttgaattctttggtggtgagtaatgaggatatgatcttttggaagatagcttggagtttgaaggtgcctccgaaggtaaaactttttctttggtatctttctttggtagcttggctactcgggtttagttggtgtctaagcttgtgtcgttgcctgtttaatgtccaatgtgttgacatgagaatgaaatggttctgcatctactggttttttatttgttcgctcgtggatgttcgatgtggtctgctgttagcatcagtagagtagttgggactgattattgggactagtttggtcgagttactcagcaacaagttgctagtatgggtgaagaacttgctatggaagcgtgggtgatttggaaagcttgtactgacgtggtgtggcagaataagatgactacgacaacgaaagttgttctcttggcaagagtgacccttaatcaatggcaacatgctcaatcaaatagaatggggtcgttgtctcacacgatgaagtgggataataaacttgagcattggactaaatcagatgtgaataagattaagcttaatgtcgacaacttacttttcaaatcagaaggaaagtttggtgtgggagtagtagctcgtgatagttctgacactcttttggaaggcttttcaatgagttttcatgggtgggctgaggctttttttgtggaggtcattggaatcaaagaggtcttaggttggatcgaaaggaaagggtggcttgatgttcagcttgagacaaatttcttagtggttgtttaagccgtgcatagtcccattcacatgccatatttatttagtcaagttgttcaggagtgtaggagtttgttagactttttgaagtctgttaattttatttttgttaaatatttaataaactaggggctcactatgttgctcgtgactcttatttctatttagatcatattttcattgagaactccgttcctactgatgttttatctattgttatagctgaagctatttgattgataaaattgtaattttttttcaaatatatatattgctatatattatttaatttaatatttttagttagtttaaattaaacactttctaaataaaaaaataataactattatgatttcgtttctaaataattttagtaaataatatattacaaatattgattattcttcttaatttttttcgctatatttctcaattaatttatttcaatttcaattattgtttggtaaacatgctataaagtaattggttattctaaactctagtttctccatatttttaatttttctcacaaaataattttttcaaataatatatatatttttataaactttacaaagacaacataaaaatgaaaacttccttaattttatttaatatattagtagtaatctttgcaagaaaaacaaataaccccacaatattaattaatcatttatttcataagtctcttcttctttttcttttaacgataaataatttcaaaaaatattaaaagctattaagatacaataaggacaatggaatccattgtggtttgtaatttggccaaaagaagaaataggaaaaagaaaaaagaaagagactgaaatgttaaaacataaaaaagggtcaaatgatttgagtgagaagtggttgagttagtcttttctttgcataggagagtacagaccatacagagaagcaatatgagtgtgtgtgtgtgtgccatgacagcatagtagcacttaggccttatatctcatgagttagttagttggccggctgggacatttatatgcatatatttcacagctcactctggatttggtggtccaaacactccgattctgaccaacaatacaaacaatattacactacacactctaattttatggtcccatctaatcttctctgtgttaatacataaataatctaattatgatcaccattaattgcaactcacttcagtgcaagtctcttagcttaacacaaaaactatgttagttgacactttcgcaattatgttttagacccctcgacagacacgcccttatcatcatatcttttttttctattattatttgtggataatgcaaaagcttcatcatggaatttctttaagcaaaaaaacctaaacataatcatactggctaataatcggttgcacctttaaattggataaaaaaataaattgtttacataagttgtaagaatcgaaacttgaattagcattgttgtcaattaatgtatttactttagtttggaatcttaatatattttggttaattaggacttttatctttaaactttgatgtaccaaatcatgtttttaatattttcaagttgataaaaattctcctcaaattattgtgattgttaaatttaagaacttctgtctaaaatagatctgacattgaggcttactgtttgatgtagaaaaccttcctcctctcttgacacctcttgacacacttccagatgcacgatcattaagataaaaggaactatttgaggaaaagttatgaatgtacaccttgagcaaaattgtttctgttgaaaggtccattataatttcctcttggagtatgaaactgattgtgatttccttgttgatattgtctaaagctcctactattggtgtagttggcctcaggatgaatatcagcttcatttgttgtgacatgagcactgagatcaaacttagtgtcagttttctcaatttgagattctgaggcaaggagcaaagccttaatttcagctacagagtagccttcaattcttatgttggtagagatcacaaaagtatcatatttgctaggcaattcttcaaagatagctccactatgatcgcttgctgacaaaacttctccaacagatgctaatagatccacatgttgcttaattcgaagtagatattcatttaggccaagattacctttcttgatattttgaagctttgttctgaactcgagtatcttggctgagacttgaagtgtgaaatatttttctaatgtacgccagatctgaccagctaattcacatcccactatgcgagtcagcaagcttatggacattgatgagagaagctaggacacaagtaattgatcttaaacatcccactcaatgtaaacaacatttaaagtgttcgaggcttgatctgcatcagataagaacttaggtggaggtgcaacaccttggatgtaatgcagcaatatgtttcctctgattgctgccataacctgttgcttccacaacaagaagttgtgattattgagcttcatcgagagactgtgattgaagaacacagtggatgatttgtttgaatcctttcctttgccattggctgatccaggatcggttgtatgttgattgcttaaattgctagtgataacattcgccattaatggtaaatagtgctctgataccatgttgaaattccttcttgacatgattgcaaaagacaaagaataacaaagaacaatgaacaagaagaaagaaaaggaaagagagtagagaaagattgaatcaacaaagaaatgattcattattgagctaagcttcgagagcttagagcttatatacaagagagagacagtgagaagttagttaggacaaccaattgatagctcaccaagattacaacagtattataacaaactcattaagctgacaacaaagtaactaacaaacctaactaacttttaactgtcttaacaatatccatttttctctaattaaagttttactcaaactctccacaaacctacacatccatcttcaaagaacacaaatctactatgtttgaaattatgtcttagttatgtgagagtatgatgataattttgatacaatactcataaaaaaatgtatatttaaattaaattttatatgaaggtcaatttagttaatgtataaaaaaaggaattattacatggaaaataccaattgacactttagttataaaaatacctccataagttgtggacaacatttatactttttatgtgcttttaattacaaaaatacacctcttacactatcacttacacaatcagacgatggttgctgggtggttggctgaag

SEQ ID NO: 114255 - DNA, 4172 bp, Cannabis sativa
catttctaataatgggaaccacaatttattaaattcataaataattataaaaatatcaaaaattagtgctaattgcctttagtaatccaaattactaaagcggtcattacaattactttcatggaccgtatggacaatagaaatgatgatgatgatatgttgtgtggaccttggatgacaggtgctaaactaccaaccaccgaatatgataagaatagaacaaatttctcatagaggaaagcatggtcgctcctcacacgccttgcccaaaaacaacttacttcatcaataccataataatatttacaagcctcaaccaaaagctttgactgtttgggaaactacctgcctgatctcccttggaccaactatttcttctttttctgatttgttgatgcataacccaagttaaacacaacaatctcattagttacaacaaacaacttctataccagatctgaatgtgacatcctttactatgtcacaccaatcccttgaatatattgttgcttttcaccaagacttgtttttgagtatcaatcctcaccataccatccaaaccactactgatacgaaccaaacaaagtctaccctatccaggactcatcaaaccagtgttctttctattggtttaaaccaaatgagcaatcccacaaaattgctaactttgtaatgaatccactagcaacaacaacttacccctctttattaactttacaaattactcatctcccaaacatttatgtacttgatattggcactgttgattgtctttctattctatggctacctatcctcccatgacttcattctattcatcatgtcatcctcaaattttactcactcatacaattaaaagccactcaatgactaccccatcactaagtatgtcaaccaactccccaacagttattataaggaaaacttatcactaaataagttgtcaaaatgacaaagtggaccagtttcaatgagacaaatgctcaaaagttgtcaaaaccaaaactctagaatagttgccccttcctcgtcacaaagagtttgctgaaacctaaatgtttcctctgattctattgattcgaaaggtttcattaatgattctgtagagatttctttgtaatcccgcacagtgccatgaaaatcttaagttggaacgcaaggagattagggaaccccaaagcgttcaggaacctccaactacttgtttaatagcagctaccctaagtacttttccttatggaaactagacttcatagtaactcaatttcacgcttttgaaaatctttgaattttaaccatggtcttgaattaggtagggtgggaatgagcggaggaattttaatcttttggaaagacaatatgatgttactttgttaacatttgggcctacctaatttgattgttttatggttgcagatgatggaccaactttccacttcatagcattttatggtgcacctacaactcaaaattgagtcgattcttagttgctctgaagaaggcttgctgatgttgctcctttgatttcatggttgtccattggtgactttaataaattctctcacatgacaataaatttgggggtccacttagaaatgaagctcaaatgaaagcctttcgtacttctattgatcattgtgatttgcacgaattggcttttgaaggagatgcattcacttggatcaaaatcatactggtgtttatatgataagggagtgtcttgactggtgttttgtaaattcacaatgggagaattcttttcaacttccacatgttcatcaccatgattattatcactcggaccacagagcaatcacaggaacctttcctactattgcatcagtggtaaaacaagagaaaatacggagtaggttctatgttgagaaattatggatgtctaatcttgagagtgtatatatattttaaggttgttggatcacgtcaactactatggatcatgttattggtgttcttaacaatttagagacttgtgccaacagcttgcaatcatggcatattggcaaatattgtaaaataaaaaaaaaaagattgcagtagctcaaacaaatatggctaatatgaataatgcatccattcacactaatgaggcagctcattgttaaagcaatctgacacaatcttggatgattttttagaacaagaagaaacttattggcaacagagatcaagagtagattggttggctcttagggataagaataccaaaaaaatttcatgcaaaagcatcagaacgaaaggcaaataataggataaaatttctcatttctaaaataaggactaaagttacatcacaacatggcattgctgcaattattcaagactattttgcctccattttcagtgcattcccacatcaattacactagaaatgaacaatgagctgctcaagccttttgttgcagctgaggttgagaatgctttgtacacataagacctaacaaaagccataggattgatggcatgtctgccatggttttcttaaaaacattagaatattgttggaaatctagtcactaaagtcttattaagtgtactaaatgatggagttgacccgacaatgttgaacaagactatcatctatcatcacccttattccaaaaattaagaagccccaatgtatgaagcactacagatcgattagcctttgtaatgtactattcaagcttatcactaatgtgctatagcaaggctgaaatatgttcttccaaacatcatcttagaagctcagagtgctttcttgccaaactgtttaatcatggataatattttagtagcttttgaatcggtccatgccattaaactcaaaacttcaggcaggaagggaatagcggctttgaaactagatatgagtaaggccttcgaacttgttgaatggagatttattcatgaagttatgagaaaaatgggtttttatgagaattggatatctcttgttatggcctaccttaccacaaatagtttcctttttcaattgaatgggaaattcgctggatctatgataccaaccaaaggtcttcgcaaagattatcctctatcaccttacttgttttttatatgtttagaaggcttatcatgactatgacatcttgaggagatgtcgggaaatctcaatggtttcaagcttacaagacgtgctgaaccaatttcctatttgttatttgttgatgacagtttgcttttttgtgaagcaaatgagagctcttgtcaagctatcaagagagtattggatatttatcaccgagcttcaggccaaatgataaatgctgataaatttgttttgtctttctcccttaataccactttagctgcacaagtttattttcatcgacaactttctatgtccatttgggagtctcatgaaacgtatctaggcctgcctgcttactcaagataagataagaaacttttaatcaacggtattaaagagaaaatttagaggcttatgcacacatggagtgaaatgtttttccaaaatgaggcaaaaaagtgcttcttaaagcggtggttcaattgattcctatgtatgccatgagttgttttcgactacgtaatatatatataatttgcaaccaacttgagtccatgatgtcaaaattttggtgggaacagatgaaaaatggtcaaaatacattaaaaaaaatggaaattgctttgtaaaatgataggagatggaggtatgggctttcgatcttttgtgaattttaatcaagctcttctccccaaacaagcgtgaagattattagaaaatcctcaatctctttttagcaaagttctcaaaagtcgatacttcccaaataattcattcttggaaacacatcatggccattcaccttctatgaattgacaaggaattatgtgggcatgagagcttttatcggctggtttaagatggaagattggtgaaggtagacgggttggatgtggttttgatccttggatcccaagtcacaatgaatttgtcctgattcgttatacggggcctccagacggggtagtagctaattttatcactgatgaaaagtaatggaatgttgggttacttacccaatatttttcaccattagatgttgaccaaatcctcactcttccattgagtttttttcctagtgcttacattattatttggcaccatcaccattcgggcatctaca

SEQ ID NO: 114256 - DNA, 2179 bp, Cannabis sativa
tataacagaaaacgtcataaactccacttttgtctctagtaattcttattcctccttaatcttttaactaaccaattactctttcaacctttaatcctaataactctagattttactgcacacacgctcacagggtttgacacaatatcacaacccgacttaaagactaataatgctaagttacttataacagttgaaatttaaaaatctcttcttcttcatctctccaatctccattggagactcaaaggagtatgtccacttcaccaggaaaagtcctttcatcgtggtaacaaattccttattaattactttttcatttgatagctcaaaatctgactcataaaatcttctcaggattgccaagcctgtgtcttcatcagatatggagttatatgtaagtaattctgtaacctcattaggccattattataataaatattattattataatgatgatgatatttgattatatcttcacaggaacttctggctacaaaatgtgccaacatttattcaattctcaaacgtggatcaccaaaagatcttcctccttttcttggtgaaattcctgcgaattcaaagactatgggccttgttataagcttctgtcacggctatgaaattcatctgtcaggagacaatgtggttccactctgttgtgttgctcatcacttggcaatgaatgaaactcattcaaaaattaatcttttgaaaagggctcttacttactttgaacaaagtgtcctctttagctggaatcaaaccctcaaggcccttaaaaccactgaaaacattcttgatcaagcaatgcaacttggcctagctggtgcttgtttcgattctctaatggccaaggcactctccgatcctcgccttctcggagaaccaatcaacactgacactagtagtgaggaggaggaagatgaaatcgaagacaaagacaaagagtttcatcattggccaagtgcgagaagaagattgtttggactgaatttgcaaaatgaggatcttacaacgctgtctctcaggctctatgaacctctcatctgtgaaatggtgaagagaggagtgccattaagctatgcgacttcttctcttcttaactatgttaagaagtgggtgtttcccactttcacatcagctgcaacagtggataaagagaagctttccttatatgagagcaattcacagagagaaatcattgaagctgtggagaggcttttgccacgtgaaagaggactcatcatcccttgcactatattgctccggattctaaagtctgcaatgtttttcaatgctagcttggagtgtagagatggtttggagtttaggattggaacaagtcttcatcatgcaactgtcaaagatcttctgatactctctcaaaaccaagtttgcagcagggaagttaagtatgacattgattgtataagaaggattttgaagcaattttatgggaactactcaagttcccatttgtcaggtttgattttagtggctgagttatttgaagagttcttggctgaaatttctagtagtgacatagatttgaagttagagacattcattgaattggctgagctgtcagttagtctatctatgggaactcagaaaaagtctgatggactatataaggccattgacatatacttggacaagcatagatatctaactgaatcagagcgagagaaagcctgtcaacctttggatttcaacaaaatgtcagaaaaagcttgtgatcatgccgcgaaaaatgagaggctgccagtgagggtgaccgtgcagatattgtttgtggcacaaatgcagctcagagactcaatcatgaaggaggttcaaggtagccgtcggtttggcgagaaagaggatgagttggaggaggaagatggagaagaaaaagtagtaagaggaggatttggtgaggagaggatgaggacagagatggagaagatgagcatgaagctggtggagcttgaaaaggagtgataaagaaagagattgagagagacgagagtttcagaattgagaagaagaatgagaaagagaagaagatgaggttgtggagagaaatgaagagaaaatttgggtgcattagaaatattagtaatgtcagtgattccaactgccatggaaagaataataataaaaaaaaaagaaggtgtaataatcataatag

SEQ ID NO: 114257 - DNA, 3977 bp, Cannabis sativa
  modified_base (27)..(42): a, c, t, g, unknown or other
taggatgttaatcaaacatacttggtnnnnnnnnnnnnnnnnggtaaaatatttccaacagatcagcagatgcaggagctgctgcttgttgaggcagagtagcagtatgctgtgttgcaggagctgctgcattttggggtaaatcagtaggggagcaccagtagtatgatcctcagcaaaacctgtaattgagtgagagactaatttatgagcagtaaaactaacagtaggaaataagggaattggttgagatgctacctgatctggtgtggaaatgcaagtgtagggtaatcatcttcattgaagatgacattgcgagcaatgtaaattctgccatccttgttctcacataagtaccttttgtgttgcaggctataacccaaaaatatgcacttggtggatctcagattcaacttatttggtaagtatggtctgagatgaggataacaagcacacccaaagcaattgagaaatgtttaatcgggtgtcttgtgaaatagacactcatagggagatatattgctaatcacaagtgtgggaagcctgttaatggtgaaaacagccgtgtgaaaagcatgccaccagtattctaatgtcaaatcagattgtgcaattagagtgagccctgtttcagtgatatgatgatattttctctctgctcgtccattttgttcatggtcatgtgagcatgggtgctgaaattgaataccatgttaagcaagaaatgaagcaaaagacctatactcacctccccaatcggattggaaaatctttacaggcagttgaaattatttttcaactagagttttaaattgaagaaatgtagagtatgctcagatttaacagttaaaggaaagatctaagtaaatctactaaaatcatcaatgaaatggatataatatctatagccatccttaaacacaatgtgagaaggtccccacacatcggtatgtattaattctaggggttgaaaagctctagaagtggataaagggtaaggcagtttgtgatgacttttgcctttttggcaagcttcacaaaagctgagatttttttgagatcctgaataattgatttgggataaaactctttttagtgtgtgaaatgcagggtgcccaagcttagaatgccatttatttatgtgaatagctttggccacattaaaaataacaatagaactagaactaggaagcggagaatcaaatgggacatttttattatcattgtctgaatgtttacaattaatggaggcagtagagactgtctaattagtacagacattagatacagaaggtgtatctgaagaggaactagaactagtactaggctacttagaagctaaatgacattcaatttgaacttgagattgaggaaaagtgtgatgagagagcttgtacatgccatctttctcccttcctttaaggagaactttccctgcgagtttgtccttaacaaaacaacaagaagagtgaaactcaagaaagactttgttatctttagtaagtttggagatactaacaagattcttggttatattagggacttttaaaatagaattgagttctaaagcatgggaggaactagatgtaggtaagaatgaatgactgagatgagtaatgggtagtttcttaccattgcccacagctaaggtttcggatccagagtatggaatttcagtgtcaaaaagttccattccttgagcaacatggtttgtggcacctgtgtcagcataccagtcatgatcaacaccaaaatctggtactgtagtgggagaatgagcctgtggttggtctgtgtcatcgagctcaataagaaaggctttggcttcattcattcttggtgtgacaaaatctttatcaaatctgtaatgacagacagccgcggtatgacccattttgtgacaaacttgacacaaaagtctggaattggtgaaaccagatctgccatatggacgatttgggggtctgtagttgtttgagtagttcgaaccacgcccagaaaaaccagtcgatcttggaggaccatgattgtaggatcgtggattggggacaaagagattggcagtcatttttgtagaaagatccccaatattgtagtgacgttcaagtcgactttcataagtaagaagcaaagattgaatggattcaaaggaaagattgtcaacaagacttgtaacgtggaccacgactggatcaaattcgggaccaatgccattcaacaaatgcataatgagatcattttcatcaaagggatgacctgcagtggatgaagaatcagcaagtaatttgattttatcatagtaatcagatatagaaaggttgcctttggtgatggtagacaattgggacttaatttgaagaacacgagccttggactggctagcatatcactgttctagggctttccaaacagagtagcaagaattgtgttgggctatggatccaagaacagtctcagacttagacgaacgaaaccaactgagaagaagttgatcctttcttctccatgtaatgaatttggggttatcagcccctaagaccaatttcgcaagaggagcaactccagtaaggagaatatcatcaaggccatggccaattacagtgggaatgacctgcgatttccatgcaagaaagttggtgcgatccaatttgaccgtgagagatgaattgagggaattctgaaatggattccattgagatgaagaggcagtagcaaaagcagcaggagctgtagtggtggaagtagcataaggattttcaagaacaccaggatcaatggaagacaactattgtcgatggcaatctgataccatatggaagcttatcaatacaaggctatcaatgaacacaaagaaatatttgggtacaaagtcttgcaaaaagcttgagcctcaaactgagctcattatctttatttataggctaagaatttacaaagggagagttgttacaaaacagttaacaagtaacaacctctgacagaggacaaacagaaaacataacggaatacaactaacaaaactattctgtaatagagagaaatgattccagggttgagttgtcgttgtaactggaagtacactagaactagtgatcccaattggagacgagttatcgctaaaagaagtcattgagaaagataagtgtctctgataccataaaagtgtagaaacaaaagagaaaaagagaacatagaattttaaagaacgcttggcaacaaacctctcaaacaaaggcttaactttttatttataaaagagacattcttacaagaatatgacaatgaacagatttggttaacatacaaacactacaaaattttttacttttagtcataataaaatttgtgactaaaagtaaaaaatattatgactaattataaataattatttttacattgtgactaaaaggtcgtggctaaatgtattagtcataataattacaatttattgtgactaaatgtgttttagtcataatatttgttgtcactaaaattaaattagtgataacttgtatctaaatattaatattttagttcaaaataattttttgttgtgattaaaaatttgtcagtaacttttttgacagtaaaactaaaccaacataaattaactaatctaatacactaactgttggttatcaattgctcctgtcccatgaacgaatactagtttcaatataataagaagacaaaatgtcaaattaattgatgttattaaaaataatcatttctctactttcttgctcgtgctagctatctgttaagttctttcatcatgtgcgtacgtaggtaaggttttaattatataaatgtatattaactgtatcatttgaaaaatacatatatatactaataaaattataataaaatgttattatttaatcaatattctaaataaatattaggctaattagcaatttttctcttatttgacatgtaaattatgctctctgaatttttttggccgttaaaaatcc

SEQ ID NO: 114258 - DNA, 2294 bp, Cannabis sativa
aaaaatagaataaaaaaaatctaagatgccacctaaacttattttgtgctttcctttatattatatatagatatagattatcataaatacattaagtgtgtaatacttttattattaccacctatttttctttcagtatcttactttaatctggacagcttcatattaatttgtattcaaattttttgatatatccctatactagtttatattttgtcaaagaagtttagattaagtaccccactttattaatggcaatcaaacggctagtgtacctataaaaggagcacacgtatgatttgattttgatttagttatacatttttttagaagcagttttcaaaagtctagatagtagatactgtcaaacactaaatacttccaataaatataaaccaaacctcataaataataaacacacatatacctgtacttggttaaattaaaaagagtaccttcctaaataatattcataaattgtatataaatatataggaagcaaaaatgctccctctcctacaaaattgatcttaataaattttttttagtctcgattattaactgacgttaatgagaaggcaataacgttggttgcatcaattataatgtaccactctacttacttaggaccactatactaatttttacgtctttactaattaaaatatttcttgaagatcataccaagttaaattttgtaattaaactttaaacctttataaatacataattatacaaaggggctgggatcccgttttaaaagtttacaatatcattcaaaatacaatttgcaaaaatatcgcttcgcgactataaaataaaagcccaagttgtcccgagatcgaacactctaggactaactatcctaatatgtacaatcatcctcaaattctggactcaatggtgctcagctttcgcctttcccttagccacacatgtaaacaatatctataagtcgactatacactctgtactcaacctgtactagtgttggtaacgctgttatacccctttaacatcatactgtaccaatacactctgtactgcaaccgtactagtgttggtagtatacaaatcacataatacaacatgcatataacattcatacacatacatatacacattttatactaatcttacctcgtttcagattcaagtgtgctggtcaacctaaatagaaattcacacgttgaacggaggccttaaatcacaatcatttaaaatgggtaaacaacttgctaaaaccttttatttctctttgaattttgaaagcgaagatggttttaagttgatttttcatttctttcaaaaaaattgatttttcatgaatttgttttagcatatggttatttatgtttaatttagtttctgagctttaattggtgtagtctgtgagttattttaaggaatttagctattgttggatgaagacttcaagtttgagttcatggaactcaagcttaagctttaatggtgaatttgggattcttgaataaatatgtgatatgtgatgttgaataggtttattttaagtgttatgctattctggaagagttgataaagttcagtttaggtttggggcatatttaagtttgaaaactcgaactttaatttactggtgcgaatgggtgaaccagttaaccaaatcttgtaattctagttaaccgtatgggaattttggttaaccaattggggccattttaggtacctcaatttttatgttttattgatatttagggtattgccattctatttatcgataggaaaacttccgattttaagtttaagtcctggaacatgtttaaacaagtcatttaccaatttaccgttgtcatgacatagggcctggaatcatcgaacgttttcccactcaagttggccaacacatctgaatttgaatttgaggtgagaaaagtcaattgtaccacatagcatgtcaacttatgatatggtaattattgtttatatgaaggagttattactctaactagaaatcgctgtcaagttttttacttatcggttgtctcattagataatgatagtaacatcgattgtctcatttgataatgagggttattggttactttatgaagtaacaagaatggtttgtcttattaagtaaatactcatactatgatttcttggaattaaatgttgaatatgtaattcattatgtgacttttattggttgcactactacaaaaatgggttttttcgacgtttttaaatagtcgtttaaagtattcccgtcggtttctataaccatcgcctatacgaccgtcataaaacgggca

SEQ ID NO: 114259 - DNA, 1028 bp, Cannabis sativa
aaaaaaaaaaaaaaatctatatgattcatatatacatatgaacctttgaaaatgaggaaataagttaaagaataaaaattctaatttgtattgaaaagtataattaaaaaataagtgttttgacttatatatgattcatgaagagagaaaaatgactagacttgaatatatatgctcgatctgcatggcccatatatatataatatatatttattacaacaatacaaacacacaaaattgttatactttgatttggtcaaggtaaaccatattgatcaaaactcataaacaaataaacataatatttaataatatatatactaatagatatacttgttataatcaatttacgtatacctatcatatatatatatatatattatgatcaccccagcaaccgcagccaatatatatatatatataataattattcatatataataataacttatatattataagtctatattctctgcatgcaatatcaaaccaaaacataccttttttctttcatctcatataagtataattctctctctctcccaaaaatataactgaaaagatccaaacaaaaaagatgatcagaaaaaatgacatctcaaggattatggtttttgtttttgtgttgtttttgattctttgttattgtccaaataaattattggcccagaaaagtagtaaaatagaagtaaaagttggggtgattcagaatttggggactgattttgggaaatttagtttgagttgtataaatatggctctaaaagatttttataactctaatcctagttataaaactaggcttattcttcatactagagactccaaatctgacgttgttgaagctgctgcttcaggtacgtaaattgaattaatactaatttctctttttttttttttttctcattcatatacactcatagatataaatagtgtacgttattgccagggccgccctgaaatgtagtgggctatagacaaaaaaaattatttttgggctcttatttagaaaaaaaaaaaatgtgata

SEQ ID NO: 114260 - DNA, 1976 bp, Cannabis sativa
  modified_base (1730)..(1732): a, c, t, g, unknown or other
aaaagtatttttttgattaataaatatataaaagagatatttctaaatttatatacataagacacttgatcatgactaggacaaataagtagtcattcaactcatagattagatagtaaacaaaataatgagattctatttttcccttgtttcccaaaaggaatactactgtagctaaattaggttgaaattgactcttggttatagactttttcaaacttcaattatacagaaacaatatacatatatttttattatttttaaatttttccttttttcttttttcttttggacaatgacaatatattatttttgcctttgcatacataccaactttaactttttattttaaaaaatgaatataataaatctaacaaatttcaccaatattaaccatttattattttggtcactgttactgttataattaaattaattttttttttttacttttattttatgaccattaatttaatttaattcttttttatatttttaacttgaaaagtaaaatcattggaaacttatcaattatcatatatataattaataagaatcaataataaagtatagtcatccctttatatttgtttatttaaattattaaaattagaaaattgagaacttaattaaataaaagataaaaaaagttctactaattatttaaaaaatgtcattaagtaaggactttattcattttcatttatttttaataataaatgtataataataattttatcttttgaaatatgtcttacaaaataattactatatatactatagtttaacttaaaagaacaatttaatcaatttaaacattgtaattacattttttgataaagtaagcaagatttttgaataattttaataaatataatattatacatattaatttcaattattttttatttattgtattatatttctctattaatctattacgtagtgatctttttaaaaaataaaagtataaatatcttttagaaaaaaaaaataaaaaaattaaagtcaagtagataattaattatgatcgattttatgacccaaaggatttttattcgaattttctaagacaaaatatcaaatttagtaatgaattaaaacgttaaggattaaaataatgcacaaacaattattaagagtttcttatactatttttccatgcaacaaggccaatatgatgatgggaatatcatattcacatgagtcacatgacataatcgcacaatcttatcatatgctaaaatcggggatgaaataatatctccacccaatcaaaaaaatattaatattatacattttcatttttatatcatatatattccattttcatgtttagccgttgggggtgttttttaagtggattatcagttgaaaagaaaatgattgatcagttgggctaaataagattcttttttatttaaaaatattctttctttttttttttaataataataataataataatacgatttatctcaaaattattattactgtagagtcatttttttaaacaatttcttgttacaacactcatgatgttaatttagtcccaagtccaaataaaaaatattccataaataaaagttttaataatgaattattaaaatatgtatatgtatttttagggtgcttttaggaatacaccaatgtactttctacttgttttgatattaaaaataattttttagttaatttttttttttatattcgtgtacgttatagttatnnnagatattttataaaattttaagaaaatcgtaataatttacaatatagaaagcaatgttcaaacagtctattttatacgtatataaaataaaatagtcactcatgcaacacactatttgaaccttatttttagtatattaaattttttcgaatttattaaaatttcacaaaatgtcttatattattgtaacgtacataaccataaaaatctaactacaaattattttggggaattaccccatata

SEQ ID NO: 114261 - DNA, 2197 bp, Cannabis sativa
attggatgttatttgaccaaaaaagtgcggattagatcggatgaacacccctaaataggagtagaagctcatccataatgccacatcaccttgattagtaagaaaattatatatagataatttaatagatagattttgattctttcatttaataataatacaaagaaaactatttgtattctttgaatgttataaattaatgtaataaattttaaatttagttcatgggtttaaatgttactaatgaaaagaaaggaatagactaaatctataattaaatctttgaaaataagagtaaatctaaaaaattgagagaagagagattggaaaaaaatgacatagaagttgccacatcaacttccctaaaactctcctttttatatatatatatatatatatatatatattgattatcagaatattttaacaatcaattaaaaaattgaatttgtaattaacataataataaacatcaatgagaatattaatttgatatcttaaatcaattaattataattaattgattatacatagtgtgaacaaaagtattctaatatttttaacttaaaaattgaatgaaaaggtggaatggactactaatactaattttttaaagaggttctggatttatatattcaacaaatttgagattggagatcaccaaccaaaatgaaaggtgcgttaaattggagatcatttcctacaaaaaagccagcttaatgcttgtccatattaatatatttaattctcaccataaaaattaatattatgagtgatgagaaacaagaattttgcatggaaagcatgcattcttttgtactagtagtgttgctttacatatacatcttttcatagcttgaacacaaaaagtgtcatattagggtcacaacatatttgtggaaacataaccaccaaataatcattttttatatattattgtggggttttctcttaataaagctatctaaaagaagcataacaattaatgatctatatccttacttctttgaagacatgacaagatttttcatacctaaacgtatctattatgatccatacatgtatatatttatatgatataatataaaaatatatatatatatatttatatgtataataggggccaggcggccagcagaccatcactatctaatgcctctttgcttcagagagtgagagtgggttgattttaatatacttgaaatctgattctgattaggactgaaaggtacaaaaaattctgtaaagataagaagattagatccatgaaatatggctcttgtctttactttaaccaacattcttagttgggtttaaattgccatatacctattctattcaaattatatggttacttattatatatggttacttattacatgccattatatatataattattaccagcttaaccataagacaacttaacaaattacctaagtctcacgaaatataaggcttacatttaagggtaatatacattgtttttatttataatgtgggtgatgtattaaaaaatataaatataattttagaaaaaaaaatcttcattcaattaatttaattattaatattcatgactactaattttcaacattacaattcaattaattttaaatttaaacttttggaactattaattaatctttaatgatttttaaatagaagattatatataaaaaacaaattaaaacaacataagaatattttcttataattatacttattttattgtgatcatttttatatgataatgaacttattttttatgaaagaattttataaatgaattaaagttcatttatgaagaaaaaaaaattagtcataatacatgtgatgattaaatatgaaattaatataaaataaaaatcttaataatatgaatttaaaattaatttgtctgaaaaataaaatttcaataaattttaataaaattatctaatttaatttttatcttaaactttatttaaaatttcgcctaaaacattgtacaagcttgagaccgccctatatatgatcatcctcatttttaatacaaaaattaaataaaactctttaaaaattagctttattgaacctataatacatatataatacatattatctattctatataaagtatacctatataactgaaattcttggtttttgagaattttatgggtgacttttaatttttatttaataaaattataaa

SEQ ID NO: 114262 - DNA, 1168 bp, Cannabis sativa
  modified_base (1066)..(1069): a, c, t, g, unknown or other
tttggggttttgaaaaaaaaggaatagtttttttaggttttaaatttttggtttaaaaatcaaattttttgattttctaagcatagaaaatcaaatttccctactataattactatttacttttttcatatagaaaattatgcatatactattttaatgtcctttcccattcaaaaatgtcttaatccaaatcaaattcaaactaattttcaaaaaaacataaattcgctcttacgtgcatacatgaacaaataactttatcataggataaggaataaattttctgattggaagtatcgatccttcttgtcaagtagaatggaagtcgttattaaatctgttatctagtctattcacacttattctatgaatcctttaaaacttcatgtttccttaatttaagagattcatagattatgtgcgattttagtgaaatggtacttcgtctaagaaaaagcttcattattgtacttgagagaaattgtgttggcacaagtttgatagtagtatattcttagatttatctctctttaatcaggttcttgtcgctaagcaagttgtaagattgtattccgcttttgattcatgggtggttagagtcacgaaggttatttattattcgaactataggcaaaactacatgtagactaagtagggcaatcactccacctgaaattaggatcagtcgtaaactatttcgaacttacgtatatatatatatatatatttttggatctttacataattacttttctagtcaaataataatatgtaaggttgtttagtctagaggtaaagatctttttaaattttaaggaagtcacaagttcaacactctacatatttattttatctttttgagaaaaataaaattaaattattattgttgggatttaaaccacctagcaactatgtataaagtactttaatataattaatacaataaatgatcattgcataaaagttattttaatacaattatgtactattttaaattttactatatataattttatattttttattaaaattttgaattctccacatacagtagaacctctatttnnnnatactctattcaagaataacctcttatttgttgtaaaaaaatcaagtcccgatttgggccagttatttacaaaaatatgggaaaataaagataagtttt

SEQ ID NO: 114263 - DNA, 3710 bp, Cannabis sativa
tctatctagtgcatgaacagaaaaagtgggcctagtattaagttatatgggccacccaccactcaattgtgaaagttaatgggcctttaaactatagagattttctttcaccaaagaagatcagattctgttatctgtacaaaatatacctataagttcaaatatctcttcaattatatttttatactggaaaaggacaccaccacaagcatacctatatggtttttatatatgattattgtgttttatacgttacaagctcaaaagtaaaagcgtgtgcttagccaaatcactcaagcaattaatcccctgaagaaaaaatacaatcaatcattcaagtgttcaacatatataatttgtttctctttttcgcttataaatattataatttctgatggcttcctttttctatatagagatggcctttatatatatatatacttgtacaaccaaaataattattagaaaatctcatattcttaatctatgaaaaaattatataatatataaaaaaaatgagctactctttccattgcaataaattttgagatggaagctttttcatcttattcatcttatcccaaatcaattatttttaaaataggaaggaattatgaagatttttatataataaatatacgttatattttttgtactcagaagtctatcgagtaaattaattatatttaactcctgtaaattttcgttagggatacacaaaagcgcagatcacagagctagtcgaagaaaaaattattcaagaccattaattctctttccagtatatattattaaaaataatcaatttgtagtttttttattagtttaatttcttaattattttatcatatattaatttttaaggtaaaacatttcatttttttaagagaaaaaagatctcatcttatatataaaacaaatataattttttttaagataaaaaaaaaatataattgaacatacactaaataaatttggaatatcttaccaaaaaaatgtctttcgaatatatcctagatatattaaaatgaaaaataaatctaaagaaaagtatataagtatataattaaatatatatattttagaaaaatcgtaattaattaattgaatattgaattattattgttttctaattttttaatcacaaaataaaaataaaaattttatttttcaaaatttcgattttgaaaaataaaaatgtgttttgtagccactataatttgtttttcaattttaaaagcagaaaataaaactgtgttctgtaaacttaattttttattttttattttttgattttatttaagtttggtctaggtccggagtcagattcaagttcgggttagagaccggatttcagcgctagggccatgggggatttgggcccggtatggtcggggtctaaaatattaattaagaaaaaaaattgtttaaaaaaatattgagagtaacttctttttattttaaaaatttcaattttcaattaaaaaattgaaaagtaaagataaaaataatcaaaaaaatgtttaaaaaaaacccaaattaaaattttctaattcttacaagctatatatggtgtaattgtttctattccattaggctaaataaaatctgatgatcgatataaatatatatatatatatatatatatttatatatatggggtacatattgtcagaatatggtagccctgtacatttttttccaatttataagtagtctctactatctattttttatttattggacgaacgtatttttagttgaaataataatgatgattgtaagacattcaaacaacaccatttttataaactgtaatgtgtaatttatctcaatatatatttaaaagtgatgtatatataattgaatccccattgaaaattatatatagttaaaattaaatatgcattattgtgtgtaatacaatttaaatgtgtctttaactcttcactgaaatatgattagtcaataaaaggttaggaatatgggatggtgaacaaaaatatcataaataattacatattgcagttctagaaacaaaatcagaatttataatagtatagaagagctgtagatatgtttcttaattaattatattttcaggaaaacagaatgaaaaattattaagagagaagagtggtggtagatgttaacatatatattaaaaataagtaagaagctaacaagtgacacgtacacttcttaaattaatatcaccgtgctgcaaaatatgcatcatcaacctctccctgaaaactgaatctgacttagactctcataacatatataaagaagaaatgaggatatttgtgatgtaaaaagaagaaatattggacacttcaaaaagcctaaatctagacccgggacaaaagacattgaagactatatctcacttataaataaaaaaataaaaatacaacagcaacaataataataataaaaaaaaaatctcaacattgaaaaaattaagtgtacttttaaataacatgcgatgatgcatgagttgtgtatgatgaacgagggaagttatctcatgcatgcatgggcatggagtatggggcatgaagaatggccaacgtggagaggcgccctatgtggatggtggactgccgtggccaaccccagggctgtggccaggagtggtggggcgaaaggcatcgatctcagttaacttgtagtgattgaccgagaatgacactacggaacgagcctttttatcatcttttacctccgacttatttgaatgatgatcaatatctaccaatggccttgaacatgatatcaaaccacagttgttaaccaaaagtactgctatcaacaacgatagcagctggagggttttagaggacgttgccattgataatttaatatatcaagtattttaaataagtatatatataaatatatatatatataattaccaacgtataatagtaatattgttccaaggcagggagaagaacagtattacctttagggacaagttttttttaaagcgagaaaccaatgttaccttgcaacatgtagtacaaaaaaatggtgttagatgtgtttaagctagtcaaataacaaaatcttagagagggagagaggtaaaattacttgtgttgatggtggtggtgtgggctagctatttaagatgtttagtgtaatggccccacgtgtggcattttgattatattatataaactttgagaacataaaataagaggttggagcacatggctatgtaattaagatatcattgtattttgaagagaaagtagggcatatgggaataatttccaggtttagtaagttagctattttgggttcatttcggcactcaaattagctttgtcagagccattcatgatttcttttttttttttaaaaaaagcaaaacaatttaaaagggaaagcaatggtttcgattagacaccaacactgacattatattcattatataaatacaatttgtttgactgatccagcactgaccgcgcagcaattaagataagtaaatgcttcttccactaacccatatatattatacaagccatattgttcatcgtctaataattaatattcataaatatttatatatattaacatttacctgccttttatcaatttgtttatttcaagttacgagtattctacataaatgaaattttattcggctaaactttttaagtacttaattttttattaaatttaacagtttgacc

SEQ ID NO: 114264 - DNA, 1287 bp, Cannabis sativa
  modified_base (56)..(70): a, c, t, g, unknown or other
atggggttccaactcaaaaccaattggcgatgagtggagtagtccatgttcttatnnnnnnnnnnnnnnntttacatttaatccatgtgggacaatgttctccaatatgaacttaatttttttttagtatataaataatgtaaagccgattcctagcatgctgagatgtaaataatgtacccaattgcttagttataataactttaggtcatgttattgttatattttattttgacgaaaatcaaattcagtatattattttaaaaatattaaacctaaaaattatcatttaacaaagagagtgtgattgataacttttataaaatgtattattcaataataaaaattttacattaatttgatgatactattcatttgatgattatatgaaaaatacattttaaggtgctaattaaacaccataaaagataatatatatattattattaatgcattttgatatcaagtctcacaattaatttaataattaatatatataagacattaaatctgaaaaattgagaaagagataaggaaccattagttgtcaacactcaccaatcatgttgctatgccatatttagatatatatattgtacataaacaattatgtaacttttggtgatggtgatggtgatggtactggtggcacaaaacgtgttttgttaataatttaacattttcatttattttggatgtactaagtgttatgttgaattatttatatgaagacagtatacacgataagattttattggtctacaattttagaaatttaattttctttttaccgagtaatttaattcaccaaggaaacatgcatgtatcaattgtcatagctaggcccgactctgaagtaagacaaataataagagtgttaagttgtcttggtgccccaaataataacaatacattatatattactagctaaaagtatatatgtggtaagtaattaacatgtagtagcaatggagcctcaatgttttttcttaaactagtattttaaaattacttcaccacttcactatacttacaacgtctaatataaattaatactatgtttattttcatataaacacaaaattattagagaaaaaaattctcctagaaagttttgttggattgaatttgaaaatagtaattaatagacttggttagcacgtatacatacagttcataataattatttttgccgacacttgagttagccactacaacattcaggagcaatagcggcgggcccctcggccgctattgctccacaatgtggccgctaaagggcaatag

SEQ ID NO: 114265 - DNA, 2227 bp, Cannabis sativa
aaaaaaaaaagttaagtgtataaatatcataacaataacaagatttcgcggaaaattaatatttttttaataacaagaaaacaataataatagtaacaatcacaatagagtagttgaattaagcaagaaagcctgagatttcttctcgtaataatagtcatcaccaccaccacccacagaagcatcagccgagaaaatcatcactccattcacactgaacccactcttctccaacaatctcaaagcatcaaagaacgcctccccttgaatccctctcccttctacctcatagctcggcaaaagcttctccgctccgaactgcatcgacctgacccgaaaagtgtccaaatacccgttcgcgctccgaacccgatccgtataaaactggtagttcacgaagtctatcacctcggcgtaccgtccgtacaggtccatgtacggccccaccgtcgtgtagaacggcgcgatggtggcgacggagatgacgctttggttcttaagtagggaaattagctcgccgatgcagtaagcgaaggtggaattgggacttgagcgacggcgtcgtttagggaagttctcgtaatcgatgtcgattccgtcgaggtggtagtcttcgatgattgatttgagggaggtgaatgcgttggtgatccaacggtcgggatcttccggatcgtaccagcggaggactgtgtcaccgagactccatccggagagactggctaaggctttgacgttagggttttgggatttgatttgggcgacggagtcttgagtgagtgtggggacccagtaaggggagaacacaccgttttgtgattctccttgtgggcttgcatcaatggcgaagctgaggatgaagtgaaagtcgatgctttggttgatcggtactgtgttgaatttgactggtacgcccgttgctcctatgtactccattagtactttttttccatctgaattatataaatttttaaaaacaaatatacatataaatatttaattggttgatattatacggaagataacaatatttatttaaaataataatgcatagaaaattaagaaactatcagttgaatgagctatcttctttttagtataatatatataaacagtaccagaaaatgtgaaactttgaaattgaaacgtactttaagagcctgcatgcatatatattgatatatattatatatagattttgagttttgatcacgtgcgaagttgttttcaatttgtatattttggaggtgtcaatcaagagaacaataaatgtagaacataatctatctattatatgtaaaaagaagaaacaaatatttcgtaccacaaaattgcgtaaagacgagagaaattccaagaattgagatgagaaagagattattagaaagctttgccatctttgctttcagtaataatatgatactatcataatattttagtgctatatatatatgtatcaatcaactctgtacgtatacaactaagcaggccgctgcctaacatctttaaatatataatatcttgaagtgtagaataaaggcgaacaagctaacacacgaattattatattatatgaagcctacaagaactttctttgtttcgttctctcttaagaaattattctaaagtaagatcattcggtttgattttgacatattatatatatatatatgaaaataaaatactcatttggacaaaatttagcgaggcagatgtgttacttgataatttttgtttgacaaatacaatatattgatgttatttcttagaaaacgataaaataggataaagtcccgtataattacacagtatctttggtgataggtataacacgacagtttcgtggagaaaaaaaatcacctatcccctatatgctgtctccactctattccaccaattaattacagcattatgttaaccttaaccgttaaactaacagaattggtattctctctccacgtcaattactaacttttctctctccaagaatatcaaaattttttattaattaatctccaactttataaaaattcaagtatatatataaacctacattttataatattaatttattaaatctttcataatcaaatatttttttttttttagtttattcttcaaaacattctatagatattatagattgtattgatatttattaatttttaataataaaataaaatagagaaattctataatgcacccctttaaaagagatacaccgata

SEQ ID NO: 114266 - DNA, 1160 bp, Cannabis sativa
ttttgtaatgaccgcaagatctaagtgttttatttaattaatgaatgttcgcatttattttaaaaaaaaaaaaaaacatatatataaaacttagaaaagcaattttcactactttttgacgatattattgttggtgatatttaaaatttattggttctttgtcaaattggtttttgttgctttgtttctgacgaggggacaaagtggtccatcatttggcaaagattagtctacaagaggattttactcttttatctaatattgatattgacaattatattactaatcttattgatgaggatatttgctgattaatgagaagttgccctcctaatttgtatagtataggtgttattaattgttagccaataaagaaacttgttaactattttgtattgagtctgtattggttaattaaaagtgtatagctgttattaatgaaccaaaatcgtgatatgaaaacttcgaaacaaaattgttaacattgtagctaatgaattttgagtttctcaatcactaaaccagaataatatgatgtcaatcaaataggattatcaggtggaacttgtagatatgggcttgtatcgtgataatgggcttgggcttatccatagtggatatagttgttcaatggtatgagatttggatcttgcatcaatgtggattggagaaatgttggatgtggattagaatcacttattgcaaaaaaaaactgtgactttgagtactggatgatgtttgttgtagttgtggatttgaaattgagtcatatctttgtgtaatatgttgttattggccttgggattggctagtaattccaataaaatgctctcctagtcttgaacttgatgatcccatataagggttatatctactttgagtagtactcgatgatggaggcattatagtttgttgtagtagttgtggtcttgaaattgatcccttatagccataacttagtgtaaaatgttgttgttgaacttgggcttggcttcctataagcccaccatgcatttccaacaaactttcccttgcattgcaattattgttgttgtgcttcctacaaatatatgacaaattaagtattttgattgaataaaaagggagaggtctgaatccaaaacttttaaactattaattaattgtaaaatattattaga

SEQ ID NO: 114267 - DNA, 4339 bp, Cannabis sativa
  modified_base (4054)..(4061): a, c, t, g, unknown or other
ttttttttttttgaaatttttcatttatccattcttacactccacctcctccatattttccattttcttcttttttttttttttttttttgttctgtgaatgacaattactcggtctttattttcctcatcaccattattttaaaaaccttcaaaaattggtgttaaatctcttgccaacaaatctaaaagtaaatggctcgttgttgaagatgatgattcaaactttactctgcttaccaaaaaaagtgatcgtcgccctattaagaagacatcgaaagttaatgttgctaaaaatatttccctccctaaagttaagaaagggaagaaccaagttaatgagagtctgaatgtttctttctagtttctttatcgttttgccctaactttttgtattactagtttctttaggagacaaaatcctatttattctatttttaaatatttctaaggattataagttttttttttaatttttcttttttacaaaagacctgattattttttattttataaatgattgattaattataccattgagtgtgtggtatagttggctagaatgctttgcataaggttccacatttggttattctttagagttcgattttccatggtaacacttatctagggccttaaaaattacgctattttagtaataagaaacttttgaagattcaacagaatagttaatgtaataagaaaagttttaaaacttcacattaatgtgtcaaatatgatgttgataatgctttatgtttctgttaatactttggatatgacatacaatcttaaaacaactgttatacaattaatgagttgctcattacaaagaaggaggtgttgttagttgttgttgtgttgttgactatgttcacacacaatggataccttttgaagtaaggctctttcaattttagttgtatgtagaagaataggcttgaatcatcatttatcctcaacaattggtatctttctttctcttggtatttcagttacagttgagtatttttttttggttgcattccagtacttgtttcaccttgtatacgagttcttcatatttatattctattgaaatgtattagcccgtagcttcgtaatttacataattcgttcattgatcaaaatgtctattgcaaaatataagaaataaaattacgttttttttttctattattagtttgaaaatttaagcattataagtcaactatgggataactatcatgaaactgtaatgcaacaattatatttaatgtgaggcagctaatattaaatcttaaaacaactaatattgcccatatgtaatacaaacaaaatttaccacagtcgaattttctttgtacgagtcgtgtattgtcaattctgagccatgtgtttttaatataataatagcacaactattattcaactaatatacaatttaattgcaattagaaagaaaaaaatttgaatggtcatcatcatgaaaaaatttgtcagtgattttttatcattgatccacaatcaattgtaccttaatattattatgtggagaaataattgttagaattctgtaaaccaattttataacaaccaaatgaatatattaataaaactaaccatgttataattttttttaaatagctttgtgttagattatcgatatgaaacacctgcaaatatcataaaaactattgtatcatcattagtttgtaattattgatatgtctagtttcagagcgttagtaaaatgttaatgcaactacaatacaactacgcagaaatttaaaaactagaacaatgattctatgtactggctctagatgaatttgaaatttttttgctattcgtgatttgatatgaataaatttactattgaaaatctataaaataatgttaattcaatgggagaaacattagttagtgtattgatatatttttttcagtttatactttatttggattgatcaaaaactctatatctatttcagacagatctacattttatgaatctgaaaactgatattagtagaattagttttttgtgattctaatcgtaattcagggtagaattttagtttaaaccagtccttctgtctaattttgtatcaatctaaaattatatgtgtttggattttttacggtcttattctcaggtgaggttgccgaaatttatagttttctccgtctggcttggtttctttttggttggcctattgatttggttgctggaagctgtcgttgttgaagaaggtagttcgtgcggctgaatggttagagaaagatgtatttttgtataatatttttgccattttagtatatacataaaaaaaaaaacctattgtgtattaaggttaaatgaaatatattacattttatattttatttagacaatttatatagaggtgtgctttgttcctagcaatggggaaaatagttgtgttgatattctatatgttcttacatttgaataattagttgatgtgctaattaagggactctataaagcattttttttagattttgagacaagcttccaagtgtggtgtcatcctgtcgcttgagagagaatattgagaattagttatgcgtcactaaattaaaagtcgttttgataagtgagttttaaacttaatttaaagtgtacttttaggttgagtcttaggtgtttaggtttgtttgtgtaattttatatattattttgatctgttttcaaatttggatggatttgatacaactctgatcgaaaattttgcaaaaatatagaagaaaaggtgaggaaaactaaaaattgttgattctgaaggagttgtatgcagtcatgtaaggtttagtgcgagcgtacaagtgcattagaaatgtgtatcaagagaaaagtttaattaagactattttttatcattctctttagaaaaaacaataaattttaaaaacagttttaactgaggactaggcatgtcaaaaagaatatccatttagttggatcgggtcggagctccaatatgatagatcatttctaatctaaaatatttaaatacttattggatctcaaatctgattcgctctgcccccgcctaattttttttatcggatctgatccgatccagttttaatatattaaaaaaaattaattcaagacccggacctaaacctcagacccggacctaaacttggacctaagacccgagactcggacttggacctagatctgggacccaagacctgaacctaaactcggacctgtgacttggacccaaactcaagacccagacccagacctgaacccgggaccaagaccggacccgggacttggacttgaacctagacccgaacccaaactgggactggggacccatgactctggacttggacccagactcgaactaaaacccagacccaagacccaaatccagactcgagacacggacccggacccgaagccgcaccagggacccagacctggggaaaaaaagataagtcgggttggatcaaattcgatttgaataagtcgggtcgaatctaatccgatttgggtatctcatctaacgaatttggcgaggcgaggtggatcattacataatttggatcgggtcggatcatagctggatctgacccgatccatttacactcttactgagaacacatactttttgatgcttggaacaaggaggagacttcttggaactaggaggagattagatcgattttaaagtttttcatcctttcatttttgtttctttatttttatttgtaatttgatggataagttcttgtcatgtacatgaattaaataatttgagagaacattagatcgattttttatcttttaaattttatttatctaatttttcaatttttaattaatttttaaaatattttgatattaattgtgacaaagacattaataaaaaaaaactcacatagataaaaatatatactataaatataaatatttataaagtattcgccctgaattaaccacttgagtctagctcaagtggccataggtgggtgtgtgtgttggaggtctgggttcgagtttcaggtgaaacatgattgtaatatataaacgnnnnnnnnaaaaaaaaaaaaaaaagtattcgcccagaagtttattattatttattttttttttttttttttgagtaactacatgagttaatgaaagcttggaagtatgaatataccataataattatgttattttattttgtcaatcgagattatcaaaattaatggttagtattatctttttatatatatactagtatactgttacgtgcgatgcacgtatgttatgttttatattaagtattatattatgagttcggaaggaaataaatgaatcaaaaataaat

SEQ ID NO: 114268 - DNA, 3648 bp, Cannabis sativa
gtctacacctttttgtggatgtttcacaccagaaatcacagaagcacttgctcttatgcatgctctacaatggatcaaagaccttcaactaccattacattatatcgagacagattctctatctgtagttaaaggtttacactcatctcgggagctagtatccgattttcattgtttgttgcacaatatttctcttttagtttccaacttccctggagctcagatcactcatgtatacagatctgctaataatgctgcgcatttattggcgcgctttgctctctcggtggattctaaatgttcatgggtggaggaaatgcctcctcctctaatgactattgtattttaactcttgtttaatataatagcattttctcaacaaaaaaaaaagaagaagagagagaattgaacaataggaaattaaattctacaacaaaaaataatacacaaataacaaaaaattaacagtaaattaataaaattatcacataaaaatataccaaaagaacgtagttttcgtaaataatcataaaaatatttaaaattctgtataactgtatttttgtaatttttttttgtttttgtatttttctgaaattatcccaagaagtaaaatgacaaaactaagagaactttcccaacaaatgaaacggaagcccacttagcccaggcccaaaaatggctgaaccctggtccgtccgggtctgaaagtggtggctttttggtaaatttggcaccacgcttacccaacccaactccagcctagacagacacagtcaccaaatcgatcccaacaccctctgattgtttcaattgagaagaagaagaagaagaaggtgttgttgatttcatcgagagagatagatatggcatcagggtggggtattacagggaacaaagggcgttgctacgacttttgggttgacttcagcgagtgcatgtctcgatgccgtgagcccaaggattgtactcttctccgggaagactaccttgagtgccttcaccattccaaagaggtcattctctctaaactttcttttttctctgcataatttcttattagtttgaattcttcactcattcacaatctcctccatcgattccttttataaaccctaattcacgagatcgacaatgttgtttgaagggtctgttagtttttagggaaattgtgaaaccacttgtagttgccctgtttttcatttcatatgaaggtagtgttactgtttatgtgtatatgctattcaaaattgatgaaatattattcagaaatgttgtcaattgtcatgttaagcttgctcgtttaaattacttttcttttgttttttgttggaagtgaaattgctcctgatcacattaactgcaaagcaaccaatcaagggtttcaaatttcaactttttgtgtatgaattattaatttctgtatgtgtttgctagttctcttctgggattttctttagtttgaagcatgagtggttttctttgaagactatgatggtttttgtagtacatggaaagttctagagagaactaaaagagatttcagtttttcttgtgtagaaattggtagtatgattgcttatttagtaattgaatgaagtgttagatatgtacattaatagatcgttcggatttttggactcacatccattaaaagtggctttcaaatcaagcttcattgacaacaagctaaaaattatttcaaatgtcatctgccatgaattatcttgatactgcgtgtatgaagttgtggctcataagaagatgctgcattttacattttcaagccctttcttttgagagggaatttcatatcacaaggcatctcttagaaatagaatattgtagtttagtaggtacattcttagaggacgacgacgacttgtggttctaaacaatgttgagtccaggatggattgcattatcgaagacattgcttgggaattatattggcttaggagtgttagataattgtctgtcagctaatttaaggcttgaagtacgagggaggcaacaagttgtgtaaccaatgaagagtattatgactattgggattctttttgatttttatttcagccaacgaaaattaaattatgcatgaggcttaattcatcataatactatgcagcatgattatttgctttcctgtgattgatatactcgctcaacatttgaggaatgtgtactattgtgcaataaaaaaaaaaagaattatcaagggaaacaatttggagagtaatgcgaaggaattacaaatgtcatttcttctcaatttcactaattatgtgaaggattctccaaacttattgcttatatctataaacacttgaaagaaagttgttctggatcgatgtctttgcacttattgactttctggtcattgacgcaataattatattcgttaatgtatcatatagttttgacatgttacccttgatcatgagtgaaccattagtagtattttggtgttactgaaacaagcttgtgaacttgcaaaatctttatcttttgatttagctttctttaacttggatcaaatactgattcatgattcatgttatctttttcaatggatatgtattacagttccaacggagaaaccgaatttacaaggaggagcagcgtaaaataagagcagctgccaggaagaagaaggagggtgagaatgttgataatcatcatgcatgacatttggtcattatcttttgaggtcaaaataatgattaagcattccatattgtatttttttctggactagattcttacttcatgttgtggatctgttttgtttgtactggaattggtatagacctctctggtctatgcaataaaacaaagattaatttcttttttcttgcaacaacagccgcagggtaatgaaaagtaaccctttgtttccctttctatactaattttcatcgactcatttacttttgcttggttgtaaatgatatgagttttcaacacaatggtacaagatggtctacctcaatttagctgatggcattttgtttagataaagataatgatttagaatgggtatttctttccttttgttcttgaaccacttgatttttaaagttcccctccaaaaaaataaaagaattaaaaattaagtactcaagcttctaattagctatgactatgacaaaagcataaaaaacttctaatcatcaaacataaaaagaaacatggaattgagtttttgtccaatttgttttcaataggaacacaatactcttattttatttgcataatacaactaaaatactttgaaaaacaattttaactttctacatctaaactaagaaattgttgtttaaaaaatttatatgatataagaaaaggtcgatttattaagtaactttaatgcataaagaaaatgttatttattgattttttcagcttatgtttcgtgatgcaaaatttaaatattcaataaatatatataattaaaaaattattaaatttataatataagatttcataaattaataataaaatatactataaatactaaaatataacaatatgagagggttaaaattctctccagccattatatgtccgctaatctctatactcttttttcttattaataactaggaaacaaaagccgcgcgttgcgcggtcttaaaaaaatcataa

SEQ ID NO: 114269 - DNA, 4214 bp, Cannabis sativa
gatattagaaatgtggtcatatatgaccaatattattaagtatgcatttagggaaaaaaaatttaaggtgctgtaaggatggaatttcaaattttcccctttatcaattaattattttttttgtgaatcagcttagtgtagttttcatttaactcaatcaacatttacaactgttccaactcaaaactgaagctatataattacaagatgctaaagagcatcaaactatttcctatcctcttttgtaatctttttacaacagacttttgtaattctatttttaatattgaattgcacattctgtacaaaaatctctattctttatatttttttttattctaaaagatatcatttccattttttcaaatatggtatactaaactagcaatcattccgcttagtacctgctttttgaacttggacatacttgctcgagatatccaccgcagcagagcagggagcagtttatcacttaccttccaatcaagccattcgttcagaaaacttaaacagtggttactgaatatacgctcacagaacggatggcccatcgattccatggctaaaccacacaataaacatgttaaatcttgacagatttgaaaggatactaacatgtcctttgtttgtagacgattttggactgccatccaagtaataaaactgtgctttggtacattgtagcaactccaaacttcttgatgccatggtactttattaacttccagtcttaaagttttgtatcctttttggatgctataaaatcctgtagtaaattgttgaaagtccagcagtgctttgtatttctctttgattcgggctatctgtcgccaagactagcttccatttacaataattttataactccaccaatcagccccttttatatagatattatggatctaccgaacccataaattgtcttattttgaagcaattacccacacatatttgtccagagcggcagtattccaatgcaaagtatgtctgaaccacaaacctccttcaaatttggatttgcacatcttatcttaagcaacataacctggacaatttgttttagcttctcctttccataaaaaggctctacaaatgacatttatcttcttcaacactattttttggcaaaatcattatttgtgcccaatatgaatgtatggagagaaagatcgagttaatcaatgttaccctactagcaaaagataggttccttattccccaaacccaaatcttttgagggtttgaggttaaggggtttaggatttagggtttagggtttaaggtttaggcattcacattctaaagctaaaaatcttcgagcacgtacatatcgaaatacctagatatttgaatggtaaatcacttttactgaaacctgaggcatccaatattctctatacttctccttcctccattccactacagtataatgtagatttcagatcattgggaaataaacttgaagtaactgaaaatagtttgagaccttataacatgaagtagatggacttgaagtcaccatgacaaaacaaaagtacatcattcgcaaagcagaggtgattcaaactcagttcaaaacaccaatcatgatacttgaaatctaccatgagacccactcgtgaaagaattcttgataagtatttcatccaagaataaacaataagggagacattggattttcttgatgaagccctcgctttgtttcaaagaaaccatgcatagctttatcaatcgtgatactaaaacataggtacaaatacaaaccatgatgagctgaataaatctgttcgaaaagtgcaaggctgtaaagcatttcttccaaaaaatctcactccaaagtatcataagtcttccttagatcaagtttgatcatacaatttggtcttatattcttcctcctgtattgcttcaccaagtcttggcaaaccatgatgttataggctatatatctaccttgaatgaaaccactttggttctgtgctatcaactcaggtagaacttgtctcaatctagtacataacatcttagttgccactttgttgaaaacattgcagcatgttattggcctaaagtcattcaccaattctgggcatttcacttttggatcaatagtaagtgttgtggagtttaactctttgagaaatttccctgtatatagaaaagagagaactgctttacatatgtcttccttaaccatatcccaattatcctgaaagaaaaagctgctaaatcttctagccctggagccttgcatcccggaatatcaaataaagcttccttaacttctgcctcagtatactctcagaggaaaaaaattctgcttgcctcagacaagattggactatttttgatcacgctcttactaactgaacttttattctctattttggatctcaaattaattattatttatcccctacgatattacaaattcagtaatggcgtggaaccaaaaattttgttagagtttggtcagttttgatttttcagtttttactttcacccctactctcaaggttacaaataatgtgtttctcttcgtactgtactgtttatgatcaatgtcacccctaatcgaaacatttgtaattaatgtcaattggaattgttacgagtgacattggggttcattggaaaattggtagttgatagagtgtgtaaaagttgtagcttgtgcctcctttcgtcaaagcgagttgatgtgggccttgacctttctcaaactctcatatagatgtttttgttaagtcacatgatggtctttattggcgtttcacaggtttatggaaatatttttggaagcttttagcaatgatattttgcaatgataaactaaatttgaggttagggatgaaattctgcaatgttttacaatgtttgactaaaaatttaaacgtttacgtatttaacaatgttttgcaatgattttgcgatgtatttgcaatatgagactaaaaaaatgtaaaacacatcgataacattgcaaaatcatcgctaatcattatgaaaaattgagtgtaattttgcaatattttgcgatgtgttttgcattttttgagtctcatatcgcaaaaatatcactaaatacgcaaacctttaattttttagtcaaacattacaaaatatcgtttatcatcgcaaattgtcatccctaacttcagatttggtctatcattataaatacatcactaaatatcacaaaatatcacgaaatatagaaaaatcagaagaagaaaaaaaacgcaaaaaattcaaattaaaattttgggcgaaaaattaacaaaacgtaaacacaatatttatatttgttaaaaacaaattttatatacatactacaaataaccaactccaacaacatttttagtatatggtggtggtggtagtggttgttctcgacggtggtggtggttgttttcggcagtgatggtggttgctctcggtggagaaaacgtgcaacgagttttgcaaataatggtgatgatggttggtagaaagagagaaggagggaggaatggagaaagagaaaataatgaaaggagtattttttataaaaggagaaagaataacataaatttgtattataaggggattgttttaatagagagtgctcatttttaagtatataatgtgaaatttccagtctacattttaccatgtgagatggagatgcacgagtcatgactgatgaccatcaaaatcatcatattgaaatattgccttaagaagaacctacgttgtttaaagcaattaagttcgaatatataatctcaagtttataaaaaataataataataatttgatttcataaataagtcaagtagtcttataataagattatatatttgttagtttagtcaagtagaactacgttctcccctttattaaggttgaccaaaattgtcgaatattatttcttattatgttgtagttattatgtcaaatatattatgccaaaccaaatgagattgtaattatatttgtatatttttaaagtaattaatagacaacttggataagcgccaaatgtgtaacactcaataaacttgggtaagatatatcataaataatctcttaatctcatataacaagaattgtaatgtttatgaattaagatacttcaacattgtcgaaaagattgcattcattttattttaaagcattttcgaaatgtaatatatatttttagaaaattaaatttgagttggaaattaatt

SEQ ID NO: 114270 - DNA, 1576 bp, Cannabis sativa
ttattattattattatatttaactattatatccctttagtcctaatcatatcaaaactgctcccccgctacaaacgggagtttttctctcctttttctatatatcattttaatgaaaataaagaaaagctgttatttctactctctctgctctatgcatataacaataattcatgcatgactgacacttttatttttatttttagtaatgaaagagaaatatatatcatgtatatttggcagtgagggggtggaatcctaaaaatattcttatataaataaaaagtgatgaaaaatcaaataaaaatgggaatatgaaaacaatattgtatattcatgggagatgggtttgcagcttgtacccctatacgaggacattaacccttgtcttccgggtctttgaggtcattattttcatgcttatatatgtaaatatatataattaatatatattatgtgtagttttgaaagggacagattggaagaaaatcttactcctaagcctaaggatcccatccacatatgatacttttggtcaactccccccttataattagtttcttttcttcaactatttattcaatctttctattattattagtatatataaaaagtaatattcatttatgtaatatttgttgagaataaaacaaaaaacacaaaatagttaagggtttattctaatataattaacagacatgtttaaattctatatactatctaatataaaagaaaaaatattctaaatttgattatatatatgatcatctgtaaaacaatgaattttattcaagtcaatatataagccatggttaacacgtacatatataatatataggagtggacgaaggcgcaagctctaatctttgggaggggtggggggtaaatagcaaggagtttccataattttcaaagaatttaaggatattatcatattattgtaaaaaaaggaataattagttaatatttctttccaaaatgtactatatttaaagattttgtctaatttcgttcaattttattaacatcacgattgttcctgtactaagttgtattgtgtgcctagaattttggtatatctatcaaatcgtgcttctataattttgatatgtattaaattaattatgtcacgtgatccttccatccacgtcaagttttcattaataaaattgtatgaaaatttttgaatttaaaaatcttaatgacttaacaaatttaaaaaatatgatttggtataagttaaaattctatggacaaaaattctaatttgtcataaacaaatatatagattttattttgttccaaatttgggagaggccggctacatgtatggcttcattcctccatataaggtgtaatttttattttaaataaaaagaaattatacacaattatattaatttttaaatatatattataataaaatatagagggatcaagatttgggattatcagtgacccggccctagtccattgcttattagatagattatatatatatggactaagcaatctatatctatatatatctatactagcaaaaagctacgtgcaaaggcacgtatactaaattttat

SEQ ID NO: 114271 - DNA, 5626 bp, Cannabis sativa
ctcctgtataagagccattcattccgtgggtgtaaggacctaatggaggcttgaagcggggatgttacacaaccataccttattttttatcctggatcttctttccctcctctggcacttcccattcaggaatagcgacctcagccacatgaacttcttcctcgacctctttagaagggtacatcccgtaccgaataaggtttcttgctgaggttaatagaaaaatatttcaagccctatctgaaagcgaaagaatggtctgagcccttgatcttatcccaacatgaagtgaggatgacagtatgtcttggtcagctagaaagataggtggtcgacatccatcccttgaatgatgtagtagtcttttaagtaaccacctatctttgttacctcgatatcgttggtaccggtcagccataaacgatccaactgagagaagtaaaaataacatgaacggttatgcctcaggctaaacttcaagtcgaacagccaattggtgttgtgtggagacgacatcccccatcgctgtttcacatacagaatgaacatcatggccaagtgtctaatcgcctttggcgtaaattgtatcggacagatcttataatagtttgccacctttttaaagtaaggatggagaggaaggagcgctccctgttgggtgtgtgactcaaaccatgcataaagacctacctctgagtttgtggtgagctgtttaaaatgaggaagaaagacatctacgtccccgagaaggcctttggccaccaagttccttaaccttttcaatgtgagggtggacgggggagaaacccaccgaggtttaactttctcttggaccctcgtaggaacaacttcttcaagatcttaagtaacataatcctggccctcaattaggatgcccccaagctccgtgatgggttccccgaccttattataccctttgaatggtataaatgcaggggcaacctcttcctcctcttcctcttcagcgctagttgcacggagctcgccttggtcctctacctcttgcacttcctcgttgtcgatgagcatttcaatatcctcttcaggatttttggcatgctcaacattagccattaccaccagtcgggtaaagtgggggtcctcagtggaaaccctcttctaaatttttttggtctgtaccacctttttatgcctagggcagaggatttggtttgaatgtgtgctttgcaatgttagttgtgatctccacgagcatggagatcttctttgaaggctctggatgaccctcgagaagggtgtttggaacgtctgcctaaaccctatacatctatgaagcagcagatattgcctccaatctttgttcaactcccagacaaaccttccgtacccttctctgccaatctggtcggggtaatgatggtattgcacgatgggctccagagactttaacgaatttcttataaccttccactcgtcaaaacttgaagttgatgaactctcgctagttgatggtgaagctgcacaaagcctgggctggtcttcgtgaagtagttggagtagatcttcgtctatccaatgcttactaccttagaaattgcacgagttcatctataaaaggaaagagagagaaagagtatgaaccatatagatataatatcttttccaagaaaaaatattaccgatactctgacaagacggatttaaagatctgaggaaaggaaattttgtcctaatgacgaaagtcctagaaccaaaagttcgaaaacacaggaaaaatctataaaattctagaagcaccgagcaagtaacgtttcttcaacaaaacagtttggaattagaaagaattcaagagtcatgagtcatgtacatgcattaggacccaaaattagaaatcttaatttctaatattgaagaacagttcaacataaacccaaattttacaaagcaaatttgagcaaaaaataaaggcaaaaatttaaagaaattgcataaaaattagaaaacttactcactgttggtaggattctaggtgatgtttgatttttcctctggaaatggctttgagtttttcccccaaaaaagatacttattactcattgaagagtacaatcgttaggcgtgcatccatcgacagtcgtcattgcaacaatcgatgtccattttcaaggaagagcatcaaattcccaagatatcaaagataaagttatattttcataccccataattagatcacatcaagtcaaaatggagtacaaaatttgaacacatgtcacccgtccaagcaactcaatggttgagtaagtccacgtacgagcagatagatcccacgtggacttggagggaaatgttatcctaattttcgcaaagggcggtggcatttaataagagtgacatgtagagaatgtttccaaagcctggacagatggttgtccttcaacagtctgtccagagagttttacgtgaaattgattaagtttaaaccttcaacaggtattatccaaactgagcatgtgcgctatggctgtacataaattttcataaactgcctaaaccaattaatctgtccaaaccaaaccgaaaaatccaaaaaaaatacaaactgaaaaaacttgacaaaattataaacagccaaatctattaattggacatgttaaaaataggtccaaaccgcccaattaaaccgaaataacccgcccaacctaactagtagattttttttctttacatttcacttctaatatatattaatatattcaatctttgcatttatctattattgtagcttgtagtactaattgcatttatctttgcatttatataatttattttggcatatatatatatgtataatcataataaactataaaatttggacttttattatttttgttacaagtacatttggttatttatttatatacatacatatatgtatatatgatatgtatgcataaaaataataagtaataaattttatgagttccttcctactaattattatagtcagacacttttttatttgactttagaacttaaaaaaaaccttttttcgccgggttggtcgggttaacccgaccaaattgaccaatctgtcggttggtttaattttttttttatttggacgggttgtacttaaaatttcgtaacctaacatttacattgggttagaaaatatataatgtaaaccgaccaaaccgtctgacgtacactctattgtgcgcgattgtccaagcatgttctcatcatctagtaaagtcaaatcctccaggcaagataatgcgtctgaacaaagatcttcaagaatattttccattaatatatccccatttatagttcaatcgaatccttaatttagggggattgacacacatcagaaaaaagattataagaaactagcttagtttttcgttttattcttaattattttggataacttaatttatatatttttcttataaatagtagaatcatttcattatttaagaattccaaatcatatgttcttgagagctattatgctgtcaaaataattgtaagctttttgtaagaattattaagaaactcacttggtcagtttgtgatcttgataattctagtgatacaagtaaggggagtactagactattactataatcaggaggtccaatctctataagttctagtgttcttattgcttaatttcatttaattattattcataatctcatcgttgtgaaaactcaatgtcatttgctaaaagcaaagtcaacactaaaaatattacttactaattctctcacttgtaaaaatacaacaattattaaaataatgtaatttatattaaactacaaaatatattaatggaaaaaagacaaaggttaaataagtaaactaatatgtaaaaactaaaaaattattgacacttttatataattatagatagatatagatatattgtacaaaaactatattatattatttacctttagaatacaatgtcatcaaaatagtttggctagaatcaaataaagaaaaaattgagttttgaaggcatagtaggtgtagttattttcaagttctcaaccttgttgtgtttatgaagagaaagctcattcatgacaaaatatttagcggttagactaaaatgattcaagttcaacgaacatttcacagtttttgattttactcgaacaagatcgatcatcaatggctttggaagtcttgtgaaattcttcttcaatccctcatgatcatcagatgatttgaaagaaacatagattgctatggcaatgtcatcaagtattggattaaagcttgatttttaagaaataatttatttacaaaaatacctattcaataaaaataataaaccatttttggttgttttatatatagtttattaaatatagtagtcatgaaattgttttttatttggttattttttagtttatttatagttatcgtgaagttgatttcttttagttttttagttattctttttttttactttttgcttagaaaagtgtatttttgtaattttaaaacttaaaaaaaaagtatttttataaataaaaatttaatgtgtaaaattataaataacacatatgtaaaaaaatatttttaaaaaattccctataactaaaccattaattaactttaattaatctttatagtactagttaattattaattataattaaagagtttatttaatctgatttgagccacccataaagctaatgcaaatatttattaaattataattcgagcaaattgttgaaagaattgaattccacgaccttaactttcatgcctaaaatgaagtgtccaaaagatgttagcggtttttgaccaatagcctgttgtaatgtcatatataaggtgataataaaaataatttgtatgagattaagagaggtgctaccgaagattgttgctcaaaatcaaagtgggttcattcaaggaagatttatagcctacaatataatgattttccaagatttagttaaacattattgttgaaataaatccccatattcttgcacactgttctgagtacaaagacacagattacaagagtgaaaagattaaagtggccttcggcctctaagcaacctagacagagtatttaagttagttacaagtctgttaacacttgtaactaactctcctatctctgctctccactacagaatatataaagccagcaaaatcaaaacgaaaaaagaggagcaacacagaaaaatcagatcagtacaatataaatacaaaaacaaccagatcagttttacagaggcataacaagatacaaaaatcagatccttttcacagtgaagagatggactgatttttggggagtctttggaggaggcttacttggagtaagctttggaacctaagatgtggtttggatatccaagatctcaggaagtttgttcatgcaacaaagaaaaaacacaacattgttagtactgattagagaggaataacagagagaaagaggaggaaaaacgttgtaatattcggattaccaaaaataaatacttgtgtattttcgaatctaaactcattgtaatcatttgatcattgaagatccatagtgaacgaggcgagctcgaagaggacgtacccgcacaattttggggaacctctataaaattttggt

SEQ ID NO: 114272 - DNA, 1383 bp, Cannabis sativa
acttcaaataacagagaaatactaaaaggcatcagtagtacctgacattctctaacatatcatattatttttagtacaattaaatattgagtctcatataatttaataaaataacttttatagaatatcaataatcaatcataaaacgtcacccaataccggtcctatgaatatataaaaattttatggccctcacatttaaaaatacatatatattaaaatagtgttacaagactgaaagctacaccattgtataatgtattacacacctcaaccaataaaactgtaaatattattgttacaatacacttaattttacttaaatgaaaacacatttcattttttattttgaacccccgtaaaatatgaactctaaacacgaacctagctcgcttatgcttagggttttgtggcgtcagctatagataattatagataatgctaaacactaaacactattaccatatgtaataaaaacaaagctttaagacaatgaatctcaaagaaaccattagaagtagtcgaaaccagaattaaactagacaagaggctgtgaatatgaatgattaatcaaagaccaaagttaaacatcctaaacctaagctagtcattatatctatgatcataagattgaaactacacataacaaacccataaacatcaagtaacaaaaccagttcagtcctatgattcataatctcctcatcaaaagacttgttaatccaaaagcaatttcgatggagatcgattacgagtttaggacaattgcgcttaacatgaccttgttggccacaacgatagcaacattatgaacttttccctcctatcaatttcaacaatgcgcgggaaatacatacctaaaaagcttttctcaaactcatcccaaccaatcgagccaacatctcggtaatctagaagaaactcccaccaacggtctgcctctcctgtaagcatgaatgcagctaatgtaagcatttttttactacccgaatccatttttcggcttcatctggatcagataaattcctcgcatatgttggaggggatagagattgaaattctctcaaatatttcaactttctctcggattgagcaaatgatgatgccatcttgggtgaacttgttgtgtaaagctacatgtagtagatgaacaattttggttagtaaattaatattcactcaaaatatcaatataagaaaatcaactaaaggtaaatggtttagttatttggaagattgaacatgttaaattgaaactaaaagaatacaaaggggaaaaacccccaagagcttctccaaggaagcggcattttatataaatgtcgttcctttttgttccaaggaggcaccattcaacacagcattttgaggttaatgctacag

SEQ ID NO: 114273 - DNA, 4552 bp, Cannabis sativa
tttttttttttttttcaatttaggaatggttgtggtgggttacataactgtggaggtgattttctgtgctagattgaaacttttatgataatataatggattgcaacaaggatgaggcagttagggctaaggatattgctgagaggaaatttaatgaaaagaactatgcttctgctaagaagtttgctctgaaggctcaaaacttgtatcctgggctggatggtctttcccaaatgctgacaacactcgatgtttacatatcagcagacaacaaaatcggtggggaacccaattggtacggcatacttggtgccaattcatgggatgatgatgagacaattaagaaacagtatagaaagttggctcttgtgcttcatccggataaaaacaaatctatgggtgcagagggtgcatttaagctagtttcagaggcctggagtttgttatcggacaaggttaagagactagcatataatcataagaggaatttaagaggatctcaaccgaaagttcagacccaaaccgggggtccatcagcagcatccaatgcaaatggtcgtcaacaccctacaaataatgtgacttctaaagttaaaactcagcaaactaattctcggaaaggttccactccggctccttcgtttaagaagaatgatactttttggactatttgcaatcggtgcaaaacacattatgagtatcttagaatttatctaaatcacacccttctctgccccaattgtcatgaggcctttgtggctctagagaaggatccgcctccaaatgtttttaagcaatccaattggtcttctcgtcaacatccaaatgcaggacagactactgcgaatagcaacacgattaattttggcaagaactttccaggtactcaaaatgtggcacctgggtctgcgggtgccaattcgttcactaagtcaaattaccagtgggagttctccaaaacaacaggtgatcgtagctcggtagcaacatcctctgctgctgctcaagctgcaagtgtggttcaacaagcaagtgaccgggtgaaaagggagcgagaggaaaggcaatcaattgctgattgggagaggagtcagcttttcaaggatttaactaatccttctgataaagtagaaagaccattgaaaaagagaaactcggaaaacaatctcatgaatggttacaggggctttggtgctaatcaaacgggcacaggaaatggagtcgatggtgttggcagtgcatatgaaattagaaaagggaatgctgatatgaataagacatttgaaacttatggcaagtctaatagcttgagagaattgtcatatactgaaactaagattatgcttatgactaaggcgagaaccaaaatctgtagtatgcttgagatgtggagatcaatgagtgtagcagacgccgaatacaagcaaaaggagaaagataaagtgaataagaagcagaagaaggtggtgaaaggtgacaaagagagttcgagacatggtaactcttctgttaccagtaagaagcatgtttctggtaacttagctgatggtgcagagacagagggagatgcccactcacccggttcaatcaatgtacctgatcctgattttcataattttgacttggacagaactgaaaattcctttggagaggatcaagtctgggctgcttatgataatgatgacgggatgccacggttttatgctcgcattcacaaggttctctctttaaagccatttaggatgcggatcagctggcttaattcaaggagtaatagtgaattgggtcccatggactggataggctctggttttaccaaaacaagtggggagttcagaataggaaagcatgaaagtactgggacattaaattctttctctcacaaagtcagttggaaaaaaggcctgcgtggagcaattaagatatatccccaaaagagtgaagtttgggctgtttataaaaattggtcacctgagtggaatgaaggaacttctgacgaagtgatacataagtatgagatggtggaagtacttgatgatttcagtgaggaacaaggtgtttctgttgctccactagttaaggtttctggtttcaggacggtgttccgtatgcacatggaacagaaagaagtcaggagagttcctaaagaagagatgtttcggttctcgcaccaggtcccttatcacctgctaacaggtgaagaagctgataatgctccgaaaggttgttatgaattagacccggctgctacccctttggaactgattcaggtgacgacagaagctaacgagttgccaccaacggagaatggcacaagagtggcagaacagatgcctccaagtactccaactagagaagcagacgaaaccaagaacattgcttccagaagtgaggaagcaatggtagcaacttcctaagtgtcccgaccttctctattgcagcttgtcgtactcttcgttccttcgttcctttatacacttttccactgctctggtgagtttcaatgctctttttcacgtctatgtttgagttggcttaataatattaatgtgatagttatttacatacgagttagttaagaagtcatgttcagtaaaattggcattagctttccaataattggtatttgggttttgttttgattgtttgataggaagagaaaaattcagaaactgataaggtcaatgatggatttgtggggttgccatttagcctgatttgtttgctcgaatcacttgatgaaatttatgaatagaaacagagcacctttcatatatacttttaaacaacaaaaccttttttttccctttctagctggccaactaatgcttgttcttaaatctaagtttttgatcataaattgtatcacagctgctgggcatttctagtgaatgaatcctgctggcttgttctctatttattttaatattttgttgtgtttttttttgatttccatgctactcatatatgttacgttaatttaaattgactatctgatttagattactgtaaaataatttcattagttttggaactttattaactacggctccttatttatttctgtatttctgctttgatatatagtatatacatatagtcatatttttatatggaatagaattacataaataagttctatgactaatctaatatataatacactgatcaatgtttacttaattaataatcagaatccattcaaaataaataaataaataataataatcagaattagaaattttgttttagtgtgccctctattttcttctctttgttgttcatatatacgtgtatagatataaattatgttcaatttaattgactttgtttgatttaaatcactgtacaataatatcatcttagctaaatattattttggactttttgttttgcaaaagttaacgattggatcctttatttagttaaatgaaaaattggatcttgtgttttctaaaatggtatgaaatagtgtttttatcaaaatataatttaataatagcctgacctggaggtgtatatgagcaaactgattaaatttttttatatttggtcgtgctagaaactagcctcaggttggttatgttaaaaaaaattgaccaaaattgagcttaagggtactattttgtacgattttaaaaaatataagatttaatttgtcatttaacaaaacagaagagtttggtaacttttgcaaaacatccaaaatggtatttaccttcgtatctttagttttgaatttgtattataaactactatttcaatgtttctgtatctctaattttgtgcaagtacgaatatatatatatgtaattattactaatttatttacatgtttctataataatactccaatgtgaaattaataggaggaataatttcaatatcacttaagtttgtctttgtttctaattttgtctacttttcatctgagcattgctatgaggccataccaccaaggtgtctagcacctctacgacgtgatatcttatagttggttagcggttctttataatctttattaaattaaaataagtgggacccgatattaaattgtaccaatagcgatgttacacctcataagggtgttaggcactccgggtgcccctttagcatttctcttttcatctcattttcttcagttaactctgacatccatgtggtttttgcacagctattatttgcctcaactcctttctccaaaaccccttgttgtgaatatgtagctagggctactctattaatatatagggaaacctccatcaattgattttgtttactcataaaaatgtgtgttttcattttttaaatagagttttcgcaatttgggttactgttagtcatagttgagtgctcatgtatagcaaccacacacacccacatggataaaatttacggaatgtgcaaggattaaacgtaatgacttgaaattcaaatggtctcatttctatgctagatgttacttaattttttatatgagtttattttttattctacctaagaggagtagctcaaatggtcagacatgtgatttgctctcacaatgtctgag

SEQ ID NO: 114274 - DNA, 1361 bp, Cannabis sativa
actggaaattcaatgatgtcaatgacttactgagccgaattgcacaagggtctgatcctaccttatattcattgggttcaagtacaagcatggagtcaggtgcaatgctaccatcaagccaatgcctcagctagctcatccaatgcttcaagacaccaatagtgaagtgagtgaatttaattgataaaagcttctagtgcaagtcatgtataatatgatagaaaacatcttgttatgtatcttattgtgacagctcagtcaatagttcacagcactattagagagtacaagtgttaaagaacatttcaacttttgcttggaaatatggttgatggtgtgcttatactatgtgagatgttctataagcatatatgtatatgtatatgtaaatatagttggctgtataacatagattcttcaaaaattgttttcttttttcttttctttcttcaccccaatttgtatttctttaattatttttagtgaaatacatttagtgtgtgtttggaaagtcgattggtcattggaattaagtgtaattcaaagtaagtaataggtttgatgtgtttgtttaacaaagtaattataaagtaatcatgtaattgacggctcaaacacatttgtctattcaaatctcatagggtcacgatgtaagatagttattagcggttttctataattattattaaagtaaaataagtgagatccggtataaaatttcaccaataaaaataccgcaactcataaaagtgctaagcaccatggtcttttagtatttctctatttattagcattacactctttaacatttctccaaatttaatgagagaacaagtgtgacaccaacattattagagacgagcattgttattatgttattggacaccaagggtgcctagcatcacctagatgtgacactttataattagttagtgatattttctaaaagttatttaattaatttacatgggactcgatacttaattgtaccaataacatcaccgaggagggtactaggcataccatttagcatttatgtactagagacctaacccaagttgacacaaacattaattagctaaagactaaagggtgtagttggatagaggtcgttttatgcctttaatgatagtggctccattttggctcatggttggacttggagatggcagtcagaaacaaacaatacttggtatatatttataagcaaatccacttgtccattattattattgataacatgatcatgtcaggatcaggatcagtaggttcatcatcattcctactaccattcttttgtattgtcactgtgtactatgttgtgtggtttgctatgtaacgtccccgtttcaagcctccat

SEQ ID NO: 114275 - DNA, 1848 bp, Cannabis sativa
ttagccgccaatatccttttttttaatataaccaacttgaagacgattcctaatactaacagatataaaaaatgtaaatagttttgtcatagcacttttagatcgaattataattaaattttattttgaaaaaaaatcaattcagggttctatttgtaccattttaaaaaatacagaatctattttgtcatttaacaaaacaaagagtctaattagtaacttttacaaaacacagtgtccaaaataatatttactcccataattttactaaatttgttgtgtatgataactaccatgaattttgatgatatctcctcttcctcattttttagacttattgatttatagtgtgaaattatggagttttcctctccaaacaaaaaacaattgtaaaataactaaagaaaaaataaattggcggagagatcaatatttattcaaattaatttgaaaactattggtgctaaaacaatataggataagttgaggaatattttttttttttatctattaattaaaaatattctcatattatatttcactgaaatgtacttatttttgtgggtaagttgcccaatatatctttaccttctatttaagtctaccacatcatttatattaacttaagggtataatgaggacatcatctataaaaataggtatatcttaaaaaaaaatatgaaaataaagataaaaattaaaatatataaaataaagttggtatacaatctattttttttttaaaaaaacatcatacattagttaacgggggccacttttcaaaaaagctaagtcattaacgggcccaagcccaatgtgctccatcctgggccttagagagacacttttgcagcaaggtgaacaagtgagaccacaaatataacaagaacaattttgtttgagttgtatcatctgaattgcctcttagatagtggtaaaattattataaatattcaaattctattcaatataattatttatttatattgattgtatgtaagtaatattgaaaaattacataaaatgtaattaaaactataacaaatatatataatatagtagttagttcactagttataataaaatgtaaaaatatataatacgaattcaaatctgtataaaaaaaaaactagtttatttaaataaaatagaccagttcgaataaattacaacacgaaaatattaagattacaacttgtgttgggcctatactaaagaattcttgacaggtgcaatctatattgggaaatttacgtgctatactaatttttgttattttcttacaaaagtactgtaaggtggtattttttttttttactgtgtttttttacaagtttcatattgcagtatactgtgttaagttttcactggtgttctactggtgtttaactgttgttttgagttgttctgctatgtgttttactggtgttttataaaaatacagtatttttataaagatttttgtgtgacatttttgtaaaagttaacccaaattccaatatttttataagtttgattataagttatagcatatcaacaaaacttatattttttcaaactttataaaattgaaatttggcttagcgattagagtttcatatgcacattatgatattactctcaaacgctttgttacaagatgcatgagtgttacatgctcaccacaaatcacaaaaaatatagcacctatatccaccaactagctcatctcacaatattctataacattgagttaaaaaaaatgttaatttctgttatattattttataatataataagtgtagattaaaatgttgtaatatatattattatgtgaataatatgtattaagtgtttggtaaataaatt

SEQ ID NO: 114276 - DNA, 2594 bp, Cannabis sativa
gaatgtttacctactagtaacctgctattacaggtcaaagaaaaatgtaaccattgaatagtcacccaatggcaaaattgtaaagtggggcctaatccatatcatggtcgaccacttatgtagcaatttaccatttatttttttccattattttaatgtcaaataaatctaacctaaccctaggtggtttcttataaataggtagtgatgactttagggaaaagatgatgcatctcattctttcagataaatcgagcaaagttcccttgcctaaagctcctattgatattggccagattagcttcaagaagatcattgtccataatagcaacttaagcactaacactgatttctatttcttgtctgtctttttaatccgagatttagaagctataaacagcgcttcaattttttccactgtgcagctttcaattcttgtgtttgtggatatgaaaaaggtacattcactagagagtcctttgaagataggtgccacatgatcacttgtgttgagaatttctccaacagatgcaatcaaattgatagtttgcttgactttgagaagatattcattaaggctgagtgatcctttctctagatttttgaacttggttcgaaacttaaggatctttgcagagacttgcagtgtgaagtatttttcaagtgtgctccagatttggctagctgaattgcatccaaccattatggtaagcaagctctcagtcattgaagacaaaagccaagatacaagaagttgatcctgaactttccaatttgaaaaggtatgattgacattgttaccaactcggtcttattttgtgaagtactatggaagagagcttgattcctggatgtaagcctgaagtcgatttcctctggttgctacaagaacttgttgcttctaaaggagatagttgtgattgttcaagtgtatggaaagagtgttattgaagtcgataggtgagtaatcaccattttccctgtttcttgcattttgtaggggaactatgctaatttaattcgaggtattccatgcttatggatgaaattcatctccagaatttgtgacaatatttgttatcaaggttagaaaatcatgctctggtaccataatagttcttcttgacattgtgcttggacagtaagaaaaacagagataaagtataagaaagataagaagagaaaagagagaaaaaattgatagaaaaagattgaatgaaaggttcttgatctcgttatgagccataatagtaactttatacaatcaatcaattattaattaaacaggagttgcataataaatctgttaggtggcgtttggttggacgtaatgaaatggaatagaatgaaaaagaaattatttttattccattttttagctgtattttaaagtattagaatgtcattctaatgggatgacctttctactattttgatggagtgactatttcattttgaaatgaaaggaaagaatattttaatgtaaagtgagaaaaaatttaattatttttttattaatttttttagggaaattgtctcatatactattttttaattttttttttccaaatttacgatttgggttgctctagtagttttttctgtgatctctatgtgggttgctatacaaattttgattgcgatttagattgctccgttagttgctataggagtttctgaatagaatttcgtaaaaatgtaaaaaaaaaaataataaaataaaataatatttttaaagtgtaaaaattaaaaaaaaaaatctatttttctaaatatttttaaattttattctattcctatttctatatttttattcctccttaccaaatgtcactttaaaaagcaattcactagtagacatctcaattaacaattctaacagaaagtaactagctgtaactaacttttcattttaacaatgcttatcagtttttaatgaaaagtgacagattaaaaaaaaaactgtgaaaaaagccgccgcagcctcaaattaagaaacaaaatcaacatgatcacttcatcacttgttcataaaaataggcaatgcatcaattgacaaaagcttttaagctacacacgtaagaggtgggccacatgttgtagttggtcaacttatatttcatatggtcaaagtgtcaaagataatgtacgtagtgcggttactttggaaaactagaaaaccacgtgcaatgatagcccctggtttagagacatagtatatatgtgttgtttttttttctaataccatccacaattattacactaatttaatatagaatagtttaccgtttagtgtaatatctttaataattcaaattaaatatcacacaaaataaatatattttacttaaaaaaatattacattttatattatttacattaataatttaaaataactaatatataatataagggatattggcagctaaaccacctaaaatttacgatttgtaacacttaaccacaaaaactgaatttttagcagctaaattacttaaaccctagttccgttttgtttagcacacctccgtccaaaaatcacagttaagtgtcacggtgaactgttcacatgtacacacttgtacacgtggcaa

SEQ ID NO: 114277 - DNA, 6423 bp, Cannabis sativa
ttaatattatatgaacatctccatttataaagctaaaaagtagatcaatgacagaattagtatatctgcaatcacataaagatataaaaatattaataaattacatggtttatattatcccgaaagtatcatccttctccccgccatgtttatttgggaataaaaaatgaatcccattccaactcttatatttatccccatttagaccgaaattcgcgccctatttataaagacggtttcatgtggtgtcatacctgatacccataaacaaaataaatgtgcatcctaaatgacttatttttaaaaattaaaagcacctaaaattatctcactaatgcaaacataaaattaaatcatgaacagccacacctaatcttttgtgactccaatcttcattaaggaaatataagcaatcaatcgaaaaatcacaagcattagaaccaaagccaaggccgaaagcgcctgtccatcaagtcctatttttcttatagatggataatccccaatcaagcatagccctaatccaccaccacatgatctttcacaggggtatgcctcatttttcttgtactgagtccccaaaaggagcttgtacgtgtgatagctactcgaaacgtatttgatccagctaacgaaacgcggcacgttttggacgtagaaccccgcggtgagaaaaaacgacatcgtaatcacagcggcgactgcggtggcggaccgtgtattcattaacacggcgcctagggcaaggccgagcccctgtgagacaaggacgttgaggagaatgaaaaagagagtgagtagaaaggtggtggcggcgggtttaagaccggccatccagtaagttattgtcacgaatgcggaagggaggagtagctccatgggaagatctccggctgatcttgctatgtagtaggaggagaggttgtacatgcctgatgctctttcttttgataacatctttcgttctggtgggaaggtaaatatggcttgagtaactgggtagaatccccagaatactgccatgtagaacaggagtccactctgtgtattatcattaccaaattaatacttttacgtgcgattttaataattaattttgatatgaatcaaattatatggtataattaaatgtgttattcatattttacctgatcttgtatttgggaaatgtcggattgccaccatagtagtccgcacaagaaggatataaatagtacctgagcaatctttaagctagagaagttgtggtgccttctttctttgagtcctcttctaaacaagacggagaattgttgcccccatgttgttgaccatcttttgtcctctaaagatgaatctagatgaaactgatcagtactatactcattagttatttcttccacttcaagaatatcagccttcactttctcactcagattcagcttgtacgctaaaaccaatctctgcttaacttgctcagctccctcatcatcatgtctatcgtctgttggcaaacctgtaaatataacgaaacacgtgcctttaatttttattgagagaattcaacattaataagttttttttttctttgaaatccaaaattaataagttatactatacaagtatacatgaaattttacattataaatttttgaatatagtataatgttagttagtgtgacttagtgtcgagttctttatattttattttaaactaaaatgcaggtcaaatatacgtaatgataaccaaacaatatatataattgtacatacttaatactcagagtaactacataccattctcgtgtgttacaatccttacacactcaaattacacgtactaatacttatttattgcatgtgtacgtgtaataattacaattataataattcaaaatattaattaacttaccattagccaaatcaagtagaaaatctgaagggttcatggcaatggatggtgcatatcccataccggaaaaataatccataacatccgacccttttccgaaatacaaagaatttccctccgacaataacatcagcttatcaaacatgtagaaaagcctactagagggttgatgaatagacatcaacaccgtccttcttcctgttttggcgagttctgccacggccgagacaatcttttgggccgtggtggaatcaagcccagatgttggttcgtccaacagaagcaagctaggatttatcaacaactcctgcccaatactcacccttttcctttcaccacccgaaattcctctcaataacgctccaccgaccacgctatccttgcacttggtcagtccgagctgggagatcacctcttcggctgtggcaatcttctcagccctctcgaatgtgttcggcatgcggagaagggccgcgaatactagagtttcggaaacagtcaagtgggggaagaaaacgtctagttgtggaacgaaaccggtggtgcgttttattgggttggagaaaggtttgtcgttgtaggttatggtacccgaaagttggccttcggttaataatcggcttcctaatgctgttagaagtgtcgttttgccgctaccagagggccctaacatggctaacacctcgcctggtctcacaactcctgataagccctttaagatcgtcatcatgtcttcagaacttttcctattttgggtaaacttcgataactttcgtcgtttgctggggttaaccttgtaaacgacgtcgtcaaactatgtacatttacaagttagtctatggttattacctcgaattaaaattgtataaaaaccatcaatatatgtacatgtgtgcgtgtatgatacgtaccttgagagtaattggtatagtagctctcttccagatggacatggcgggagagtttaaggctggggtggctgtaatttcagcttccaaatcaaccatcttgtctaagtattagtgacccaatctcgtgatttgtaaaagagtgcgtatgtatatacagaaatttagatgactgtgaattaagacattaattttactataatagtgaccaatttaagggttcatgcaatagtgatgaaataattgatgagatgatcaaaagtgttgagccaaatcaacggccccttttatggtttaacttccttgttatacataactaatcaatatagccgcggttaatttaatttttgtatcatatcattcaataacgtatttcatttgttcccttactatattttactgttgttatatgtcactctttgcctcacccgtatctcacttgtaattaatatcatatctcacacatattgacatacactatttcacttattattatcaatgtattggaatactcatcagcaacgtatttctctccttattattattatatttcatctatattaccttatctcacttagtgttattattagtcaacttgatgaaaattgcccttcttctaaaacaataatgtataaatgctattggtatgattaattctaaaaaaaaaaaataatgtataatcttttagaaattgaattaattgtatttacaagtgttttaatttttttttcatacttaattaaataacaatagtttatgtgaatttgaataaaaatatttcaaattatttgttattatttaaatttgaatatttgagtatgtaattatttttcaataaataatatctctatttttaaaattttgaaaccgacatttttttattgtatatagtgctttattttaatagaattgttggtttaagagctttttttttttttgttaaaattaacggtttaaaataatatcgctaaattagatcaattaattaattatcgtttgttttcgattttttttttaaatatttaaatttaaatttaaaagtattaacaaaattaaataattattttttacatataaatcttaatttaaagtttaattagatattaatttaattaattaattatactttataataatttaattaattatataacttaaaacttttaacttatttagttatattattgtttaataaaattagttagatatactttttttatgaataaatttaaaactagattaaattttatatatttaagaaatataattaaattgtattagatttaattgtttactattattttgattaataattatgtaatagtaactctcgtacacctctaaacaatacgcattgcatgttactataatagctagtattgtatatatatataaataatttgaaactaaaaaaaaaaaaaaaaattataaaaactcattcattcaaattgtttatcctaaaaaaatttattctctctcatttgtgtcttaattattacatttctaactctaaaaagtattatcctttcaatacagatactttcaatacctgtagaaaattggagttgagatctttgagatttttcaacaatatctgtgttgtgacttgtgaagaaatagatgaagtttggtgcacacactactctggatttacaactcaagtaacgttgatagaaatttttaactctctgcgaatatttaaaaaatgcttggatagttttgcttagtttaacttgtttattcaactcgataaattttttttttctgtgcttgaattgctagggactagcaataaacttgcagggggctatgattaatggtaaaaatacatatttctaaaaattcatatttcaaataaattaagtttaaattaatatttccataaaatttagagaaacttacaaaaataatataagatagggaaaagttcataaaaataatgtgacacggagttttttttacatttattctgtaccaactttataaaaatactgtgtttaaagtttcaaaattacaaaaaatattgtgttttagttaaaaaaaaataaaaaactcgaaaataactaaaaaacaaccttaaaacaacttaacaaacaacatgaacaaagtataaaaataacaaaattataactacaaagtaacaaaataataacaaaacattgacttaattgcaaaaaagcaaaataatatcaactccttaatatatttttgtatatgataattttgtttacttaattttgacaattttatttatctttttgtactattgcattttttaatgttatttgttgttacaactttattatttcaatttttttgtttctcttttcctttttgaaaaataattaaaaaaacaacataaaaataataaataaatacagatatataaaataaaaatattatctgaaataaactgaaagtatacacgataaaaaatacacataaattaaacaacaactgtacaaaaaaaaacatataaaaataacagaaaaataaccataaaattactatagaacacataaataacaacataaaaataactataaaaataaaaaaaagacaactataaattaatagaaaaataatcatatcaatcttgttaaatatgcaaatcattcataaattaactctgaataaacttcaagatattaaaaatatatatactacttttattaatcatataaaaagtagaaaaatataaaagtgttgttcattttttgtaaaagaaaaaaagaatgagtattaaaaaagtaatatatgtataaaaatttacactttttatatatttatatatatacaaagattaaaattagtttgagaaaaaaacataaaaaaaagaaagagatgattggaaaaaaaaaataataaaagagagatatgagaaagaaaagcaaaaaaaaaaagtgaataattgcctaaaaaagtcactaaagaagagaaaaaaaaatgttgttttacctataataagtaaaaaatagtataaaaaagtataaatataaaaaacttcttgtcaaagtataaatgtaatgtttgaaaaaaaaaaagttaatatttagtgtaaatttctgtatgcgatatatttttattgagaaaatattttacttagatttaatttatttttattttctaaaaattaaagtattgttcaaaaaagaagaaaaagaagataatgagaaaacaagtagcataattgaaagaaatgaaaaagaaaacaaaaaagaaaaaaggagcaaagaagcccaaaaagagaagcccattagcccattccatctgccacatcagtcgggtccccctgctccatgagtagcaaagggcgccctttcattcgtttcggccgtccagctcagcgccatcgtggcgccttctcctgctctagcacgtgcctttaattggtatagcttgtccctctcgtttcttttcagcccacgtgggcctcctactgctgctactccagtctccacgccagccccatacccttcatcatatatagtgacaatagtaatagcaacaagagcattttaatagtacttttcttttaagcttccaaaatttgattttctatacttagaaaatcaaaaaaaaatttccctaaaccaaaaatttaaaacctaaaaaaactattcc

SEQ ID NO: 114278 - DNA, 2096 bp, Cannabis sativa
  modified_base (1989)..(1993): a, c, t, g, unknown or other
tgcaacataaaatgcagtttctgatctttattaattagtaaatctgattataatgaaaagggttttatttagggcacaaaacccaacagatcttccatccaaagtcaggattttttatggaaagctatctctgattgcctcccgattgctgctgccttacataaacatcatatagcagatagtccaagatgtacactctgcaatatcagtagtgctgaaacaatttttcatgctcttttcttttgtaaaagagcgaaaaatgtctagagagattcttccttttctatggaaaaattgcttgctgaaaattttaaccttaaggacttttttttcaaagttttagaaaaatggtcacacttagaattggaacaatttacatgcatactttggagtatatggactgaacgtaacatagagaagcatgacatgaagccgaggccacatgaaattctactgtcatctgcacttgcatacttaggagaataccatgctgctcatcatcctccttccagccccactaggcacgagccttccaacaacactgctcctatagtgacgcctcaatagctaaaacctccatctagaaaattgaaattgaacacggatgtcgctgttgacactatgaatcacatatcgggctttggaaaaattttgcacgactctcatggtaatgtagttgcagcaatgtgaagaccatatcctggttgtttcaagcctaaagttatcaaagcactggcacttatgtttagttttcaatggctaaaagacatgaatatacccattcactacattgagacagactctcttctcctagtcgtcaaaggtttgcattctaacaagtttagtgtttctaattttcatagtattctacatgatatttctattctcttgtccaacttccctggagttcagatctcccatgtgtttcgatctgctaatacttttgctcatattttagcaaagtatgctctttcggtggacaaagaatgtatttggatggaagaattttcacctcctctaatgactattgtattataattttcattctaatataatagaattttatctcaaaaaaaaaaatacaagctattttttaggtgaacaaaaatatcattgtaggagccataaaaataactgcaaagtacctattgtagcaaaagatatctaagagagagagagagagaaatggtagaaacataattgagagaaggaagcaaaagcttaaacttcaattctgatgctaaccttttacttataaactagttcacaatataattatagaatctagaatgaaaaactacagttcaatgacaactataactagctagctaatctcttaactaattagctaactaactaattgtcaactaattaatttattagttaacatccctatcaaaagaaaatggggttgaaatcgttttcagtttggactttagatagagaaacctatctgtggatagagccttcataaggacatttgctacttgatcaatggcaggaacatattgaactgacaactcctttgctaagatttgatcactgacaaagtttaggttaatatcaatgtatttagatctagcatggaacacaagaaaactacaagagtagttgcactttggttatcaacccaaagaattggtagatgttgaagtgagaaatgaatcttacaaagaataaaaactaactaattttactctacaacaacattagaaagagccctaaattcaattccagtgcttgaactagcaaacaccttttgttttttggctgaccaagagataagattatcttcaagctaattaacttagcaaccagttgagcttctatcttcaatacaagatgtctatcagaattagagtaccattggagagaaattgttgttgtaaaagaaagatgcagaccgtcaaaaatagtgcctttgaggtatttcaacaatttgttatacacttcccactgagtagtggtgggtgttgggttttatgcccnnnnnaaaactctatttcaatgtaatctctatcatttaaatatcaataaagagacagaattattttcatcacttatttaatgtgtcatttagttcatgttatcattta

SEQ ID NO: 114279 - DNA, 1736 bp, Cannabis sativa
tttgtaattttttttttgttgtttttatgtttttgtgaaataatccctttttatttttttgcttaaaaggaataattgaattagaaataggttttgggaattgacatagaaatgatcaatgaggaattgttagtcatttaaaaaattgggttcattaaaaaaattgaaggacattaaaaaaatatatattaggcctatttttggggcccaatagcccattttgcagcctataagggccgcccgtgggaatggggctccatgaagttagccaacatataattttgtttcttaatttctctttggaagagtagtatcgtatcttatttatttttttttattgagattaatagcggagatttttcttgcagtacccttatgggtaatcgattaactggctcaattcctagagagctagcaaacatcaccactctccagtgtttgttagtttttttctatatcacgtaccctttttataattatatgtgaagcttattctttttaattaaagaattattacaatagactgtatttaaatgtgttcctcttgtagagttgttgagtttaaaaatactttaaagctctctctttataatctggctagaaattcttttacttgcttgatttttgtaaacttttaagaaatagttacttataatttttgtgcgatttttactaaacatatacagtagctagtgatgaaatggactttattatatatctcatcaatatatatttatgattaacaatgttatatatatatatatatatatataaattctttgtgtgttgtctattatacgcaacttacttctaactatttcattggacaaatacttgaaacatttgcgaggctgacaacgttgaaagatttgtaagattttattaatagagctatttctttggcaattataatctccataaaatcagatattgttcctaacttgatagttagaaatactagtattaattgacatactttttgctatttccatcattttgcagtcggattgcagacaatcaattttcttgaatatactgaaagaattagacaaatgtcacaaaattgtgagatgattatttatagacttttttagggtatatgtagggccggccctaggcataggcggcctaagcccgtgcatagggcccacactttttgggggcccaaaataaaaaaataaaaaattttattaggcttttatttaagtaaattttatgtatattgtaaacaataaatattcatagtttagttgattgaggtggatgacatattattcacggttatgagttcaaatcccataacactcttcttttgatatttttttatatattttttagggccccaatatttaagaggaaattagactctatactctttttatattgttctcttttatttttaacctcttttttaaagtctatcatttttagctctttttttaaacattgtactaatttttccctgtcactttaagatcctctccatgagactccttatgtcacaacccgagccctaggccatggcagatatgtaatatccataacttaggtggtcaaaggtcacactttgacccttgtaggaagataaagcttataatgatcattttatttatattacaaaataccaatttaaaaataattaatggattaactcctatattaataagaaaatattagtaacaaaatcaggaccactcattaatatagaagaataataatatccccacagttatgta

SEQ ID NO: 114280 - DNA, 3034 bp, Cannabis sativa
aaaggaatttgaattgttgacttcagctgcttaaactacatcagaaggtcaaacaaataatttaagagatattagagattgataccccatgcaaaatagatctttataccagaaaacaaaacacacaacggctctccctcccctcctttcaactctatacaaacctccttttatgttaacttgaaattataaaccagccttgatgtttgactttaatgcttttctttctgtaaggcaggttttgtcttttattgaagaaggcatgaattccgggatgtaaaatcattcctcattttctagtagtatatgcacatggacgggaatgaaaactgtattattactttatataaatatattgtaaatgcagcctaaagatgcttctcattgcagaggtagacttgcttagcatgttgcactctccatacttagtggagttgcttggctattgtgctgaccaacatcataggctccttatatttggatatatgcccagtggaactctccaccactatcttcacaatgaacatcagccgttggattggggaactcgattgatgatagcccttgattgtgccatggcccttgagactcttcatgagcatgctatcccaccaatcatccatcgtgatttcaattgtagcaatgttctcatggatactaatttcagggcaaaagtatcagattttggattggccaaaatggggtcggacaagatcaacggtcagatttcaacgcgtgtgttggggaccacaggatacctggcaccagagtgagagcctactgtctttctcattagtatcattataatataaagaatgcaatgttctaaaactaaaaccatgcacatgggttggcataggtcgctctcctccaattttttatcactttacgcttctttaattgcttgtaaggaaggaccagtaaatgcaagaagaaaaacctgacctgaaccattgataaatgtagaagaaaaaaaataaagataaaaacaaaatagtttaatgtctagttagaaaccatagctacatgcccttttgagtaaatttccacctttttttattaaaataaaaaaagctacatggatatatttaaacacattgcatggttaaattcttattaagttgattttgataaatgtaggtatgcttcaacaggaaagctcacaacaaaatctgatgtgtacagctatggagttgttcttttagagcttctaacaggccgtgttccagttgataccaagcgaccccctggagaacatgtccttgtttcatgggttagcttacagaacttgtcgtttttcttctgaataatggcatagattttacaaaagatacgaagtacatgtccgataataataataaataattaaaagcgaataatctattttcaattcaatatattgcaatgtctgtttagttatttgttctaactcgtacggattctagttgtagcattaatagccttggtctgtggtgcttgttttcctctttttcccactcaccgatttgtgtaagatttttgtttaattttttttatatttacttcttacatgttcattgaatggttcttgttttcaggctcttccggggttaaccagcagagaaaaactactggagatggttgacccagctttaaaaggccactactcaaagaaggatctaattcaggtaagtctactcccactaaccagacttttttttttctctctttcctttgaaatggtcccattattcaaagttagaacaactattttctgctcaactaactttatttttatctcacttcattgattttatagatagctgctattgcagccatgtgtgtacagccagaagcacattacagacctctaatgactgatgttgtacagtcactaattccacttgctaagaactcctctgttgcttcccccggctcctctacatttcagagccaaagacctagtccaagtcccacgtatttgacaactcaaatgaaaaccggataatcaatactcagattaaagctgtacagtgcaggattttttcagcatggcacgagctcgggtgacatgagaaaatatgggcttgggcctggcacaacacggaaaaatatatgtttaggcgcaacatgaaaaacatgtgtttaagtaccaaataacacgacaagtttgaagacaacacgaaagcaccaacatattagcacgaaataaacatacaaattaagtccatgaatataattttttatgttgtaattcatatatatactcatgaaaaaattaaattacaacatgtctttcataaaatacaatcagtatgagtttagatttaaaaaagactaaaatacaggaaataactagctaatatcccaataaataatataacaacggtaactgagtttaattagttttacatgtgtattttaccctccccttaaattggtgtgtagatatcaaacacatccaatttgtgtataagaaatttaaatgttgtccagataaacttttggtgaaaatatctgcaatatgattttgacctcacaattgcaatacagatgactccatttccaagttttcttttatgaacactagtacaaaaaatctttttcatatctcttttatatatccaacaaaacttgcacagaacataaaaagattttgggattttttcatgttgagcattgttggacttacctggatgcctaaccgctagggcccatcctaatacagtccttctagatgtatctttctcattccccgctatcgcttggctagcttgcttcaaaagctgcatgtaagaaaccaaagaggactgctaccgtaactgcttgactaagtactcctcggcagaactcttcctttccactcctgacatccgctctgaaacaagcttggtgtagggcacaccgcaatcaacggatgtgagtgaatgcattggccgattctcatgccaaatgtctaagacggagggagaaaaaaattttagcatgaaaaataagtagaggcattatatataaactaggttgatgttacgtgcaatgcacgtataattaattt

SEQ ID NO: 114281 - DNA, 1045 bp, Cannabis sativa
  modified_base (27)..(31): a, c, t, g, unknown or other
ttctgcgctattttaattagtaatccnnnnnaggggattagggtttcataagcattttgggtagcgtgcctaattatttagggtgttacaaccgtaacctccaaaaaatccctagaatctgtcataaagaacattgtatgttgttatggtcttccactcaaaatcgtgtctgataatggaaacaatttgatagtagtcaattcactgatttttgtgtctagcatggaattgttaaaagtttttcaactgtggctaaaccacaaacaaataggcaagtgaaagttgtaaacaaaatttaaaaacaacgttgaagaagaagctttacgcatgcaaaactcactggccggaagaacttccaagagttttttgggcatatcgaatgacggaaagaacttcaacaggacacattccatattaaatggcctatggatgtgaagtagtaatcccagtagaaaccacagtaccttctcataggagagagacttatgaccttacctgaaatcatgcattgctttaagaatctttagatctgattgaagagcttcgagaacagtcacaagtccagctccaaatataccaaggaaaaaattgccaggcatcttaattctaaagctaaaagtcaaaagtttgaagttggtgatttgattttgagaagagcatttcgagtctctcaggagctaggagtgggggtccttggtcctaactaggaagggccatatgagatacaacataagctatgtgatggaacatatcgacttaaaagactgaatgggtcaaaaattctaagagcatggaatgttgaccatctgcgctgatattatcagtaaactagaggtggccgaatccttttattttcctgcattttatttttttgccttatttccatgtatgcccgagggcatgaattaattaaattaaaacaaatgaagttttcaattatatttttagtattttgtatttctttaattatattataacaagtgatcaagagtccaaactcttaatcacttgggggtaactgttggaagttattttaccaggaact

SEQ ID NO: 114282 - DNA, 1006 bp, Cannabis sativa
  modified_base (27)..(34): a, c, t, g, unknown or other
aattttaaaaaaatattaagagtaatnnnnnnnnattatttaagtttatttttttttaataatggggtgtatttataattttatggggtgcaaatataattcccctatgaatatatattatataataccgattatgcccttcgattattaattacaattatattcagattatatatataatgagattatccactaactatatatagtaatgtcaactttaatttccttaattttatgattcaaaaatagataagaatgtttttctttacaagataaaaatgtatctagctatataataatatgtaggtacatacaaagtaatattattattattattcattaatcaaatttaatgattgtaataattatatgagaaatgcaatattaattagttcgatccttacattttaaccaaatactttatttgatttatacacctgattttgctcaagtttttaatttcttacaattattatagtttatttgttaatttttcaaacttaaagtaattaataataaaattaaagaaatttaattaagaagtgcaatatgaaattttaaaaaataatattaattgttgtgaaatttatataatatgcttacaagtgtacaaatcgataagtaatcaaaattaattaaaataattaaatacatgaatattaaaacttaattttatctaaacaattgatttcaaatgtattcaggaatttaaaataaattaacaaagatgaaaaataacaaaattaagttgagaataatcagataaaaactattatcaagatttcgatttcactctaatcactactagaaaaataatgaaattaagttgagtccttgattgaatcttaaaacatgaacatgctcaaattaatgatgttttgctttgaatttaagagaaaattttcaggggttaagttgaaaaataccatttttattaattaattaatcaaatttacctctaattttatatttaattgaaacatatctctttttatatgtattgtac

SEQ ID NO: 114283 - DNA, 2134 bp, Cannabis sativa
tcataacagaaaaatgggaccacagaattcccacgaggcagatattctccaggaggcaggggagtctgctgctgaggtgcagagtaaagaatgcaccctcatgactcatttctttacatttttcacaaaaaaaaaccaattaatgtattattattaagttagttctttctgtgtagagagtcagaagatcaaattatgagtttcacatatgattgagataagcagcaaacatatataattattcttattacatttacttatttacttatctatttgcggtcggaataatgtggatcaccagatccccaaaatatttatgaaggtatatatatacacctaaagtttaaagtcaaagaaataaatgagtacgtacagcatatatattttgggcaaaaaggtgtgtgtattaattaggatcatctggcgcaagctggccatgtgattatgactaataatctgcactaattagttggatgtatattcttgaagacaaatatgcaatcaccctctcatcgaaaattcatgagtacccttctcatgatgatttaactctatttgaacaatgctcgcatcatctaattttgtgcttataatttgatgaaaaaattcaagtacactacatcaatgaactaaaggagtaattagttctaaagtggtgaccctcattgaagtaaatatatatataggaaagattgggacacactcatatataattaatctctctaccatacactcataattagtcccacttagctaatatttattacacattagtgtatataaatgtgtacaatttgagtatgtatttcgcattattttatataaaacttttatctaagaatacattgggaccaagaaaataatattctaattgagaggttataactaaatagagttacacttgaaaaaaaaaatcaaaatatcaaaaaatatcaatgtaacaaaattaacagtaaacaattcttaatactatattatattagaattattttcgagtacatataatatttatacatgtactataatttgaaaaaaaattattaattctacataaataaatttataaaatatatgtatatatttttttaagattatattttattaatactggacttaagaaatgtataactaattacaatatagaggttattcttatttataactggcccaaattgggactttatttttttataacaaattaaaggttatttttttatagagtattcttaaataaaggttctactgtatatatacatatcctctaattaaccagaccagccacctcattattggttatggttatatatatgtacttgaacttaatttatatatcatggggctgttgaaaaaaagaacttaattttattatgaatgcaaacaattattggtatatcctaacttcatcgcacaaaaatttggaaaggaagaaataaaaaaatgttaaaacaagaagaggagtgtttataatttgcatcgtgaattttcaatttgcttgatttagtttcgggtggtgggttcttttggattaattaatattaatttccatgaatttaatagctaatgtgtcatataatcttgctcagtggcttttaactctctcgttttttggtttcctccttgacagggaggtggatttgtttccagggtaatttttttttctaaactttttttataaagtttctgttttcaggaaaaaaaaaaagaaaaaaaattgcatcgtgagaactctcgattcaaaaaacaaaaagaaaaaaaagcattgcccgaaacgtaaataaactaattataattcttactgcggttattttattgtttcaaattttcaatatatgcattttaccatttacacactcttaaattttctaaaagcgttttcatttggaaacctagataccccgatctttcataatattgcatgatttatttgacatttgacctaggtaattatagctcgcaagtagttacacattttcctttttttcttgtctaaaaaaatatatttatgaaagctgactagttcctgcttcacttcacacatatacatgttatattttgatataatattttgattgattaaataaatgttacaagtgtgtcacacattttaatctagtggggggttgttatattattt

SEQ ID NO: 114284 - DNA, 3473 bp, Cannabis sativa
  modified_base (3275)..(3276): a, c, t, g, unknown or other
caatatcggtgtatcccttttaaggggatgtattatagaatttccctataacttatttggtaccctacattttattaatatacaaatttaatactttatatttataataattgtatacccttttcttctccatatcttatcttcaccacacttaaaaatatatatatttatatataaaaatattaatcggtgttccttcagaatatgattttgtctcgtgatgtacttttatagatgtattccatgatgtacggcagtcgttagatgagggagttatttgatctgagggctgtggttgatttaaggataattagggttaaaaaatagtaacgtattttgagacttatctaatgtaccctgaaacccatctaatgtaccacagaatacattccgtgaaagtacgtcacgggacaaaatcgtgtccctatttatatatatgctcaataattttagacaaattttgattgacaccactttttaacttttttacttcttatattggaaaatgacaatttttaaattaatttagtaataggctataattagtattgtgaatacatattttttttgtacattataaatatggattgttttgtgttatgttataaaaaaaaattaaatcgtgtacaatatttttaagggattatttaaaaaaataaaaataaaaattataaaaatacagttttatagaattttaaatatttttatgatttttaaaattttatttacataaaatacggtcttttgatatatttttatgttgtatttttgttattttgttgttgatttttattatttgtatattattttttatgttacattaatgttatttaattgttgtttttctattacttccatgatttttttttattattttttgtgtttttataaaataccgtaaaaatacctctaaatgtaaaaatataaaaatcttaccaaaaatcgtattttatgtaattgtccttatttttaaagagtaggctctgcattgctcataggactcgtactttcatgtcgtgccttactaggacagtttacttttttttaaaaataaatcaacctatttttctacatttttttacagttaatgagataaattactaaacatatgtatttttaattcaattattttttatataatatttcaacaatattttacatataatcatgtaaataaataattataattataagaatttaaatatttattaataaatttttaaatttttaaatttttaaattaccccaacatataaattaatatataattttacttttatattttatattttctagtaattttaattacataattataatattttgtgttatatttgataaaatcatttaaatatttttgattgataaatacatatttattattactattattactaataaattgcaagatttttttaatgtatcatttttgaattagtttgtttgtacttatgtgtcgtacattttagacttatcatgtcatattttttgtattatattgtgtcgaaccttatatttttcgtgactagtcatgctcataccaattttgtaccgtgtcaaaaaaaaaacaactcatatttacagcactagtgaatgataaacgatcatccttgtttgggtggtttgagttacaagttggcaaactcaaagtcacgagtttgagattattttaaaaatacatttgtatataggtattttatttcaaaaaattgagtttatatggtaatgttattatttctgtatctttcattgtaaagaagttccatactattttcatacttggtaagatgtgtaagttaagaattaaaaataggtttggagatttttaacatgttaaatacttcatttgtaacataacttgatttttgtaaaaaatgaaaaatcagcattatattaacaccaaaattttattaaggcaatttattgaatttgttccttacttcaaaaaaatatatacatatataatggcaaaatatttcatcatttttataatatataaaatatatatttaaatttataattttttttttctttcttttatctgacattctaaaataattctattttttttaaatgaaatcttatattacaattgcctctgtctcttcatctcgtctctgttgttagtataataggggcaaaaccaataatatttttttcttttagaattgaaataatattgaaaaagacaatgcaaattaatgaccttttgttaaaactatagctttattaatttcgtataaattatttagagagtgaaagtacaatattttaacattttgagtatatttaccaaaatatccctaaaaaaaagtatatttaccaaaataaataaatactatttaaatattatgtttaatgtttctctcataaaacattttgagaaatttcgatttgtaagtttaaatgtaaagtatggatgaaaaataaacgagaaaattgaaaaaatacgtataaaatatcttaatattttatgcctaaactaatactttttaacattgaaaacatatacttccctcaaactctctctgcctcttccccttcacccgaacccacatcgcacaaccccccacacaacccactctgattgaccacttcgaccgagacccacacccaccattccgaccctcatcaccgcgtcacggaggagacccgaacggtgcccaacaatgtccaaggttcatatttgcaatttgggtaaatcgcaatttggggaagacaatggcccgatggggtccgatgtatgtgcgaaaaaatatagtttttgggtttgacaggtccgatgggggtccgatgcatgcgctgtaaatgggagtctgacgggtccgatggggaccccgattggggtctgatgggtatgaagaaagagagaagaagagaggggacgggtccgatggcgaccccaattgggtccgacaggtccgatggggaccccgatgggtatgaagaaagagagaagaagagaggggatagggataatgtaaatggggatattttagggatattgtaaaatgtgtcgtatcccacaaatattacatgttatgtgtttaggaaaaaaatattaagtatttgtaagcataaaaagtcaaatttccctattggtttgtgaagggataagttgaaaaatacatcttttttgtttttattaattaaaaataccctcatattatatttttttaaaactatacccacttttttgagtgggttgcccaatataccctcactctctacttaagtctagtacataatttgcattaacctaaggggtttaatgnngatatcatctttaaaagtgggtatatcttaatgaatatgaaaatggaggtaaaaatgaaaacaaataaaataaattaggtataccatgtaatttcctcgtttgtgaaaggaggaaattagactctataccatttttatattgtcctattttatttttaccctctttttttaaatcttatcatttttacctctttttt

SEQ ID NO: 114285 - DNA, 7623 bp, Cannabis sativa
gtgttaccaaacggcaccttaatcggtaacttttagaaaatacagtatccaaaatagtattaacccaaataaatatccaaaattgtagttgatcttcagtcactattattggtctctatatcttggaacaccattacactaatatacaagcttgaatttccaaaattacaggaagatgaagatggaactgtatacatatatagttatggtagtaacaacacaaagatattcagaacccgaataggtgagttctatggcctctatattcacataacaaaacttcccatacttgagaaataatgcaaaaccaaccaaccaaccaaccaaccaaccaaccaaccaacacctaataggccctgaataaacaactttcaacaaaaacttaaaaaaacaggatctttaaaaggaaaattttgaagcttttggacgcaatcgtcgaccttttgaccttgcttcaagaagttttgcctttaaagtgttgtcctttaatcccacaggcattttcgaggaagattctgggatgtcaagctcaggggatgtgagttttgacatccattgtcgtactggactagcttgattcctccatcctaagttactgcaagaagcctcgccgttgttgttgttgttgttattattctcgagatgtagatttcctccatctgacatcaaatattgatttcttataagattatcgacagtttggttcgaattaagcagctgtatttcgtcgtgtttctttgttttctcgttgcttgcctcttcagtcagttcgtgatgttcaggcatttgggatatactgatttcattcggtttctcttcttcatttactaaatgggatatcttgtttccatcacacgacacagccttcgccattttttcttcgaacttaacttgcaagctcgatggagtacgtcccttaatcctttcactggactcgatttttttcttcatgttttcagcttcattcccattcgatttgaaagctgtgttgctcggtttttgaagctcaaaacattgagaaccactgcctaacgaatcatcatcatcgtcgtcatcatccacatcttgaggtgcactcacagcttcattcaaatgaacagactcgagtgaattcctacgctctctagacaacaatttttcagctttcgtagtttgcatatgtttagcttgaagaaaggtttctatctcaaaccttaatttgtccactattgaactcttgtcagaaacaccacaccgagattcttctacctgcatctgcatccgttcatcaagccatgattcagatacatgaagaatcaatcgatcatgatcggtccttccattccaatcaccatcagctttttgtttcaaacctcgtacttcttgttcgtattctgttatgcccttagcaaactcatcacacaaatcttccaacattttcctcgactttttctctctttcccgctctttcagagcaccagagagtgtagattttacctcagaaagctccctagctaactttctgtgtagactctcagatcgctttcttagcttcctctcgtcttctaactcatctctcacagactgaattgcagcatgaatacgatcctgttctttacttttccttacaagtttatcttcggtgatttgcttcaccaaatcatctacttcatgtcgatctgcttgtcgttccctaagcagctcttttatcttcaaacgggcatgatccagctctgttttcaatgcctttattaatgacatattcgaggcatgctgttcttccaaactccatatcctattcaatacttttaacagttcggtcgatgttttaagattataatgtgattcaccaattcttcccttgaaatcgaaagaacttgtaggagtaattgcaggattataaggtgctacctgaaacagaaaagcatgtaaagcaatggtgaacagaattatatgatcaattacataaattgactcaattagaaaggagcataggtcaaaaaatgagaataataataacaattcttacctccaaagaactaccataacttgctggagatacaggttgcaaggcgtgatgattgttcctttcgattgttcgatgatgttgcatcaatgatgccgcgacatgcctcctcaaactgcttgcactagctggctggcatggtatttaatcaaagggaaaaatcagaggtcaaggagataatctccaactgggaaactttaagaaattaccattatttacacaaagccaatgctgaaacacatttgtgttaaacatgttgttagaactttagagttaccaagttaacaaaaagtgacaccaatgacaggagattaggcttcaaacttttagcatggcattaaattgttttgttttgttttgtatagttttctgaaaacaatggctcttgaatgataccagtctacatttatacctgaacattaatttagacaaaaggtttaaagagttgggtaatgataaaataataaaacacagccaacaataatataattaggaccaaacacagtctcactagcaaggaatttcaaaaagtactaagctttaaagctcttgaaatcaaaattctttacaagtaaggaattaaagcattcatttcattaaattgtccaacctaagatgaaaccaaaccaaacccttcaaaacccaacttcccaaatcaatcaaaattcacaaaaaaattgataaaaatggaaaccccacataagaaaaaagagtcactttttaacatataacagataccaacctgttcaggagagcttggagaattatcacccagaaaattagaaatgtcaagagcagccttttcacctctatgaaggtgatgatgagggtgtaggttgtgcctcagcctaggaggaccaccaccaccaccaccattactgtgcacaccccggttcattttagcaagaggcaagtaatggtgaagctcccaaagagcagctccaagctttctaacagagacagaagaagcaaaagtagtagaaattggaggttgagaagtaataaaagaagagtctttaatgatggtttggtggccagaaagtgaaaaaagtctccatgaggacactactggagtagtaatacagggaccctctcttttccctaccaaaataacttctttccttaacttttctcccaaattttcctccttttctgctaccccttccccacttcctcctccacctcctcttacccttttcatttctctctcttaaagactcaaactttctctctcctacctacctacactcacctcctctccccctagtacagtgattattccctactttctctctcatcaattttgtattttttttttgttgggtttaattttttttccccctttttggaagggtttttgttgggttaaagaaatttctctgttttttgttttttggagtaatgatcatatcatggatcaccatgggagaactcacaaagttgagttagggttattatcacctgctttgcaactactttagtccctggattaaatttcttgacttttttttaacacatagtgcaattatttttttagtttatttatttattttttttttgttatagttataaattatttgtaaatttttaaaaaattatcgaaaataaaatttaaatattttattgtatttatgattatattttttaatacaagtagtatgtaaatgttcaaattttattttaaacctatgaactatttaaattttttaaaaaagttacaagtaattttaaatagttataaaataaatgattattaaaagaaaatattgaattaaaaaacttttttaaatgtcaaaataaataaagagtttatcataataacactttaaagaagtgtactacataaattgtttttatgaaaatgagaatattattaattggaaaattgtctaaagtttttgtactatgaaattaaataatatttataaattatagattaaaattatgtttacaaaattaggaaaagagaaatcattctctctttatttatttattttatttttcttaaaaaaaactattaattattttagttaatttagatatgggaaataatgaaaatatggtgaggcccgagatttgttgttgcagtcaagaataatggagacacatatttaactaattaatttattttaataaaattttgtttcctcttttggtattgtttgttattttttaggttgttttaaacaaaggaaataaataaataaataaaaaatgcactttcggctagtgaacatgaatgagcacaatgaatggttttgttatttgtttacacttggacagctgtcacatatatacaaaggacaaagttaagagtgaccaaatcaatgagatttagcattgaaaaaaaaaatacactatgtttgattaagatgaataaaaataaaataatttttatttatttatttatttagttttattttaaaattttaaaatgttatttttattctagttatgtttttatttattctaaccaaacgtcatatgatggtgtttatgttatgtgaatttcagttaaagacatgaaaattagagagagtaaatttagagagaatatgaatctcatgtatttaatggaattaatattaccactattttaatttaaaaagtgaatcttatttggaaacaaaaactccttgttattcaaattcaatttaaatttacattctcattagtcattcctttcaagtctaaatctcatactacatgcttcattagagaaaaaaaggaaacacactaagataagtgggcacaagagcatctttaactatgttttctaaacactctttaattaaaataaagaaaattataaatttaattggtttttatattattttgtacaaaaaaaaatagtttattttttcaaaaaaaatattttatggaaaaattgaaaaaaaaaaattaaaaaatatatataaaaagaagtaggtaagtctaaccacatacttttatggtaaccaatgggtaactaattacgggttaaccaaatatcttatgttgttttttttatatattttttttttaactttttttctaaattttttccataaataatttttttttaggaaaagtcgtaatattgcaaacttatactttaaaaatcataaaaataaaaaaatttcattacaataagaagtaataagttttaaaataatgagtttcaaccatacaaaaaaatgactatctataatagagaatgaataaaaaaaatatttgctaattttttcatattattttaattaaaattaatattattttattaaattaattcatatttaataaatttaaattataaaatattattaaaataaataaatatcacctaaaataaagagataattggagccaaaaactaaaaaaataaaaaagactccctataaaataagattaacttagagattctctaacctaactttttgagtttattttctaaatatgtgtagttaattaaatataattttgttgatgatattttccaaaattatgacttggttattgtacatttctatgttatccaatcaacatatttctattattactagatagcaaaagtttataattagaaattatattacacgtattttcttattgagaaatataaatatttgttatacacactgaattaattattttcctataggccataatataattaatctaacaaaacaccatcatgattaattaagcccccctagatagaagtataacaagagatatgaaaagaaattaaaccaataattttattataaaattataaaatattaaaaagaaaaatgggtaatataggctttgacttttttttattatatttttattaaaatattttttttttttatttgtaatgaagtgtaattgtaatggggattacattggttttagtatgtaagcatcattacaatactcaatgtaaataagtattacatgcattgtaatggattaccaaagttaaaaaggataaaaagcaaacaatgtaatagacctattcattaccattacgattactattacaatgaaccaaacatcaccttaataataacacttgtttatatagtaaaatattagtggtagaacatagtaatacgatggagtctgtcacacaaaagtgagtgagagacacgagtacacaaataagagtaatttgcagcataaagacttaagtttaacttctagctgtaaataaatacctaaatttaattgttggcagtaataatacctaagttatatttcggtaacttccgtaggtacatgactgttaagtgttgagtaaattatcacgtggcaatgcgtccacgtcattaaatttatataatttttttttaaaaaaaatagtttatataccaataataaaataacgtgtggatgatattcgacatttaacggctatgtacttacagagttccaaaaatataacttatgtattattaccgtcaaaaattaaaattaagtatttatttgcaactgataattaaacttacgtatttgtgtaattgtgtcataaattactcttattattattattaaaaatatacgtttgggtgcttctacaatatattttttcttaaaataaatgtattgatccatcatctacttgttttagtattcagaataattttttatgtcgatttctttttcatattgtctacgtactttataattatttaagatattctataaaattttgaaaaattcggaataattacaatgtagaaatcagtgtccaaacagtttatttcacatgcgtataaaataaaatagtcacgtatgcaacacaatctttgaaccctatttcgacatgttaaatttttctgaatcttattaaattttgcatgatgtcttaaataactataccatatatgatcacgagaaaaaaattgactaaaaaattattccagagaccaaaatagataagaatatatcggtgcatcccttttaattaaggagtgcattgtaaaaatttcctatacatttgataacaataaattaaaattcatgtatacgtgcactctttaaagggatgtttcagtagactctctatctatttcggcattcaagatagtcttttagttttttttttttatgtgattgcatacgttatagctatttaggaccacccataaatttttagaaaattctaagtagtttacaacgccgaaaaataagatttatatattttgttgcacacgcgactattttttttttatatacataactgtttaaactttatttttgacacgataaggtattcaaaattttctacaattttcaaataatcttaaaaaactactatactatcattaaaaaaaaaaaaataaactcaaaattcttcacaatacttaaaaagataacaaatctaccaatactatccatacataaatttccattaatatttttatgatatgatagattgttctctgcaaatatatatatctttgtttccttggcgtgttgtatatgctctgctgcaacctttatcaggcttatatagctatatatatttatcacctataaataaattaataattaataaaaaaatagggaccactgcaaagagtcctacttatatttatattagctaatggattaatggattaatcaatatataaataataatttaaatt

SEQ ID NO: 114286 - DNA, 2507 bp, Cannabis sativa
ttacttacaacgattcttagaggcaacaataaagacgaggatactcagtgaagacgtcaaggtcattacaatgactgctggcctaactattacaagtccattgtggaatgacttgaaactcaaatcagtacacaccattcaagatttttaggcaaagctgatggtttcatcaagctcaaaagagtcatcaagaaggtcagaggagttgctcaaccagaatcaaccaattacactacttatctatttctcgagtctctaatagtcattgaccaggaaattaaagaagaatcaacaacaaatgcttccactgaaacatactcctttcctgtttcccaaagagaacttgagcagggagataatgacgacaagtcctctgtaacttcctaagacagctcgggacagggggcagtgacgaagattctccctttatttccaataatcatcatcaggagcagagaagtagcagtgaagatgtatcctatatatgagtcttctgaagatattaaccaagaaagtaacactggagactcctagtgagagagggagggaccttatattgtcacatctaagatcctgctatgactgccacttgaatctggtgctaataccaaggtaccaaaacatggagcatctaaaatcatcaataaagtaactattacctagacaaataggttggatcccaaaacaaacaggttggatcatgctatgactgccacttgaatcaggtgctaataccaaggtaccagaacatggagcatctaagatcatcaataaaggaactgttccctagacagttcacttcacagtgagatccactttaccttgtgcaagtgaatcgatcgcctctcgaaactaaaagatgcagcgaagtcatctataggtcaagaggtccatcgccaagttatggcccctacattactagcccaatagagcatcagtatagtgggaatcaacttagcttctttgataaaaaatgcaaatttgtgaatgctatttctcttttattcaatatagctacaatgatgatgtaattgaatttaatatctaatgaataaagtgttgagtaaagcttgttagtacttcattattattaatcaattgcaactcacagacctggtgacactctcaagcgctaaaaaaatcttgtagagttggttttgaggtaactttggttatttctttagtgagtaaacactgataacccatgaatctttggatgagtggatgagtgctcacacatgtaacaaatcgctaagacaaatgatcaagaaagcccaacgagatttggtacggcaagtgaccaatgaagatatttcttcgatcactaagggatcaaataagacatagaatatgagagctatgtatgttacatgagcattcacaaaaaatcatggtgcacgagagtcgtgtatgtcacataccttggtatataggagccaggtattaccttggtatacgggagctaagatttataggagcattcaaaaaatttcacacacctgagttagtgtggtttaatgaaattttgatgtgatccttagtaactgatcttcttaatcctgaagtgctagtgcgagtgctgataagtttattaagttgatcaacgacacatacagactatttgcagacaagagtaagcactattgtgatttgatatataaacacttgaggttacataagaatataatgaccaaagtttataaatctaaagttctagtacaagtgctcctccgcagaccacaaaaataaaaaagaaagaacagtattgtcaattatagaaagctctctagaagtaggacacttcatccagtagaaattttcttattgattataaggaaccctctgggagtgggatgttaccccagttgtgatattctttaagttactaaactcttcctaagtatgggactctatacttagcaagagtttagtgtaatctttattttttttttcttttttctctcttagagttttttctttaacaaggttctatcagttggaattatcaagcaaagattcttcaccaacctgtgatttttcccttatacaaaagatttagagggtttttctacactactcttctacaatgattcatctcacttatgagataaagtgaattgatgcttgaacatcaagcgcaaaattcataacccattatacctcgacagtggtgtatcccgctgatagcaaaatgctttgacaaataacatcaatgatggggggaaaaaaatcaagactgaggcaacctctgagccattgtttcaaattccacttgcctatctagttccttacgataacaggcagtctgtttggttcctaacagtggaagacactaattgtatcttcgatcaatgaaagaatgacccactcattagcaaggtttgagtcaccaacatgatgatagaaaatgtgatgattaatgatgaatatgttgggttttatgccctaaataaaactccaattcaatgtaatccattttattcattatcaataaagaaacagaagta

SEQ ID NO: 114287 - DNA, 1468 bp, Cannabis sativa
tatttccttaattagaaatattctaatattgcacctatatatatatcgattattcatacatataatattgatatttatatatatgtaagttatttaactcttttccttaaataatgtatatttcatcatcaggatccgttttacatggagtatacacgtaatatacgagagatgaagaacgtaatgaacagtattattttggctgatgatgattatcgtgaacgctccatagaagctttgaacttggtcaacgctgtgcttagagtcggcattgattatcatgtccaagatgagattaaatctatccttgaaagggaacatataattttcagtgaccatattagtaaccaatattttaataatattaatcaagaccacctgtatgaggtttctcttcgtttccgattactgagacaaggaggttatgatgtctctccaggtatatatattatactatatatatatatatgtgtatgtgtgtgttatataattaaaaaaaaactgataaattaaattaataaattattgctatatataatttgtatgtatacagatgtgtttaacgagttgatgaaggacaaaaagggaaatttcaatgttttagtggaagaagacagagagggactaagagaattgtttgaagcctcacaagtaagaatagaaggagaagaggtactagaggaagctgaagtgttcagtggcgaacacctaaaagaatgggcaaatcttcatcgtcatacgagtgaagctcgaagtattcaattaacgttagaccaaccttgtcataaaagcttggccagggtcacatctccaaactttttggacagtttctcagccaacactgctaccagagaccaaggctggacctggatgacccttttaaacaaactggtcacaatggacttcaaaatagttcagtctattcaccaaagggaaattgttcaagtctccaagtaagtttttgtttgtgtttctatatttcaggtttaattttcaacaataattaataattgatgagttgagtagttacacactacacgtagtgttctatacatactagctaatagattctcttactaattaatgaatgaattaattacactgacaatagatttaattacaatatctatgaataataatattgcattgctcaacaacgtacgtatacagatggtggaaagagcttggtttggcagaggagttgaaatttgctagagaccaacccctaaaatggtacctctggacagtggcaagtctaccagatccaagcttgtctgaagagaggattgaactaactaaacccatttctctcgtctacataatagatgatatttttgatgtttatgggacactagacgaactcactcttttcacagacgcagttaataagtatgaatatattaatatatcaaaaataattttgtttatttttattagggtaaataccattttagaccctctgttttac

SEQ ID NO: 114288 - DNA, 1498 bp, Cannabis sativa
  modified_base (26)..(26): a, c, t, g, unknown or other
  modified_base (514)..(515): a, c, t, g, unknown or other
tatagttaaatttgtttagtaaccantcatgggtaatacccattaagaagtgttccatatatatatatatatgagaattgactttttaaggttgagtggaacaatttagtccagtattatatatatatattcataaacaccgagagagataatttattcctcattagaaatctttaaaatgttaaactaaattgtattaatattctaaaatttatttttttactcacttgattaattttctttttagatattttgatactcgttttgtttttctttttggatccaaagattcgccatattaattattctataccatccaattggaacacacagtcaggtattgtcaaatgtatattgataattttgacaatatgatgtatatatatttatcacttaatctttcttttggttatgtatcagatatcgacttattttttgaaatctagcaaatcaatgtaaaaccataaagattaacaataaattagatagcataacaccataaagatttatattnntctcttcgattatatatcatatattgacttatattctatagtaaagtaactcgaagagaaacataaaaattcatgatgaaattggcaacacaagaatatcggttttttccttttctctttaattatatatcacatcaatttatttttgaagtctagtgaatcaaaagagattagaatgacaattaatcgcaatattggaaataaaagaatcaaaagaggaagacttagatccatggtatgactctttacttacccttgtaaagcttgaaggtagaccttgaatatggagttttttttcagattcttttttactttttactgtttcactcttacctattaatttcttgccaaaaatattcaacccacttaactgttcggatcctaatctatttataatcttttttttattattattttattgttgacaaaatcccacataacgtaaaagtggtcgaacggaagaaaatatctcctttatttgctctttttttttattattttaactaacttattccttttttttttcctattatcattattttaataaaagaatgtttcctttaaatttttactgatttctaaagggaatatttatataataaaataataataatgataataataatagcaatacttattattattatatttttagttcagtaggcgtaataatggtcaggggctctacttctacccgctcagtgaataaatcaactgtcaccatcgtctattggattccacattttccctaagacagtgagcctatgagatcgatttccaagaccacaaaaggccatggagttttcatattcttgagctcatttggggcattcatggtatttgagagaatatttagaacttgtcacatctcttagtgctaagagatagggtgaaataagcttttggacaaaggtgtaataccttgttcaagtcatggtgatctcgctattctacactcaaggttgtgagtgagtgtatacata

SEQ ID NO: 114289 - DNA, 1713 bp, Cannabis sativa
tccgatctaaattctgcgctattttgattggtaatcccgattaggggaattagggtttcataagcattttgggtagcgtgcctaattgtttagggcgttacaagttcgtcagaaaagaagacccttattcccggtaagagaagaagcagtaaaaatgaaagttgagaagctaacttccattaagtttttgagagaagcattatatcccatgtgtttggccaactgggtcctagtctcaaagcccaaagacacctagaggatgtgtattgacttcacagatcttaacaaggcatgcccaaaagaccgcttccctttttcgcaaattaatcaaatggtggacgcaacatcagggtacaaattggtaagctttatggatgcgtattctgactacaatcagagtaagatgccacaacaacctatcatcggttggtaaacaaaatgttcaaagactaacttgggagaaatgtggaggtatatgtagacgacatgctcgtgaagtccaaaacttttagggaacatactgatgatttggaaaaggctttttctgttatccaaaagtatggcatgaaacttaactcgaagaaatgcacattcagagtctcctttggaaagttcttgggtttcatagtcaggtcttacagaattgaagctagcccaaaaaagatcaaagccttcatcgacataccttctcccaagaagcacaaggacgtgtatagtgtaaccagaaggatcgtagccttcagctgattcatttccaagtctataaataattacatcccatttttcaatgcgctgcgcgaaaacaagaaattcaaatgggttgaggaatgcaaagaagcctaccaaacactaaaggaacatttgaccaaggctccaatcttatcgaagctggtggaaggagaaccattatacctttatttggcagtgtctaatcataccgtgagtgtcattttagtgcgagaagaagaaatggtcaaactgctagtgtattacataagcaaaagactgttgggcgcagagtccaggtatccaataatagagaaactatccttttgcttgttaatcgcttctagaaagttgagacactactttcaagcccttgccatcaaggtattgactaaccatcctctctaccaagtgctccagaaattggattcatccggtagattgctgaaatgggctatggaacttagccaatttgatatccaatatcttccccaactgtcaatcaaggggtatgccttatatgattttttagtattttttagtagagtgttttggaatgaacgacctcctagaagagctaatcctagaactgccattttggaaggtttacgttgacggagcatcaaacgaaaaagaagctggagcaaggattatactaatcactccacaatgactttagctccaaagttccctctgctttaagtttctcacctccaacaatgaagcagaacatgaagctatgatcactaacctttaattggctaaggaactaaaaacctaagttattgaagtgtacatcgactcccaactcatggtaaaccagatatctgcagaatatcaaaccaagggtaagaaaattgcagcctatgtagtatgctcaagggaattattgtaagggtttaaaatctacagtatccgccaaagtcccaagggaccaaaatgttgggttttatgccctaaataaaacccatttcatataatcagatt

SEQ ID NO: 114290 - DNA, 1967 bp, Cannabis sativa
aaaataatattttttagtagctaatatttaatatggaaagtttttagtaattacacaatgtaattacattcaattctcatggggcctatgagaattgaagagtgcaattagaatctctcaattacttccaattacacagttacatagtaattacggacaaacatgtcaaattgtgtaattacctccaattacacacaaatctaattacattgtggctttccaaaaacacccttaaagaattctatttcaaatataatatatatggaaagaaattaaactttttgttttggaaatatggatccaaacagatatttcctcattcaggaactctaaatccaaccacaagttttggtggaaaaacctatttcacaattaaagttacttcacccatttttttttattattattatgtttttttatggcactttctttttctatttcgcaagtgaaagagaaagaagacatgaaaggagactgttttagttccaaacacataaatttaaatctctccaaaaattgaaaaaaataagaagaagaaaaaaaacatataaaatgtcttttttttattccattatattaaaagtgataggcaaacatcctcactcacaaatgacctttctcaaaattttagatggagaactaaaattaattagaaaaatttacaatagaccaaattgtattataagaacttgatttctcattatgaacccaaataatccgatgatacaaaaagaaaacaaagggttattattttaaatgtaatttataaaagaatattttccagtccaaaacaagcagcaaagtatgaaacttcattgtcatgtttgccccatgattagaagtcaaatatagcataaaaagtttttctgaaaatagagcagtaaaactttacttaggttggcttacaaactaaaaaagacacatcaatctttaacacatacacaaacaatatctcttctacaaaacattctcaaagcatggtgagataataccaaaagtatattattttggtgtcttttcaaaagaatcttttttctttcttcctgtttttttgtaatgacaaatcttctttacattccctaatataagagtggttggttggtaggtaggtactgtaacaaatgcacaaaaaaaccacactaaaatcacaggattctgtcctggaaatctgtaataaaagtggtggcgaaagagctaagcttcttcccggtctcaccagccatgtttttaagggatgatatatcctgttgtgcctgtaaagttataagtaccgaaattcaaattcgatcagtaacaagtgacgaacgatgcaatcccaactcaatgatatatacatataattaagcatgaacttccaattgggctttacctggaaagatagacgattgatgagatcgcctgtagttatatcaagtgcagagttatcggagccattaccgaaaagatcagcactagatatggaagacgatccctggaagtagagataaattaatatataagcgataatgctagacacactacggtatcatctttaaaattaattacacataattgtgtgcaaaacaatatgtgcaatttttgtaaacattacaattatcaggctgtaggatgcaaatgaagttgaagtaatgcaattttctgattcaacaaaaaaaaaacaataaatgcaatttttgagtccccaaatcataacaacagttacagaaatccataggaaaggtgttttatatgtataatgtaaaaagagaaatagtattggtaacatcaaagctcaaaataatttatattataggttctatgctctttagaaactatccttagaaatagtgaaacttagagaaaaatagttcactaattgtttttatccaaacaatatctgatagaacatttttttttttttgaaaaggagacagaggccaatgtcttagactggcccctatccaataaataatgaaaaccctcacttg

SEQ ID NO: 114291 - DNA, 1269 bp, Cannabis sativa
ttattaaatttggccattttcttaattttttcaaaaggtggatatttactaacttagttaccaaatttaggaccattttgcatctcaaccctaattttatttggattgacaatgattaaatggagtgggctttgggctcaaaatgattgggtcaatacttgttttttttttctttttttgaaagcttatatagtcttgttttggtttagaacattaaactaaaattcaaagtgagaaagataatggcttctcaaagtgaagagcttatttataagggaaaagaaagagtaggtagagacgataagtgtagaagttgggttcaacttagaactatggatgcacattcttcatgtgagaataggttaggcattaagtcttgatgcctattaagtattaactcaaaaacccaacaatgcctttagccaaataacttatcattgatatcaacataagatatatggatagataatgcaaacttcgtccaattagtttatgactaattttgttttaaaacaaattgcttcttattttcagttttcaccttattttctttaattcttttttcttcaattaagtggaagtgatctttttaatttgtgtaatacattacatgcatgctttatgtgcttataatctttgctctccaataaatagcatttattatgttcattagaatttagctaaaacttatctaccacgacggtgaaaagtgtgaaaaaaagaactcaaaaagcattatacaattacaacttacaaatttacaagtataacaatttgctattttagtcctatttttttttttaaaaaaaaaaaagaaataaagaaagaaaattacattttttatttagcttaatttttaataattataaattttattttatttacaaaaaaaaaaataaaattaaagaaaatattttcctaccatttatatgagatttttcagcatttgtatatttttaaatacttaatttttaatttcaattctcaatttttatttggatatcaaaataaaagttttatgttttttctcagtgaccttaatttttttttttctgttaataacattttatatggtttttattgtttttactattatatacatactagtaaaaagctacgtgcgaagcacgtatactaaattttatgctaagttttttcttctttatttaaaagtacaattaaaaattaaagaaaaaacattattagtttttaggtgagtctaaagaaaaaacattattagtttacaaaagcttgataatttaaatatgt

SEQ ID NO: 114292 - DNA, 5657 bp, Cannabis sativa
  modified_base (3557)..(3560): a, c, t, g, unknown or other
ttaaaatataatattgaaaaataactttttgaaaaatgtttaaataaccgaataaagataaaaatgtaaaaaaatggcaaaaaaagataccaagtgtaaaaatccatacatttttttcacttataatgaaagtattattgaataattaataatacttcttgtgtattatgatattatttttataaaattaaaatattattattattttagcattcaaaatatgttatgtcacttacaatgtaagtattattgaatatactatactctaattttgtgtattattttatcttgttcataagattaaagcatcattattcttttaattttcacaatactatttttcacatgatttacaataatactttttctttctatttataaaaaattattattacaataaaatatatttttattcaaagtaataaagagtgccattacaagtttacaaccatagtagtataaaaaacaaaatatttgtgaaagaaactaataaatattgatacatgtatctaaacttaaatcctcaatctccaagagacctaagctcctagcaacaatcttgaccctttttgcaataatcttgtttcatgctctttggtagaaatcactgcacaaaattattaatttgaatgattagtcactattaattcatttaattagtcactattaattcatatagtaaatgtacaaaaacttactgcacaagttgcaacatgaaattaagaattttcaaaacttacaaccattgagtgttatggtgtgctctcctttaggtggtaggtagcttgttctaccaattgtgaatcacataaattgcagcttcatggagaaagataaagggttacaattacagtaagaaattaattaccatgccaatgaagctctactgaaagagaattttacttcctagcttatccattaaaactgttgcaatgactgatttaaaaaataagtaaaaacgtgaagagacattgaaataattcaacacatgtaaatcttatatctagaagcaaattaaacctttaaaaactattgtctactaaattagatcctgtcatcagaaaattggtaagagataggaccttcaaagataaaattattgaaaacatgaaaataacacaatggtaccagaaacatagaaatgaaacaatatgaaatatccatcaagaatgaaacaattttttttattgaaaatgaatagaagtgaacataacaacccattttgggggttaaagaaattgaggagtcaagtgagtatataacattgttacaaggcatcttatagtgtccaatttcatagtgcattgttcattgattatacttaaagagcacacacaagcttcttttcataatgtgtgataatttacgagtaattagcaatttaattacattgaaatataaagattagaattagtatagtacatataaccaaccaattagtgctcaaatttatttacatgttaaccaaccaattagttgattccatataaaacagagttaaactatttagtaatttagctttggagaatgagaaatttgagattatccattatacagtttgatcaattagtacttattgagcacaatacaacactttgggattggtagcttttaatttaaattcccattttcatttaagttattataatactttttcaatagaactatattgatatcttagttattataatactttttcaatagaattatattgatatcttatgtaaaatcatatttgttgtagtgaatggatgatttttttttcattcctgagtaagaatttatataaaatttacttattataattctaccttatacacacaagagattatataattgacctaaattattattattttattttattttaataaataacgatatttctcaaaatataggagaaaaaattgagaaatttttcatttttatctaatgtgggaatatatttgtaatttgtatcacataattaaaacatgataaggaaaactaataacatatatttttttttgaagcgtatttagttggtagaaaaatatttggtctcttaattttccttcaaaagtattaaaatatcatttcactattttagtagaattgactaatagatggaaagaccattcaaattgcaaagttaatttaagaatgtcgttcacaaattatagtgtcgtttttattctttttctatgaatgtcgttttcattctgaaatatcagaattacagagaatttttttctttgaatgaaaattacagagatcaattagaaaaaaaacaatttgtaatgaacaaatactttaaattatttaccaaaaagaaaatagttattcatatacactccaatatacagttatacaaaaaaaaaaaaaatacaaatatatatatagagagatagatcaataagggagaatagtttcgaaacaatgaacaccatcgatctccggcgcaaacctcggcgatctcttctgatgatcccggcgagttgtcgccgtcgtcgaaacattctccgtcggcgatgtggccgaattctcagaacgacgatcaccgtttttgatactgttttctctcttgttcttcacagcagacgaagaagagaattctttagcggtggatgcatcgcccaatagaacatcgaagtagctgaacatcgacatcatcgtgattgaagggaaaattttctgtttgggaagtgggaaaatgaagggtagttttgtaattttgaatttttgaatttgtgattttgaaaatgaagaaaggaaagcatttaaagggagaagaggaaagagagagaaagttctggaaattgatgaggtggcagtagtagagtgtaccagacgaatgtataactgtgatgacgtggcagggttatttgattagctgtgagtgggtcccattggagtagtcgccgcgtaaactagtaaaagcttggaattggtgacacgtgttgtgttatgaatgttcttatcaaaagttagtaagttactagatactagatagtactaatactatgatttgcaactttttttcttgtaagaaagaaatgttgattataaaggttggtttatttaaagaaaaaacatagagataaaggtcggtggggtgaggtggttttccaattgtaataatgaaaatgtttatcatagcaaaaatagataaatttggaaaattctaaaaaaatattctcgatgtatggtatttgagaaaattttttaatttaaattttttttataattatgtatcttgtagttatttaaaatattttgtaaaattttaagacttttaaaaaattttaacatgttgaaaatagggttcaaacaacacgcgtaactcttttatttaaatttttataatcgtgtatgttgtagttatttaagatagagaaatagtggtaaatggccttcatccctttttactgaaactaaatgtctattttaaaaaataatatagcaaatgacatctattatgttttagtacttaaaatactcttagttatataagggtattattaacattatattcatttttcaaataaaaacagaagctctgctccaaaatctaaatnnnnaagcctccctctccttattttttcaggttggtttggatttcttctaatttttttggtaaattatcgtgatttctctaaaaggcaatgaaatatttttttttcatccatttattacatttaattaatctctcaaatcttatgtatggtgcacgtttaattgactagtacatttctaccttggaagattttgctctaatagttggacataacaaattagtttttgtataattatgacatgttgagtgaaaaaaagaaaagataaattctctcgtcaaaatcataattgtgttttatctttaatttaaaaatgtgtaatatcatcattgtatagtatgctaatccaccttcctatatttatttattttgtagatagttttggtccaattagttggttatatcggatgcctcttgaaggtgatctcaagttattttgtcttaatttctcagataatttggtcttatataagttgttttgcttatagtgattcatattttgactttgtatatctttggctagacaattagcttgttgactggacgttcctccacgtcaacaattatcgtagtgtaattcaaatcactctctcaaaaaaaaaaaaaaaacaatttatcgtctgtattatgaaaagtcattaatctccattttttttttttttttgaaatggaaaatctcccaattttatttgggagtcataaaccatgtatattggcacccaacatttaatatttatatgtaaagaatctaaagatagatagatttttcaaaattttggagataatactttttctcaatttttcttttaacattatttcttaatttaattttaaatttgttttcataaattttgtttatatatgtattttttttttattgaaagcatttatatatgagttttttcataatgctagaaagatgaattttttaggtagaagtgggtgtaaattatacattttatacaaaaagaaaaataccttaaaaaaagatctcatcactaaggtgaaccttaattgcgccaccacactacctattcagaggatgttaagtgacaacaccaaagattaagcagacaacggaacccaagcatcttcataaatagcaatatcgttctcatctcccactctctaaatgtcccctcgtgaaataattctttaccccacaaaatattctttcacagaaaggagtccttttttttcgaagacttaatagaaccgaaaaaattgtttttatgatacaaaccttttaataccaaagccataagcgaagtaggaacatgatagaacaagaatttttatttttataatacaaacctttcaaatattattccaaaagttatcaattggaacatctttgttgttaaatgataatttggacattgcattttctaaaatgatacaaataggataatgaactcaattttaaacagttttaaatataatcaacttgaagataatttttaacatgaacatatacataaaatgtaattaattttgtaataacacctctagaccgcctattattagttttattttgacaaaagatcagttcataatactatttggtactattttgaaaatacatggtccaatttgttatttaatataatagagtgtctaatcaataatttttacaaaacacaaggtctaaaatgacatttaatcttattttaataaaaaaaattataaaaaaatgaataaaagtattaaagttttattaaaagtaaataaaaaaatatatattaaatttataaatagaagtacaattttttttttaattataatgagtgacaaatgaataaataaaaaaaaatgatatttattctgttgtaaaatttgatatgtgctatattgtgtcaaatttgatacaatttctagcatgtgtcaaatttaataatttggatcacattatacattattattggtgttcaattttatgaacatagactaaaaaatacatatacaccacttttataacactactcttctattaaagatgctctaaagagagctctaaaaatatgaaacaatattaaaccctaaaatttaaaatacacactaaaaagactaaatatactatgaaagattgtgttatgaagacat

SEQ ID NO: 114293 - DNA, 3288 bp, Cannabis sativa
  modified_base (1272)..(1273): a, c, t, g, unknown or other
aaaaattgctaactaattataaggtaacactttattgtagtatttgacatcataagtaagtgcctcataataatactctaaatataagttggtactcctgttttgtaaggatgaatttaagaataaaacattattagaagctagctaaaaaatatagcaccaatattattacattgaagaatcccaatttgtaaggatgaatttcttccttcttgccatgaaaacatttagcaaccatttaaaaagaattatggcaagacgaattgtatggagtagtgcaattacaatcataaccccgccccaacttattattaaaatcaaaaccacacgaacgacaatgttcatattattatttggagcgacgacacaaatagcgataacataagtaatggtcatagctgttatggtgacccacaaaatcacggttagaatccacatgaagaatttgcgacaaaaaggcaagcctgtgacgagtagtaagattatgcttaatgatccaacaaaccctacagtgttactatataagtatgaatgatataaaaaagttttgttcttgtagtaacccattattgactctccagcaaagtgatgattagatggagagtcggctattgtgacattggaaactggcgtagatgagttatcatcttgccagagaccgcctggaggatttgttccagcctgaaaagccatggtggcaatgagggatgcgacgaccattagtgattctcgctttctagttagccaattttctggttttcttactttctcttcttgaaatttctcttttcggttaacgtgatgaactttgatgttatttatgacttgattaggtctatgtgttggtaagggtggatctatggttcgtgaagctcccacagatcgaagacattctgaaatgtcaaaatctttctcgcttctttgactctgagccaagatgtctaaagctgtaaatttgtttgcgttgacatcattaacttcaattctagtatttgtaaccaaatactttattatctgatcaataagcaacacaaagaaactaattaagttattttaaattatgtagctatagtatttggtaaaatattgtttttagtgatcactttgcataataatattttatttattttgtaaaataatctttagacattctcagcacttttacaaaaattctcaacattccgatagaaggttatgataatgtaaaaaatggtattttggatcctgtgttttacaaaaatgttaccgattagaccatctgttttattaaannacaaaatagaccttgtattttccaaaaggacataaataggatctgagcttaattttcgataatttttgtcaatataaccaacttgaataatattcctaacatgtacagatgcaataagttttgttataagacatagatcgagttattattaagttttattttgacagaaaattaattcaaggtactatttagtattattttagaaaatatagagtcttaattattatttattaaaacagatggtccaatcagtaatttttgcaaaatacataatctaaaatgttattttaacaaaaattaataagtaaaaatattaatattagaaaaataatttatttttcatccaatactcctacatagtgtaaataacaattgaaatataaaacaaatgtaatccccataaaaattagtttgtgtaacatacctcgatttgcttaagagccacagctaaatgtaaaatgttcatgccataatcatccttagcattcaaaaaatgataatcatccataacgttcaccataaacttcaaaacttcgaattgattatatttcacacaaacatgcaaaatattttcactccggcctgctaaattaacttgacctgccttcggagccactctgagtagctctctcaacacgtcaatttttcctctcatagctgcaaggtgcaaagggtttctcccttctctatcccaagcataacacaagacttcatgatcaatatcattcgaaagtaatactttgatcgtctcaaggtggccttttgcagaggccacatggagcggtgatgaaccccacatgtcaagttctttggcgagctcaggcttgcgaatgatgatctccttaacaaaatctacatgaccgagcatagccgctacatgaagaggagtctcagagaaattattattattgttgataaagatgagcctatcgagaatcaatctgtcttgttgaagaagttctcgtaaagtgacaacgtttccttcgtgtgcggcttcatatagcaaactaaacattctctccattgattaggttataaaagaattatgaaagctgagtttgttagaaggataatttgttatgaaatagctctttaaaaagcttgacttgctaaataatgataatgaaataatttcttgtaagagaagtcaatgaaatgaaataaaattattcacatacgttacatatatccacttcaacacttgttacaattttatataacctttcatacgatagcaaaatgtttcaataaaatatatgatatttttttttatatattaattttatccatttgaaggtaagtggacataaataattggaagtcaatagaattaataaattggcactagactataagaaaagttacctagtgaatagaatttttgtgactaaaaagtaatacactatttaaatacaaattgttactaaaatttcattttattcacaacaaattattatcattattatgtaaaaaaaaaaaaattaccctcactattagtgtggcactttttaatgataacataattaagaaaacaaatgtatatttttagttacgacttttttaattttacttacaaattttttttagtgctgcatagacagcttaatagttcatcattaattaatagaaaatttcaaatttgtatctctcttttctcaacatatatatatccagaaagaaatattgggcatcaattggtgatgagtttccatattgattttaaaagggttgcataattcagtcatgtttattatatactttgataaaataataataaaatataagtaataataatatatacacatataaattacatacaaatttgacatatatttataactcattcttaaataaaattattagtttttttttttttttttttgagtaaaatacatgttattataaattagaaatagcattcatttacaataacagagcaaattggaggagggatttcctcaaaccaagaacaagcctcatccacccctaaacaaactttgccaaaccatgagcag

SEQ ID NO: 114294 - DNA, 2687 bp, Cannabis sativa
taataagtgtgcaatactctctgcctgaattattgtgttttggatcgtatttatagtatttaagttatcccattaatggaataacatgtactatttatcaaatttaataacaaaatatataatattgtaaaaaattattcgatatataaattcctatatcaataatcagttatcaactcttcttcaattatgaatgatgacagttgatttttttttttaatatgaattcaaaaatataatatataattgatcgaagaatgatatatttttttgactgaaaagaaaagttttataatttatcaattaaatattgttttagtgtgcaataattcattatttaatttctaattatcttcaaagtttccattttttttttacatatatatcttcaaagaacatatatagtaagatataggagatagaatcatcaatcatttctagctaattaattaaattaacaactccaattatttagcacaagttaaagtcacagttactagctatatatatatatagaataaaaaaattaaataataataaagtttctttttcctagagtttacatatatataaattagatagagtcatattaaatcttatgaaagtggcccgaattagatttagacatctgaagactataatatttttttatatataaattttaattatttttttgctcaagtgaagattataataatatttatatgtttggtttggatgtagaataatattgctgtatctgtatcatttcatatggtctacatatatttatatatacaaaatattaataggtacttacgtaggtgtatatatatatacatatatatatatagaagctagagtactagatatatagttaagtatatatatagattaattaataaagcaagtggttcacaagtgtccaaatttcacaattgcacttacaaatattttagacaaaggtcattagtcattgtattgaataagacacaaagtgcttctctaaggaaagattttgataatcttttcttcctcatcaattacttattattaattatattaataatctttataatattacataaaaactcataaataataagtacattaattcaatatgtagaattaatactaaaatgtatacttgcttattgaaactatagaaatttaggtattaattaaaccccatatatatatatatatggttatacagtaaacacaaaaaataatgccaaaaatgaataacatataattaatcatggcatacatgcaaatatatggaaaacataatatattcaatattatattattgggttacagcatatatataatatatattgtacgtacataatgttcctcatgagtttctttcaatcaaaatgctctttctctctcatcacatatcttattcataaaaagtcttagtctctaagtcttgttatttatatattaagactttgtaactgttataaacagtggaatatatatattaatatcttttctatacatagttagaacaaaacattgatcatcattcattatagtactactactactaaccatcatttcattttttttcttcctttattttcccttttcattatattatttttaaccaaaaaaaaaaccatatctcaaattaatgccaattccatcaacatgtccatcatctaaaacaacatcttcttcttcttcttcttctttttcttcttcaacactaaaaatctcaatggagacacttgtactaaaaaaccaagaacaagaacaagatcttgtattggatcttagtcttaataagtccgaacacaatttcatcgacggcttcgaaagttcaaattattactcatccggaatcatcactagtagtgatcttgatcataatcatcaagatcaagatcaagaagaagagaataacaacaacaacaacaatgaaagtgatgatcaagatcaagatcaccgtgatgatcatgatgatcatgagccaagagtgttttcttgcaactattgccaaagaaaattctatagttctcaagctctagggggacatcaaaacgctcacaagagagagagaactttagcaaagagatcatcaagtggttatcatcatcaccaattcatgcacaagaataataatatgtttggtatgatgatgagtagtagtaattcaattccatgcagatattcaagcttggcttctctacctttgcatggcttatctttcaataggtcacttggtattcaggttcattcttctatgattcacaaaccatcttcttcttcctctttttatcatcaccagcagaatcagccaaaaactgcgatgatcatgagtcctagtagtactcctagtagtactgggagtcccagtactactagtaattcgcagttttatggttataataatccaaatggttgcttgagatttcaacaacctgccgttggaaggctccaaatacccgagactttttgcggtgatcagactagccccggagggtttttgatgtccccgcctagtggtggtccggcgagttttgagttcggccgtcagagatattccccggtgagtagaagtgatcgtgatgatttggaggaaattggagggttttggtggaataagactaagcaagatgataagttgcagaaacttgacttgtctctcaagctctaataatgaaccgctttctttttttctttttctttctttt

SEQ ID NO: 114295 - DNA, 2903 bp, Cannabis sativa
taattacttacaaagcaacaataaaggaaagaattttccacatcaaaacctttctgcttgaaaatggcaaagctacttttgacaattcatttgcacccgtcgcccagaagagcataattttcagaactcaaattctcaatttaagtttataggagggagattgatcagggtgttgttgctgccagttaatcatgttagctgtttaaggaaacattccttcaagatattcatcaaagtgatcgtcatcgtcgactttatgatcagagaccgaagctgaagctttctttcctgtagtgtgagaacaattagtaatacctcttacataaaacaatgtagaatgttgaatgtttagtgaagcagttatgctaaccttttttcctcttttctttgcttttctcgttatcagtatcattatcgtcatcactactcctcgaccgattcctgtaagtagattgtaagtatctctattcaaacatgagcctaatttcaagctacacgttttaagcaaaagaggtaccaagttaagtaaaaaaaatgggatcaaagttcacctcttttttgtatgctcttcctggtccaatttctcggatttctccttttctttccgctttttgtagtggagcttctcagcgcacctgttaggaattaattgacccaataagttagagcacgccttgtttcaatatgcctattcctttgttgtcaaaaatgtattgaaaagaagccgaaaaagattgcagtgtcgagcaagcattctaatggtgtaacaaattgagcaaaaatcgccatttgtgatgataacaaaaatagaaattaaagatgaaaatgaaaaaggggtccaagaacatagttgtcataacccacaaagaattctattatcttcaaggatttaaggaacactagcaagtacaagtagtctgtgatctaatgatagaaaatttaaattatagggaatataatgaataaaatcatatggttatatatctctaatcaagagccaccaacctacctctcacaagttaccaatttcacaagtgcttgtttgttttctccagcttcaaagtaagagaaatttacctgaaataagaaaagacaaggtaagataagataagacaaaaagattgtacacatgggcataactagttagttccataaatgtgataagacaaaaaagattgtatacatgggcataactagttacataaatatgataaagacaaacaaatgaaacacttaaactaaaaaacaaaaccagaaaaagctaatgaatagagataaatattgttgatgaatcatacaaactaaaaacacacgtgcctcatagcttgctaagccctctttttcatcacaatgtttgtttccgcatatgaactgtcctgacagtaaagggaaacaagtcacttctaaagtacagttgagtccctctgatgaagagactgacattccaacacacataaagattgaacagaaactctagatcatatgaagtaataagcctccatgcataaaaacatttgatcagaaaaatgaaataagatacaacttctctgcagtaaaatgtatatgcaaatgcaatctatggtattacctttaccggaaacaacttctttctctgttctccacctcagaccaatctaaaaggaaaaacatgcaaaagaagtttctttttagcattatgtaacaaagttgtaacacataacagtcacgtttaatgtttgtgtaatgttttgatgcataatttcggtgcacatatcatgacttgtttactaaaaaactgaaaagtccattaaagggctttccccttgagtattcgaagcaaccaaaattagaagcattgaaccttacaaaaaaaaaaaaaattcacagtaaaagctagatgaataccttgccggttttgtaatgtgacatatcagctagacagtatctgagatgagtttaaggcaacaatgagttgctctatatccaaagaactgatcatgtgttgaaactcacaataagattataaaacagcccacctatatattcacatttaaaaattattcctattgattgcaaaggatactctttaaaaagcttatcatagtatcgcttcaccagcctttgctcccaagacgtatccatgtcatcttcctctgagcgtatgaacctatataaatataagtataaaagcggtgcaaatcatttaatctcaaaaaacaacttgaatatataaaacagttcttctggattgatggaaataatttggcagtaacaccatacaaataaacaaaagtgtaacacaaaaaagagacaactgcaatccagatagaaatggttcaaaacttaagtaccgatatccttctcttaaggtatcttgatcggttttgataggcaacctaatgtttgaaggtttctctttcccatagtgtacaactgcacacacaacacaaaacaaaggctatcatctttatgtagaaggccaatgaagtcccgctccgagacatctcgtgtcccgttgcatatggatccgaaagcgggaaaaaatccaacacaaacccaaaaaagaaaaaaaaagaaaaaaacagcattgtattgcattgtacctataggctatatgtctattactagttttctatttcatttacatttgtctcagatcatagcttctacacctgatcctgatacaagtgtctttacaacttttcactagattctaaaatgatttggaatctacaatcatctcatcatctactgtgtactgataattcttcctactaagataaaataactaccaaatcgaaaacaactcaattgatagtactaaaatgtaaggatgactgtagcccacttctttctctacgaagaggaatgttcgccattctttttctttaggacacaaggaacccacagatacaaagctcagt

SEQ ID NO: 114296 - DNA, 1565 bp, Cannabis sativa
aaaaaaatttaaaaatttacaagttgttttatataattacaacgtatgcgatcataataaaaaatagtactaaaatttttctgtatgtcaaaacacataagacatctactaaaatatgtactacaaatattttcattatttatatatagtgctaataataagctaattattaataattagcttctcactcaaaacaatttttgcttccttttaaaattaattacttttcaataatgttattctttgggacttaaataagttaaaggagccaaagtcataagtgcaaaaggtgcatgggacttcattggctttattaccaactgattatgattataattaattagcaacacatgaatcatgataagatcatcaccaaatattagcccataattattttaaaaaaaaaaaggaaaaatatattagaagatcttgttggtttaactatgaagattagattctacaatggccaagaatataataattaaaataaaaaataaaaatcctatttatttctccctagttttatgttgcaggcattaagcaaacattaggatgagcttgaagttagctcagttgttaatttgtttgtttattagtttcaagtgttattattatattaattattaaaatctatgccaaattgtcaaatacatattactatatataacaggctgtataaatcttggaagctttgtctagctagctacttttttgtcacaatctatatctcttattttgatcaggcacacatctctaaagttgtttattgcaattttatatctatacttatatatatatataagtatttatagtacaagtgtcacttttgattcaattggttataggagcatcttatttttagcatttatggtctacattatatctaatgtttcttgtctattgcctataggggaaaaataaaggagtgtgttaaaagcgcagtaaaaaagattattattatacaataccatacaatatcacacattgttagaaattttattataataaaagataaatccagatatatacaattaaaataaaaaaataatacaaaaactaaaaataagaaactaattaaatatatgttataacacacatatatacattatatatattgcatatatataaaagtaaaagaagaagaatacaacacatgtaatataatacatatatagcaagagaacaaagaacattggttataagtttgatgagctggatctgttctagtatgtatacggtgaggggctatggacgaacaaacagtctagagtgttgtttggagccttggttttacttttagatagtaaagtaatctgagctcagtgggatgttgcaaatttattttaaaaatacactcaattacttattttgtttttaatatgaatgatcattcgtctttttgcatatttattgtaaaactcactgtgtatttccaaacagttttgaatcttttcaattaatgcatcaaaattaatattttgtaagataaggtaaaatattgggtcgttacagttggtatcagagccttgacccagctagaagtgtggtcgacgaggacgtcggac

SEQ ID NO: 114297 - DNA, 1620 bp, Cannabis sativa
tttaaacaaaacaacatccaaagaatgagaatttatgatccaaaccaagaggccctccaagccctaagaggcaccaacattgagcttatactggaccttccaaactctgaccttcaaaagatggcctcgagccaaccagaagctgacacgtgggtacaaaacaacatccaaaactacaacgatgttaatatcaaatacatcgctgtaggaaatgaagtcgatcctaatggacaaaacgcccaataccttttcccagccatgcaaaacatccaaaactcaatcaacaacgccggtctcacagacagggtcaaagtctccacatctctcaagtacgattttataggagatgattcatttccgccatctaaagggtcaatcaggtcgacctacaagccactttttgaccgtattatcgagtttttgaacagcaatagagctccattgcttgtgaatttgtatccttactttagttatagtggtcaacccagtactatccatttggactatgctcttttcacagcttcatctgaggtggtccatgatgatggttctggacttgggtatcaaaatctttttgatgcgatgttagacacagcctatttcgctttggaaaaggctggtggaggatcattggacattgtggtatcagagagcggttggccgacaagtggtgggacagagacaacagtggataatgcaaagacttataacaataatttggttcaacatgttaagaatgggactccaaagaagcaaggaaaggctattgagacttatatatttgcaatgtttgatgagggtaataaggatggagatgaagttgaaaggcattggggtcttttctctcccaacaaggtcccaaagtatggcatgaattttaattgatgagaattaaaaagttattaataaattatacataattatttcttgtaataatttgtgaggatacatcatatccttcaatataaaaatatttataattttagttttatgatgataaaagtgaaccaaatagagattcttatttggtcacatataggcttctttattcttactataatcgaatttataagagttattttaataataagaagaagagaattactattgacattatgagattttttatgagtaatttttatgaaagaagtttttctaatttaatatataatatttaaatcttaattaaataaatatttaatgttttataatatttaatgtttaatattgcaatatgaggaaatgatgtagaatatgattttttttttcttttgataaatatggataattcaagattttacttatgacctttttctagtataaacttaaaaaaaaaatatgtactagtagatctttttaaagggttgttctgatagattttttatcggtttcggtatttagaaaaaaaaaataatctaattttttttatgattgcgtacgctataactatttcggactacttgtaaatttttaaaaaaatttgaatagttaaaatgttgaacaatcactacaagaaaagcaatttttgccggcgcagttgaccaattgcgccggcaaaagttgtcagcattaatgagatgctgaatttgggattggattcagctataccttttaccggcg

SEQ ID NO: 114298 - DNA, 2320 bp, Cannabis sativa
taaatctagatcctggtaaaatatatccaacaagaacatgggtggaatgttctccctggacaccaacagttgttgatcccttctaaacatttgcaagaacctgctccccctagagattaggaacagtggacacccgtagaaactggctccccatggacagtaggataactagaaggaccttgatcaatacccatagaagaaggatgaatattagaattagggatagaaagaccatggacgtcaacaacagatggatctgcatccatatgagttggagagatcattgaggaatgtatagagaagggaccatcaccatctggagaactagaaaaattaccatcagcaggaacatcaggaggagcctcaaaattttgaaaccttagtcatagcaaacaacacatcaattatagccttctcaaaacaacgctggctgagctgatcacatgcataagattcaacaaaattatttacaagagagaacatctgactttgccaagttacaggactaaacccttcaagaggagctaaaggagcagtcgaggaagaagtgacatcagaggtaagagccccaccagtagcaagaacatccataactgataagggaggcttgccacacttaggagagaaattttttccaagagtaggggcatgcaaaatcttctcatgctcaaacatagtaggaaaccccttttttaccacacgattaatcaaactgagctaaggcaacatgtgtttcacccttttggcagtagcagagttcactattcgatcatacatgagtgagggaacatcaatactgacactagtacccaatgcaaataaaacattttctatgctatagttgatagtagagatgtatgaattaggccaccagtttgatagtgcaattttgtaaagaactctataaaacttagttagtagtgtgataggtaacccctttccattctagacaaactcagagttgcctatgctctcaaatcctatttgtttaataaaaggtttataatcctcattaaaaatatgattgtaatggttttgatcttcaagacacaactaatagtggaaggggcaaaccgaaatcgattttcccaaatataagcaagatatagaaattttcttttcttgttcaaaatgctctcgtcaaggttagcctagaactctctgactagattctcatttggcggctgcaaatgagtgacagacagcaacaacactctttgtttaatcaactcacaaatttttggaaaggaatttagtttaactcgatattcaggccccaaaggatgaagacagacattatcttgaagcctaagcaacttgtgattcgaatagaaaggtgcagtcgatttgtttggctcaaacacactagggtttgaggatgaacctagttgagaacttttagttttcatagggacaaggatgtgaggagaaccatacgaaactattttcctttaggccgacagcaaaaacactctttgtttaatcaactcacaaattttcggaaaggaattcagtttaactcgatattcaggccacaaaggatgacgacagacattatcttgaaacctaagcaacttgtgattcgaatagaaaggtgcagtcgatttgtttggctcaaacacactagggtttgaggatgaacctagttgtgaacttttagctttcgtagggacaaggatgtgaggagaaccatatgaaactattttccattaggccgaggacgctatgaggtttggatggaacaactcaataggttccactgatgctttagcagggaaagtagtggtggaatgaggttcagccaaaaggaagagacatagaatgtgtaaaacgccttggtaagctagaagaagagaacttaccttggtctggtctgtaaagggacaagtcagacccaactggtgaggaacaaggactcacagccttcaacaatgacgatgaagcatcaccagaaagagatgatgttttgactttgtgacaggcccttttcccataactgaaccttcaagtaaacacccatgaacacacacaaagaagatgaacagtaccatgaagtggttgaagattgacgtaacgaggaagaaatgaaaaatgtgaagtgaaaacacgatgataacttcatatatttatcaaccataagaggattaatgattaaattacccttcagcccatttaaagaaaaacaacccaagcctattaacacttttgttatcttaatttttatcctcatgacatggcatgcttacatggacaaaatcagtgccatgtggtattacaactcaccaataggaaggccaagttagcacctgaataaaagaac

SEQ ID NO: 114299 - DNA, 2455 bp, Cannabis sativa
  modified_base (2424)..(2427): a, c, t, g, unknown or other
aaaggaaactttccaaattgaaccaagatcacgaatttagacttcaaacctgccaaataaagataatttgatttgttctaataaaggcaaaatcaaaattatcaattagaaaaagggatagtcaagtttcccaaaattagacaactttctataagagaatttcttctcttacaagaagttttcaaacaaagaaaagtccagctcaaaaatgattctttcctaagatagaaaagagcaataaaatgcacaaaatcaatataataaaaacaatttaaatgctcaacaaaatgcacattaattaaaaaatattttgacaacaaaattgtcaaaaaaagacctaacagagacataaaaaaactctattgcatatatagtactataatataaatcttagagtttgaagcttttttagaaaattatcatatgggattgtgagggaagccaataatgatataattatgattaattttaaagtattcatttgtgattattattattgaataacgtgttgtgtgaagtattttatataggtatatattctaattattatattaaagtaattatcttatatatatgaaggaaatatatttaagtaatcactttattatattgaatatatttgagaaggagacttgcctagagactatattaggcaaatgcaaaatcaattataagccatatacggtgatcagagcatcaataatagcatgaagactgtggatatagtgatatctatgataatggttgatcaacatcattttaattaaccttgaagatttgagaaattagcctaagagatactagaatttacattttagtttggaagaaaggcatacttaatttttaagatagatataactctctttttcaagtttgatatattatcttttgttgtttttgttacattctatcaaattttaatatgcttctttactttatttctactttattatattactagttaacaaagctgcatttcgtgtggtatgtataataattttaaaaaatttcatactaaaaatataattttttttgttattaggacaccaaaatacttttttattatacataaaaaataataaaattataacttaataccaaaaatattaaaagtacatataaatagcaaaaatagtcattatctaataatttttcatatatatatcatcggtatgaaatcaagttaagtttcgcttctgatagaaaatttggtccttattttctcaatgcgttttttcgcatgaatctccatatgtatttttttttatagaagaccttcaaattaaataaaaatctatttaaacaatatttaacaaagaattgttcatatatatgtataacatatgaaaaatagtgttcaagaatacttactcttaatataaaattgatttgtgttgttgattgatcgagtaatgttgattgatatttggtatgatcctctctatttatatacatagcactttgcatgattagtagttgtaaagaatatgtatgcgtgatattgatttagttaactatataagtgaagaagtagtaaggtttgagtgtatatttaatttagatgttacaatttttttcttaatattattaaatgaataattataaaaaaactacataataaaataaaaatttagaagaagataaagtcaccttacttatttttgtttcaagattttatgtagatataaaaatttacaataaatagataactaagaagacaacttaaaataaaataataatagaaattaattattaataattaaaaacatcaaaaaaattatttaaataattaagtttattaataacaaaagaaattttttaaagtaataatttatttagaagtcaaataattaacattaataaaaaaaatgctacataaattattttcaatatattaattatatgatgtaagttataaaaatcaaaaaacatcattaacattaatataaatgtatgtgatttgaatagttaacataataaaaatttaaagctcatgattgattaaaggagaaaatatatattaaaaattatttatttattataaaaaaatttataaaattaaaattataaacatatatagcctttgttttcttataaatatatacatgtatatatatatcttaatatatatacatgtataaattttatagagagaaatttattatttttaatatattttgtaattaaaaactaaataaaattaaattactataactttttaaagtaaaaaagttgcaaaaaaatttattggagaagaacttgatacttgatttctaattaaaagccaaaatataatcttttcaaagcaagagaaaaaattatccaataattttgttacaaaatatctattggagagtaatttgttaataaatagtcttttctaagttgtaacaccctaactattttaggcgtattacgtgattnnnnaacgtactgtgcagctcgttgctgatca

SEQ ID NO: 114300 - DNA, 1770 bp, Cannabis sativa
aaaaaaacactgccaggaaattaatctcaatctccacatttgttccaccccgccgcggggggttggggggggaggggggggatttccagaaatacagatttactaaacaggataaagctaagagaggccagaaaacataaaagataaatttagttttatctaacagactgtattaaataatatcgaagacatggttgaatgaaacagtatatggagcatcaatttacctttaactacatagaacatcatattgtttaaataaacaagtatattgcctcttccagacaacatccctcctggtgtagcaacaaagttgtgaacgtatgatttaggatcttcaagtaactgtagcatacgaagtaaaataacagtcaaatcacaaattcgcttataatccaataaatattttcaagtcatcaaaaagttgataagcggagaaattatctagtgaatccatccaaaagctatttatcttttccaatcattaatttaacacaagtatttcctgaatatatgcagcaatcctttcattggtgttcactaattagattagggatacgaaaaaatgagactatcaaatatcatatgtaaatatgcaatcataagcctgaaggggaattcataaaagtaatccatcacaaataccttcatccacataaaccttggcatcgcaacaaacacagtcaagataatacatccgggacgaatatacccctccaactcaactggcatattggacagccattggaatatctgtaaacatagaaagctacaggttactcaattcctaaaattgcttgcagccataattatatgattgtatatactaaactgtaacaataatcctttaatagtacttggtgccgaagtcgtctagggaattctgctggattccaatcatagagcttgaatgaaatacgacctgttggacactataaatgtgacatgaaatcagtataacaactcccaaataaattgcatatctttcagtaacctaaatacagcattcaaacacataccatagaagagtaggtactcttgttgtcccaataggagggagatacaccacgtttagaattatcttttccgccctccatttggttttcaccagaatccactaaagacagaaagccatcactatttgcatccttggaatcgggacctgagcggagaggggaaatgtgtccatcttcagactccacaaatgtttctgtttgaatcctctggctgctaaactgtgaacaatctgcttcaaaaacacttaacataagcaagccaaatctgaaagaaagtactccgcacgaatcttatacagagtagaacagataattcgggttcttatacctttccctgcttcaccatcaccaccactcacatcttcactaggaatgtccccttgagattccttctcattagcacctttagatccagcaggtttcctccgccttctgttgttatgcttctccaacttccttcgacaactccgtttaccttcgtcaaaatctgccagtacgtggaaccttcaagagatttcatgtcatatagaaaccagtaaatatgcagtagaaatatgtttgaacaaaaatacaaaaaccttgtaacagaacaataatgtcacaatatatacatccttgatcacgacattcactaacccactaactctaactccagaggatagaactgatcaacttaagttaagactacaactgaagcaacatggaattagataattaaaactatctaagaatctaagattatgataattaccca

SEQ ID NO: 114301 - DNA, 973 bp, Cannabis sativa
  modified_base (854)..(857): a, c, t, g, unknown or other
gagtagatgatattttggaacaaattttattttatttattcataattatgttgcaaaattactattctatagttgcaaactactacacccaatctctaatacatatgtattatatacattgttatatgttcatgatatttattatgtcacaaaatatatttccattccaattgtacatttatattagcaaccataatatattatatgtacatacttatttaaaaccatacagaccgtgttgctattttcaattggtaagtagtttgttaaagttaaatgagtacgcagattactgatcaattaaaaagtgttacattaattttaaggatggtaactaaactttaagtttgacaattaataaaaattagtttaaaacttgtataaatgattgacacaacaagttgcggggatagctcagttgggagagcgtcagactgaagatctgaaggtcacgtgttcgatccacgttcaccgcaatctcttaacaagtattttctttttaatttttatttttttaaaaaatcaaatatccagtcgagaattgtgattgtttagctcgattgtgatgtgactttgtgagttatcatcatcaagagaagaaagctttggaaagagaaaaatggggtggattgagggcaaaggattaattaagaaaaaagtgtcacgttattttaattttttttttttaaaaaaaagtgttacgctaattttaggaaaatcactcatatctatatatattttttattatttgtatagttgaggttgttacattggattgtaatttaagttgttctgttaagtattgctgcgtgaattttcgtaaaattgaaattttttttttttaaatatttatnnnnattttttaaaattaatattacgtgcgtcattaaaaatttgtgacgtgtacaagtgtgtcacttaactgtaatttttggacggaggggtacatgaatgagagtttaggtagttttgc

SEQ ID NO: 114302 - DNA, 2098 bp, Cannabis sativa
gggtaggttgtatgtagaattttaaaaaccgatctttaagttgggttagaaaatatgtagtataaaccgactaaaccgaccgatgtacagccctaacagccatgacgaagcggtcatgactttacacattcttcattaattcaattttaatattttcgtgccacgtgccgttgtttttgccacatcactattgtcaaaatttggataaacaatattctctcaaatataaatatttaaatttttcatagttaaaggataaatattcaatattcagtttacaatttcaaaataaatgacgtacactatatatatagcattagagcgggaggggtaggaaaaagggagaggtcatgtgttcgaacctaggaccttgaagctattaaactattaactgattgtaaaataccattacgctacactaaaaaaaaatgataatttctcagaaaccttattttgtacgaagtccaaacaataacaaacaataaaagaatagtgtattttctgaatggtgctgcaactaaattacaaggaattgcttttttaaaacaaagcatgctacattacattttataagttacaacatggaatagttcacaattgtttttcttaaaagtatattacaacagttgagcccatataattaagtaactatcggaagctattactcagccgaaaaaggcctactacgtcaggcccaacaaaatacaaaccaaaggtcaaacatctgtcaactgagatatataattactcagccgcaaagcttgaaatcaaaagaaaaaaagaaactaaaattgagaaatggacgtttttacccctcgtacccagtctagggagtagggaccattgtcccttgacgttttaaatagtgatgaagaagagttgacggggtattccagaggcaatgccagaaggttatatctaatttatatctatgtatatatatatatatatatgaacttcaatttgaagtgtgcacgtgcagtgacctccgaatgccgacagtcactgttaattggtcactgtccattttaagtattttcatttttcaaaataaaaaaaggaaaaataaaattaattaattaaattttgtattaccgtcaccagtcagcacctggtgtggtcgagacacacgccccagacgcggttcctccgccgatgccgtggcctctcttccgccaaaatcagaggcacccatgcacgtgacctcatacttcctcccacgtctctgttttttcgtaattaactaaatactaaatatatacgcctgttagtgttaatgtgttttattacaagtttttgtttacttaagaatatttattaaaatactttgatttactaatactaagaatgtcaatagagtgttttgttgacctgactttcaaacattattaaatttgccttaattttcgttagttagtttcttagtttgatgatttggacattcttggtcaacttcgatctctgttttttactaacaacttctttttttttatcttcaagtgattacattagattcaaagtaattgtaattcatgtattcatatttcgatcaagtgataaatttctgtaattcttatcatggatttttctgtaatattttggtcttcttaatgaagtgagattatgagttctctattattgaaattgttagtattggaatttggtaaattaattagtgtattatcaaacatgtttaagtagtattcatgtatataaatttttataatctaaattagataattaattatggattaattatatataagattcaatctagctacgacatttcaccaactgaatattcggttcacagaggatattcaaataagttaagatttttgttaatatattattatatatatccataatatattcttagtaattattttactatgcatcactctcactttatgacaaactttaaataaaatattaaatagtttattttgccgtgttatatagtaagggccgggggaccagaatgaggtatatatttatatatgggctattttcaaaaatatgggaaaaattattaaggttatgataaatatggcataaaaagtaaatgccactaaatatggcattatctaaccaatca

SEQ ID NO: 114303 - DNA, 4110 bp, Cannabis sativa
  modified_base (3378)..(3382): a, c, t, g, unknown or other
aaaaaaaaaaaaaacaacaaaaacaacagtagaaacaacagtagaacatagaacaacagtgaaaacttaacacaatacacagtatttttgaaaaaaattatgccctatagtaaaaaagtaaaaaagttagaaagtaagaacctcctaattaaatgaataaaataaaagtcttatttgtatggactttgtaatgtctaatacccaatagtaaacctaattagggcttatgggactctagttagttttctatataaagaactttagggttttgtgaatgtcagtagtcccgtgatccataaagggaaatgccatataagttgtgcatcccacatcgctagggaaaggtcaagtgtgatgatctcaagactgtgtaggtatgagactacacatgtgaagatgacttaaatggattgataggtaactagctatattaacaaggtgcatcttattttctggtgtcatttagaactccaaagttaagcgtgcttgacttggagtaatcacgagatgagtgatctcttgggaagttaccccaaggagtgtgcgagtgaggacaaagcatgctggaaatactcgtgttggtttgtagggttagttctcattccaagaagtagccaaaatgatgtacgtatgtataagagccacaagtccgtggttgaaggcacaatagaagcttgaagcgggacgttacaagtttggtccccaagattaatctttaactcctcttctcctctattctcatcaaatgagtgagaactcataaagagaagattaatctgtgaaagaccatattcccataatatgatctcatatcgaaaatcatggaatcacatattttcttctcattaattcataaagtaattttaaagatctaacgttagtttaagatccatgtatgttttatatctaactctaacaagaataacctatgttatgattaaaaaatataatatctcattactttattttatgaaatccctcacttcaagttgaggtttgacatacctcaaatgagacaaagaaagagtaaatgtagctccaagtttattgacttcctacagccggttttatggccgaatagtacacatattaatgtgagaaaaaatatatttttattggctttttttaaaaaaataaaaaataaaaaataacttttagggatatttttgtaatttagttttattggtgatatgtatttacaacaaagggatttgtatttgagatagtaggaagtgtgtaaatatttttagtgggttttatgaaaatataataccatcagaggttcgatgggatccgcccactcttggagtttactgtattaatagcgatgcaagtgtcccggggcaaggttctgaaagcggtttgggagctttaattcgaaaccacctaggtgaggtggtggctactaaaattcatcagaataaggggtcctcttcggtagaagtggcggaggtgttggctttaaggatgagcatccaattagctatcaaagtggaggcctatccttacattatccaatctgattgccttcgggttgtgagttacttgaatggtgtttcccaaaccaaaacggactggagtgcattgctagacgatatcagagagtcccttgattttggccactgccttgccgtgaagcacatcagaagagagtgcaaatggcggacttgcctaaacttgtgtaattttttgttgataataaacatatttaaaaaaaaaaaaaaaaaatataataccaatttgtggtagagcaaactgaaccacaaagataaatgattgatatatcattcctaccataatagaacacgtatctttaaccaggcaagagcttcaaccccttgtgaagtggaaatccaaatgaatggatcctccactgagtcagtgtgattgacttcaaatccataggcatctgagctttcttgccatgacattatatagtgtggctttgttcgcatcttggagcttcttgcaagatatgaaacccctgttggagggttttgagttggaacatatggaaatctcaataaaaattggggtttgatttaagttaaaacaaccaaaataaattacagtcaaatgtagtcacacgtacaaaattagcaccctataatactaatttcaataaacaatcactgattggatgaaactattcatcaatctagatcaactctacaccgatttctctacaagcaagcaaatctcatttccactacctgcaatccaccagacacagaccattgttgccaaaatattctctaaatatcttcaagaaagggaactttaccaagtagacagaataaaagaaaaaagaaattaatttacctagaaaaataaaatagagaaggacgcaataaaataatgagccaattatcagtattatttttaatgtacccttacattctgcattgagagatgacaaccattggataccaaaaataggaactctccttaaatgcaacgattgagaatatgttgaagtttgtaatccctcgtaatcagctgagggattacataattcgccttgaaatatttaaaatattatcttctatattcttttacagtctcaaaattagagttagatgtatctctcaatttcaaatatttgtcatgacaaattagttctttacaaactagaaatgtcattaaaaaaaaaaacagaaacttacaaaaatgctaaaatttagtataatttttacaaaaatactgccacacgagttttttttttttttcttcaaaaatactgtatttttataaaacaaaacagaacaacttaaaataacagtgcaacaactacaactgtagaacaacagtgaaaatttaacacagtacacagtataaaacttacacaatatttttttaaaaaaatttctacctcacagtataaaagtaaaaaagttaaaactttcaatatgtgctgtaattaaaaaaaaaaaaaaaaaatacaaacgaacaaactgaaaatgtctaattattgtagtgattgcttccctagcaacaactttagtgtcaattttgccactaacaaccctcccaaaaaattgttatttaaattaatatgtaaaagtaaaagttaaataatatatatataatagttagggtatttttacaatgtactttgtaaaaagtatatattgatgcactttttatctgttttgacatccaaaaaattattttaaattatttttttacatattcgtgtaagttatagttatttaaaattttttataaaattttgagaaattaattttgaataattcacaatatagaaagtagtgttcaaatagtctaattcacacgcgtataaaataaaatagttatgagtgcaacacaatgtttaaactctatttttggcctatttaatttttttttaaatttttnnnnnttttacagaatatcttaaataatataatatatatgaccacgagaaaatttttaactaaaaattattttgaatacccaaataaataaaaaatattggtacatggcatttaataagttgctttctaaaattttcctaataattattagcaatttaccttctcaaattaattgttttaacaagttgtcccctattttactctcccctgttactgattttaggtaacatactaacatatgtaatatagaaagagaatatatttttttattttatttccctccgaattatgaccgcaaacatttcgcatgggtcgtattttgttcatatttgcttgtatgtatgtagctatatatgagagaaacagagtgcgagaaaaaagctttgaagcttgtgttattattattctgtgtttttggaattacaggtagagcaatatatagatgttatatgagctgagttagaggaataattaacttagcttagtctatgaacatcctaactaaccgagagccttatatggcttaactgtattgtaactaacacatgaaactaagtgtaatatcctaataattcacaaaatttattgtttgattgttatttatgtatgtatattttttatgggtaaatggcgtcaaaactcctaatactttcgttttggtttcactaaaccccacaacccaaatttctgcgggtaaatccccaaaaccactgttagcaatttaccctttccg

SEQ ID NO: 114304 - DNA, 9330 bp, Cannabis sativa
tgacatgtaccaaatcatgccccaaaacttttaaagtcgttaaaaatgccccctgaactattgagattgttggatttaaggacctttgtctagttttaatgagccagaggtacctggttggccccccatgccaccaggagccagagcttactttcccgccacaagatctgtttggcagtatttgtccgtcttcgggcaggggaagtctaccggcactgcttgtgcctccgcagaattcgggggataatgcaagggtgaataatgctaatccacctatcgactagcaacaaatgtttcttgaaatccgaagtatcatacttcgtcaagaagatgaattgcattagtttaaacaaccggcaccgacagctctagcaaaataagtgttaccaccagctcctattctagtggtggtaacccggggtttattcttccacgttaggatttattatttgaacgttttgtgaagctgcaacctccaacatttctaagaggtactgatattatcaaggctgaacagcggatgagcactattacctgcatcctagataacatggtggtgacggggaccgaacgacttaactatgctgcattcatgttacaagatcatgcccgcgtctggtggaatattgtgggacataccaaaaatgttagtactatgtcttgaaaagagtttaaagccctatttgatgaaaaattttataacattgctgtaagaacttcacagatagaagattttgtgaagttgactcaaggaaatatgaccgtggtcgagtatacccttgaatttgatcggttgcccaagtttgctggtgatctagtacaaatagacttcacccagaaacaaaagtatgtaaagggactgagtgtcacaattagccgagacttgaagattaccactaatcacgatacacttaagaaagtggttgagttagccttgatcgctgaagaggcagagcaacatgtaattaaagaacaagcaattaaggatgtcatcacgacatcagatcctactatgggtggtaatgtaagtaaggggatcgacagtggcaactcgaatcacaaatggaaggctcaagctttcaaaacactgagaagtaatagaaagtttcagggaaacagaggtggctgtcaaggtcgcggtttacatttagatcatatccaaagtgtcccgaatgcaaaaagcaccatcaaggtgagtgccgggctaagacttttttgtagtgcaatatggtgggtcactttatcaaagaatgtctacaggctaagaaagacgagccaatgcagaacaacaaccagaatctgaggcatttgttcactatgacttaggctgacactgtcgctagttcgtcagtggtgacaggttaattgtccataaacggttgttcttattctgtattatttgatttcggagctactcattcttatgtatcaagtagagtaattgaaagttttcataaaccatgtgatgtgtatgcttcggggatttttccctgttacccttgggagagctaattgtatctactcagtggattaggtctttgtcttttttgattgacggttatgaattaaccgccaacctgattgagttacaattttctggttttaatataatcctgtgaatggatttcttatttaagtatggagcaacaattgaatgcaagcggaagatggtggtgtttgaacctgacagtgccaatcgagcactgtttgtgggtaaggtacaaggatcgcgcatacatagaataacactcctaaaagctaaaaatctgatgcatagaggttgcataggattccttattacaacagtggatactagccaacctgtgtcatctggacctgaaaatacgagactggtgtgcgagtttttagatgtatttctagaggacttacctagattaccaccttctctagaattgagtttgtaatagagttagttccgggagcagaaccagtatcaaaggcaccgtatcgaatggctccaacggaataaaaagagttaaagatccaactttaggagttacttaacttgggatttataagaccgagttattctctctgcggtgctttactgctatttgtgaaaaagaaagacgggttgcttcgaatgggcattgactatcaagaactgaataaactcactatgaagaataaatatcctctaccccaattgacgacttatttgatcaactaaagggtaagacagtcttttcaaagatcgaccttcgctcaggttaccatcaactgaataaaatgacttgtaatattttatgacaatttttatggaatcccgaaacatgtagaatattttagaatggtttgtaaagtttaaatagttacaagttaaatttttattccctaaatgatttaaagtttaaattctgttcttatttcttgtaatcccagtttagcgggattagattatgattatcagaaatcgtagtgtgcctaattgttagggcgttatacaatgacagatctataccctgggtagcaaagactgttcattgggatcaaccaggttagctgagtcgacctaactagttgtgttggtcgagtttgttgggcctgccaagttggtaggattggctacatccgttggtgttgtgaaaactctagtggtggctagaacatgaacattaggatcaacaatcatggggtcttatggaagacctgatgaagcagaaattgtagttggagttctccttgttataaccatggtgattgaccgaattgataaataacactctcaataaaagtaccaaaatgttgacctcaacagcggagccttatttacgatcagaatcaccacgtgtaaataattagtgcaagtaaataaaatagacacaataattttatagaggttcgttcccctttgataacaggtaatgacctactccccttttagttgtattaactcgagagataataccactcagatcacaagcttttactttgtgatttctagagtggctctctataaattataatttagagaacaatgctaggcagatctcaattgagtgagataagaaagacttagtctctattacaaagcagatggcgtgtaaaagagagagagctagagttttgtgagctagaactcaagagcttaaggattagaatttaggtttttggtttagcctagtactttttatatagatgagagcttatagaagatctaacccaaaataggttaatatcccttaaaatgaggagatatcacctcctttttcatatattaaatatacagaaaataaccaataaattattcctagagaataggtaaataattgaagttgaacccctagttttgtaggttgttagagtgaattcgtagctaagagtgaaccactgtctgtccagggtgaaagctgcagaaacaccacttgtgtttgccagaatagaagctgattggcctgccatttgctggaggctggtcgacatgccactttatggccggccaggggtggtctagcccgccctcctggttggccattttgttgtgtctttgtcctgcttgaccatttgaactcttcgttaattggtaagttgtgcatgatgacttggtcctcctattgacagattgactggttgtactccacgtgacatcaattttatttatgtgaacatatcgagtaaaaatgtaaaaattgagataacaacaagaattgggttatataataaggtcatggatgacacatgttcttgtcaaacatcgttgaacttttatatacatatatataatagtaattatcgtactccttgacatttatatttcttaatcctaagcttgaagtaaccattacattattaaattatatgcatgtttgacttttctaaattatattaaattaaagaaagtaattgtccatcttaataaaactctgaagacaagtgttgtgttgttgggtcgagaggctaaaattaaaggtggtgcacgagctttgatgaccgagtgactgacacatgctgtgtgacttgataaaccatttcagtggcatatactaacattatatttgattaaactaatgtaaaaaggaaattgcgatttggtacctctatatatatacccaataatacataataaaataacattatagattacgagtagttagtaattttaaacattatttattatgtgtgaactacggatattccttagcagaaaaaagaatgattagtaatggtgtatttattttgggcttggtagccaccccaaggtgaggattcaccccagtgtacctcttttcttttatatgtttaattatactagctgtcttccgttaccatgcatgatgtatctactttatctttttgggagttattccacttcttctttattacaaaggtatctaaaaatgtcatataaatttaagtatcttcactaataaacatactacaagaaaaaccgcagtatattaactttgtcggtgaaaggtggtcagattaatattccatcaaataacacttatgccgacaactaacctacttttgccaacaaagtaccttagtttggctaacaaaagatagtaaaccaaccgccaaaggtagaaatttttagcagtttaattccacttttacaaacaaaactataagtgcgctgataaaagtgaattaattattggcaatttaattttacttttaccggtaaataaatgcaccgaccaaagtagtgaaaattttggtagtttctttttcgcacagtaaagatgtgcacagaaaattaggtgaaaatttttgccggcgagtttaagtgcgttggaaaaagtttttacaattaatgaaacattgcgttttattttttcatttagggtaaacttttgctggcaagctgaagtgcaccggcaaaagtatttttcaactttaacttttgctggcgcgcctaaatgcactagcaaaagttgaagctcaataaaatccaataccgaaccccctttccccatttctttctctttctcttcttcttctcaattttcaccactattttcggctcccaccaccatcatctccttctctctctctctcacccattttcctcaatctctctatcctatctccctcaactcaattttttttttttctgaaaaataaagaattgaagcgtaactccgacgacgtactaccgaccgtacctctggccaccgctgtttgagcctccgagtccactactagaattctcgttttcagtcaatgtaacctctaatttttatttgtgtataaatttgggtttaattttgtgtatattgagtgtatatagttagaatatttatgtatatgtatgtgtgtatattagaacatgtgtgtattttgtatatacatatatatgtatctaaatatatatgcttatgtatgtatatatatgtgtacgtatatacgtataagtgtatgtatataaatatgtgtgtatgtatatatgtatatgtatatgtatgtatatatacgtgtgtatgtatatataagtgtatgcatatatatgtatgtgtgtatatttgtatatgtatatatatttttgtgtatacatatgtgtatacatgtatatgcatacataagtatagaattatagttattatttttattttttttacttttttggtaaataaattttcgatgtcgctttatttattgtttaaaaaaatttattccttgttatatttgaaggttagtatacttttataatatgttaataaaaaaaatattttaatactatattcactaaatccaaagctttagtatacttgctcatacacgatagaacaaagttgttctacaatttattttcaagtatacaaagcaatagatttacttaaaaaaatacttattaatagagtttgaatatcttatacattcattaatagtaaagtaggttttgtaaaacatatactgcggtagaaaatattattgtatttgtgtagtttttttgtagatattgaaaatttaggaatgatcaattttaagttgatacgttgccgaactttcggtagcataacattttagtttatactttaactaaaaaatttgaaaaaaaattggtaacttggttacattttagtttagactttaattaaaaaaaattaaaaagaaattggtaaattggtaacatggtgtagactttaattaaaaagaaattaaatttgaaataaaattaatggtgaaactataacaaattggtaactttaaaatgataaaaaaaagtaatttgaataagttggtaactaatattaaaaattaaattattaatgttaactaattggaaactttggaatgatacttaatttcaacaaattggaaacttgaaatgataaataatattgttaatttaaactaattagaaactttaaaatgatctataaggattgttaattttaagaaattagaaacatgaaaaattaaaataaggattactaattttaagaaattacaaattttaaattgagaaaataatttttaatttaaacaataagttaaaaatattgaataataattttatttaatttttaaaaaaattgaaaatatttttacttagtaataaggttatattaatactattcataattttgaaattgacaataaaaatttataggtggtaaaataaaatagcataagacattgtaagatagcataaaataaaattcttatctttatttgatctctttggatataaactaaagataaaatataacaattgtgtttgtattatcacctagtgataatttttttttacgcgcataatttttcttagacccgtttggagaggctgagtcagtaaggactcttaaatacgcttctccaaattatccaggacctttttgcacaatctctagcctgcatgtaactagctcaggctagagagttgcactgcctccagctggagctttaggtcgtacaaacagttgaagagcagcatgttttttttgctgatgagaaactttatctcgtctggcaactgattacactcattagtgtcatgatcgtaattgttgtggttatgataaaatctattcatgtccctcttccctaaatctttgaagggaaaaggtttgtgatatgacatttgttgactgtgtggtcatatagatctcctctcttggggctaagagaatggagtaggtggtaaaacaaggctcatacttttttaagatcctgaccctagtcttgagcttctttcaaccaagggaggtgcctggcttaccaccattgttggctctcttacctctgttggttcctcctttctttcaattgtcctatgcctcagtgtcaggggatggggagtttggtgacttcttcttgccaacctatgagaccttggcccgggtgacagcttcttctagtttgataaatccatctgctatatctaagaagtcattcgtggtgtataccgctctgggacgaatgctggaccacaaaggactcatctaactaagtctggttgcaagtgccattatccttgtgtcctcactaagacttttggtcttagcagcaacctctatgaactattggatgtagtcattaaggggctcatcttcctgctgcttgatatctaccaaatcattgggttcgatttggcattgttgagaaggagtgaattggttgccaaaagcatccactagatctttccatgagtcgatcgatccaggagagagcttaaggtaccaccgttgagataggcatgttagtatggcagggaagattctgcacttgacatcatctctcaaacctttcagactagtctacacttcgaagtagtgaatgtgagacaattgacattctcttttggtgtactgatgccaagaagggctcttaaacttcagagggataggaagggcttcactaaggttgtgaaggttttgaattttgctcggttgaccccatgggtggtggtctgtgtcctagttggagcttctattacctaagtagggtctcctttagaagttcccgcttccaccgaccgtctcttggtcaagagggcacgtaggtctcttggtcttccaagtcaaccatctgctccagttagcttgggtcttgctgttgtctcctcaccacggggatgtgaaggaaattctggtgatgtctccgagacaaactctgcatcatcttgggatgatcttctatgggtgtgatgatctagagtgttatagtggctacttccctcaaagtaatcttcattcgaatcacaagtttaaagagaattgaattggttgctcaagttcaactcctgtccatgtactcgaggaaagtactcatactgtcgaccataggggccacggggcaaagtaacgacacaactcacccctttcatcttggaagtactttcgagtgtgaagtggttcattggtccttacccctttcatcttggaagtacacatcactatttctagggtctcaagaatgtggctttctcctcgagtttgcttgaatcttcattatttttatgatggaaaaaatgctcggaacacttttttgagaacttggttggaaacagtccaggttgacaatatatcaacttgggcgctgagcctagtgccaagtgtcaacctaggcactatgtcccagttttggcccttcggaagttctatttggtctgtaaaaatagttgaatcttaatatttgctgaaaacggagaagatgctcagaagagttcttgggaaacatcatcagaattggcctaggttgacaaaatgtcaacatgggtgctaggtcagccctcggtgtcaacttgggcgctgtgccttggttctagcacccaagaaatattatttcttccctgaaagtacctattctcctattttcaatgaagatgaagaagatgaaaaagtcagattgttgatctgatacttggaaggcccctagattgacaaattatcaacctgggcgctaggtgcccgggcaccgggtgctctgggtgttcaaaaatgaacttacttcgaatttgattctgatgcctcaaatatgtctatggtatatctagttaatgttccaatgaaaagcttaacccatttgcactaagacggtcccgaaaactaaaaccgtagttgggaatatcaacctaggttttaggtgaaaccctaaaagtccccaggttggcttccagggtgcaagctgatataatttcagctcttggggcttagatttgattatttcatgtcttcataatatagaatactgaaaagtagttagttcgattcaagttattgctgtctgaacttctatcccaaaactctcgaagtcaacctgcatgtagagttagggtttcctcctaaaaaactgctatgacccgactgctttagtatttgaatcacggctaattagcaatttttcccccgaactttgaca

SEQ ID NO: 114305 - DNA, 1013 bp, Cannabis sativa
tggttgttgtcgctatggttggttgtttgattatttccttttattctatattgaataaaagggttcttattaccaaaattttagtataagatatttggctcatagtcattaatagatgtaatttgtcatatgttcatttagattaaatatttaccatttttcgtgcttctttgatacttcaatattaatggtttatttgaatttttgttgaatgtactattagggtttttattccattttttattctcctttttgagtgaaatgtcatcatgtaatagattattgtctcatatgcttattaagagaaattttcatttccatttctctctaataaaaaccatttatttagttaccttcatgcttctaagccaaaaataaaaaccatttcatttgtattatgcctacagtttccacataatttagttctaattcttgtagccttacgttttacggagaatggtatcaacatccctaataaattatagagtaaccaattactcagcttgaacataataaagtaactagttatccattgaaattgaataggaaatatagtagggattttaaaacaccataaataaacaaaagcacaagcataacaccaataaaataaataacacaaagaaagaaaaaaaaaagaacacgcaaaaaaaaaaatctagttaaacaacctcaactataatatatacaaagtaaactaattaagtaacaagttacttactccagaaaaacaattatcttatgtttattcagtacaagataatttaatattcattaactattattaaaaatttcattaaaatacattgatcaattacaaatatatatatatataaaattctattaggactaaatttctaaattttattaactattttatcaaaatagcaccactaattaacacatcattgttgtcaatattatctttatatattaaaagtggctatctaacggcatttcttggtttaacagaatatactttataaatagaagaatattctgttaaatttaac

SEQ ID NO: 114306 - DNA, 4492 bp, Cannabis sativa
ccccattccctttctggacatagggcttgatgtgggggctaactactgagtacattcttgctttttagatgaatgaggttttgagagatctacacgcgcatggcttctacgcattcgaccaagagatcctcacactttactctgagaaaaaaatgttgaatcatgaggccccttccaattcttcagcttaagacacaatatagcttccccatgtcgtccccctgtcagttgtaatttagggttcggtctcgattcacaattatgttcaccgagctaccagatgggaggctgatgacctgcatttaactttggggtgtgctcatcagttggaaaagattgttgaagagaacaggatcataccctgagaacctggggttttccatcgtctagctcgagaatctaagacccctaatcataattttgaagggttcagggcttcgagtcaaacacacctcatgtctggggcgatcttaccactccaaaactattttattaatttcttattcttcttaggattatctccttaccaacatattccccaaggctatcgtctattattgggccttttcattttttatggtttaaggggctggagtgcccctagcccggcagaaatattatatttttatgaacttgaatctattccaaaaaagggagataaactcaaagatggcttctactccatacaacctcatccaactaatgagacttcggtcccgtttaacttccaaaagaaggtcaaggactgccatcttcagtttttcttctcttttagtttcagagattttgagcgtccaaacctattgactgagtggacccagattcctcctttgttgcagatggcccctactcaacgtttccttaaccatgtcactacctttcctttgcttagcagggacgagcttaatgtttaagatctgatgaccacgtttaactgtcagagaagtcagcttctataaggctaccaattggttaagggcaataacttgtccagggtcaattgctccaatgccaaaaatagggatgatgagaggttgctcaaatccaaaaggatatcaataagagggacaccacaaaattctgccgctttcacaaagatttggtcatgatactaatgaatgcaacaacttgaaggaggaaattgagttccttatttgaagaaacaatcgtcatctgaatcgatacatgaagacaaatcaaaattaaagagttccctaacaaaacaatgaccagaatttcctaatgccaccacctgtggatgggaatttacaagtaactattggaggaccccacattgttggagatacaagaaaggattgagaaaggtatgcgtgcacactctagtatgataaaaatgaagaagtattggtagtagaggaaagaactcccaaatagttgcatggggatgatatcgttgtattgtttggtgatgaagacaccactcatgttaattaccaacataacaaccccctagtcgacgaagtacaaatagcaaacatgacagtggcatgacccatgatagaaatggagcctcatcaaacataatgttcaactctacttatgagaaaatgggcctccacctcaaggatctagctctttgtgcacaaattatttgtggtttctcaggccataacatttcacctctaggagtcacctgtcttcgtcttactttagggaaggcttctaccaatagcacggttatggcatagttctccattattgatatgtcattagccttcaacatcatgatcggtcgaccaacactgtatggattaaaggcagtaacataaatatatcacctctgtatgaagtttcctaccatcaatggggtagggtgcacaaaaagggatccatggatagcccgcaaatgctacaacatcgtgctaacaaaggcaaagaaagaagatcagttcgaccacaactccaaggcctaacaaattgagaataaataaggatccgcctaaggtagggacaatgagatggatcctcgctttggggaccttaacacatgaattaggccagtagaagaattagagaaagtagatagatccaactacgtcgacccatataatcaaaataggtagaggtttgttgcaagaaataaaatttgccttaattacatttctaagggtaaaccccaatgtattcacatggtcacatgatgatatgattagaataagtacatctgtaatttgccataccatgaacataaacacccataatttccatctagtacaacaaaagcagagattgctggataaagaaagagcacgagcactcgaagaggaagtagaaaagattcaagctaacaagttcatcatagaagtattctatcctatttgcgtgtccaacctagtgctagttccaaagcccaattgcaaatggtgagtttgtatagacttcactgacctcaacaaggggtgcccaaggaatgcttcctaattctaaggatcgaccaactagtagatgttagacatgagatgttaagcttcatggatgaatactgcgggtacaatcagatcaaaatgcatccattagcacaacagcacataagcttccaaatggatgttggtttgtactgctacatagttatgtcatttggtttaaaatataccagagcaatttaccaacatttggtcaaccaaatgttcaaggaccaaacataggatggatagatatacatagatgacatactcgtcaaatctaaaagggctgggggcatatagaggacctagatgagtgtttcaagatacttcagaagtacaacatgaagctcaaccctctcaagtgttcatttagggtaggctctggtaagttcttaggctacattgtcaatgcctggggaattgaagccaacccagaaaagatacaagcccttttagatatgaagtcaccaataaggatcaaagaagtagaaatcttgattggtcagatagcggccctcaacaggtttgtgtcaaatagccaaatgagtgtgttcctttcttaaatatccttccaggaaacaagaaatttgaatggaccgaggagtgtgatgaagattttaaagagctaaagaaaagacttgcacaaccttccatcttataaaacctttagatgaagaagaattaggaatatacctagcaataaccaaattcgctgtaaagactgctaaattttaatacaatgaattattagatatttaggttctatttataaaattaaattatcaaccatgatttatgaatttattgagatttatttggattcaaaatgtgctaaatatgttatgtaagaaatttcttgttttttgtacttgtgctcagtagtagtaaaatgcgacgttgggccattagagagtcacgttttcatatgattaagaattgtattagtagtagggcaacatggttagacattgaagtgtcgggatatagtcagggtttagaaatgaccaaattacccttagatgtcattaaattgttggtgtatgttaaggggcatattagtctttttaatatgggacttttgtcttttgtggacattaatattcagattttataaaacaaaatttgataaattgatattaattatacacaaccttagaaaaacctaaaactctctttacaactctctctctttcgaatcaccaagaaccaacaagaagggaaggttttttagctgcaatccaagggattttagcaagagttaggtgtttcaatctaatgtataccctctagcacatctattctttgttttttaagttctagtttgagttgttgcattaaatttgggtattagggtgttatagtgttaattgatgcttgaactcgtgttctgaagttagattgaggctatttaagttaaattgtgttagaattgttagttgtggtgatgcttgagcaaggttagaggttaagaactcaaacttcgctctctaatagtgtttttgatttctgaaataaatgttatgttgtattgcttgaattgagtctactatggtatgtatagatattctagaggttattagcaaatttggggttgatttgaggtgttgggagtggttttggggttttctacactgaatttattgattggtttagggagactagtaggaaccggaattctggttggtccctaggaaaccccactgaagcggaattctagttggggaactggtctactggttggggcaattttgtgaaccctagttttttccttttttgcaatgtttagggtcttgccatgttatccatcgatagaaaaagttccaattttgattataattccctgaataatcatgttagcgtgtctctcattagattttcaaatattatgatttaaggccctgtaaagcgtcgaactgttgttccactcaggctgatcggcacacctcaacacagaaacaaggtaatattactagagatggaaatttataccgcaaggatgggtaaccgtggggacccgcctctaatggggtggggattccccatcttggtggttaatggggcggtgg

SEQ ID NO: 114307 - DNA, 1837 bp, Cannabis sativa
ggaatgccagctcatttcctacagacacgaattcgaagttattattactagtacattatgtacacgaattaagatctcctccttaattaaattaattaaaatttgacacattaattaattttttatttataaaaaaattaaagagaaatgctaaagggcacggtgtctagcatcctcctatgtataaatatcattattagtccaactaactatcgggtcctatatattttaatatatataatagtttttagaaaatatcgctagccaatcacagtacgcgacatgtcgagaaggtgttagacaccacttgtgcctaatagcaatgctcaaaattaaaccactaataatgtcaacaatagtagttaacataatatttaatataattaaattagttgatgtttaacacagtataaagacacaaatttttaacaggagaattcaagatatgtacaccaccaattaatatgttaggtatttaattaattctatgtgataaaatatgttaaacaatgtataatatcaaaataaaaacaataaatattggaaggtagctagctgtttttataaaacacaatccaccaagcctttgtacaagcaattcacaatcacaacccacacttagtaacaaaatctggtttagctgacacatacaagtactcttccaacacacaactaattaattcccaaaatcaaactcatcaaattccttaatttaatctgttaggaggcgatctgtacatgaaggtatcgttttagctaaataacaagtgataacgtacaatcacaaaaagcttcatttagccctctatacgaaccactataaatatcataacttggctccatttaattagaagaaaaaaattaaccaccataaataatatattatggctcttaaagtaatatcgttggtaatcctggccgtacagttaataacaccaattttggccaaaccaaacctcatcccgtcggatgaatcaaagctagacgattggattgatcacaacatgaaagcctacgagaaagacaagagaaatgttagtgagacaataaataataaggtcacccttgacaaggtactaacggctgcggagaatgccgttaagattgtcaaggtcaggaaagatggcatgggtgacttcaagacaatcacagacgccgttaaaagtattccatcagggaacactgggagggtgatagtgtggattggaggtggggtttaccgtgagcgtataacggtagataggtccaaatcatttgtgactttttacggagatgaggataatgtgccagtaatcacgtttgatggcactgcacaaaagtttgggacttggaatagtgccacagttgcggttgagtctcactactttgttgctgctaatattgcttttgtggtacgtggattaatgatattatcaatctttatttaatcaatcatattatttatttgatgacaattatttcgaaaagtaattaaaacataccgttaatgttttaggtgcatgcagtttttctgtttttagataaaagaactgcaagattaataggacacaacacatacggaattcatgactaagcatatgtgagtgttcttgcatatgcttagtcatcaagtaatcatcatcatgatatgtatatatatatctatatagggacacgattttatcacgactttcacggaatgtatttaatagtacattagatgagtcgcaggatatattagatggatctcaggttacgttaccattttttaaccttaattatcctagatcaaccacagccctcagatcaaataactcctctatctaacggttgttgtacattacagaatacattccgt

SEQ ID NO: 114308 - DNA, 4845 bp, Cannabis sativa
aatggactttgaaggttcttggaacaagtaccatcttttagttaagttttcatataataatatttatcaaagtactattggtatggcaccgtatgaaatgctatatagaacaaagtctcgttcacccattcattgggataaagttggtgaatagagataccttggactcgacgcagtcgaaagaactagtgaggccattgaaaagattatagctcatatgcttgccacacaaagtagacataaaagctatgctgatccaaagcatagagatattgagttccaggttggggacttcatcttccttcgagtatcaccaatgaaagggatttggagatttggaaagaaagtaaaactaagtcccagatttattggtccgttcgagatactggaaagggtaggtcaggtagcctatcagctagctttatcccctgctttatttagagttcacaatatgttccatatttccagaagtatatgtctaatatgacccatattatgagttacgaggacatttaacttcaaacggacttatcctacgaggaacagccaattcagatcttggataggaaggagaaaatattgcaaaacaagactattctgctagttaaagtgttgtggagaaacaaggttgaagaagcaacttgggagttagagtcgtagttgcaggagcagtatcccgagttattcaggtaaattttgaggacaaaattcctgtaagagagggatagttgtaatattctgaaaattataattacatttaatggtacatattttattaaatatgtagttatatgaatattaaagtaggattataatcttacttaagccaatcatgagttaattagtgatcttcgagtaaatgaataattaagcgtaatttataaattacgaagattttattggaacatgtgggtattatatatattgtttttgaaataaaatatttttggatttgccaatagtgaaaactcgatggattggtgaaagatgtcacaatgtcaaaagaatgagatatattagaattgtattatacaagtttagaatgttgagttgttggtttaattgggatagttgatttaacaaaaatacaactaagttatattttagcttaagtgttattggaggggtaaaatagtcattttattgtattttagttttttttgtcctatttggtttttctagtaactattaggctgaaatgagtttagttttaaacttaaattaaatgttttagttatttgaagataaaatcaaaattaagaaaaagaaaacattgcatatcattttctctttctttccttcccttcgaagccctaagagtccagctgaaaccagggaattttcttctgaattcaaccatttctcagttgaattaatcaagtctaggagctgttcaagctttgaggtaagttctctatctagttcttcttgatttttagggtcttaggctaagttttcttttggattttgctttaattcggagctgtaggtttaattgagttcagagtatgatttttaagtttaattcaaagttgtttgagtgtgaatttgatgattctatggctgttaggttttgaattgagcgagttgagttcaagaactcaaatctcactcaactatggtggatttgtatttttagtgtaattcagagttttgaatgtttgagtatgtttttttatattgttggattgttctggaatgtttcattaggtttggaggagctttgggtgggcctttttgtaatgttgttttgatgcaaaaataagggctttcccatttccggttaaacgattctacagggcactatggaaccggacagttggttgactagcaagggatccctaattttctaaaactggttatccgtttggggtgtttttccataacttagttttggatattttatcgatgtttaggctatttctaagccaatattgattagggtttgtctagttttaagtttagggccaattttgggatttggttaagttatttatcaagtttttattgtcgtgatataggatctgagatcgtcgagtgttattcaactcaggtcggcccgcacacctgattttggatttgaggtaagaaaagtcatttgcactacttaacatgacaaataagatatgattattattgtttgtgactcgattatgatcgaggtaaagatacggtaattactgttgcaaggaatgagttattactcacttttgaaaccgttgataggtttctcacttattaattgcttaatcaagcaacgctagtgacatatataacttgttggtaatgaggaatatggatgctttataaagcatcgaggttaatttgtcttataaggtaaataaattaatcgttaacatttgattacactttgaatgtttatttatactatatgatgcattgtttgttgtgcattattaaaatattatgttgtatgtgatgtttgtgatttacttgcttttcttgttgagtctttgtgactcacgggtgctctgtggtgtaggtaagggaaaggaaaaattggaccagccataagtcagaggtctcctcgcaatgttggtcctcactggacaggatcttccttttgttgtgttttgaaaatgtaacagtattttgtaataagttattttgtaatattttgtaaaagttaaggggatccttaaatctagtggtattttgaatgaaaagttaggttataatttaaataattttactaaagttttagttaaaccacacttttcttaaacagctagtttattattataaactatttataaaagcacaaatgtggcgcccttacggttcaggatgttacactttctaccaggacacaacacttctgatttgtatgacttgcgatttgatagtttcctccagcaatattcaccaacacagcctcaaggtagtacaacttgttcaaggccgcaacaacaactattttagcaggctcaataattctctcctaccatgcatggaagtccctcctaatcccctctaattctgaacatgtttggacgctcctcccagtctcctcaacttttctacgttgatttgtttggaggatcacagtcacaacaactaatgtttggtcaatttgggagctcatcttagcagttgataatgtttatgggttcactgcagcaactttctcaaggccagtttttcagtccacaaaatcaatattttttttcccagtcagctttaacaacaatctctgaattttttataatagcaataatctctaactctgccacaacaaccacagactcaacaagttattaagttattatctttccagcaaccatattacccttcactgccattaacgtaagctcaggacaatgcacaaacaacccatttaaacttgaacaccaacggtttagaatttttagataatgtacttgatgaagacaataataattagtttaagtttttaattatgtgtgtgttgacctcgcttttggtcaatgacgctgagtctctaaagcaacaacatatttataagtttcaagaaatgtaaacgacatatcataaaataaagaacaccagatgttatagaggttcagcccaatgttttggtaatggcctactctcgttattattgtatttaacttgtgagaagagaagaaaaaggattgctctctctcaaaagttttacaggaaattgaacagcgtataggctcactcaaagaaatgatttcagattccttttcagtagagctgatctactatttatagaggatgtttatgatgggattaaacttcctcgagttgtcatcccactaatttagggaaccaactcctcttcataaaattaaggatgtataatcatgattctcttttgactgggcattaaatacatattcaaactaagattattgtcaattgcatctacgacacgcgtcttccctcaagttagcttgtatgagattcatttcctctgaccaggtgtgtgcgtcttgaaactgtgcagcgcattacgtttgactcggttgatatccctcctgattggaaaacaccttaggcggctgacttttgagatcttttatccgcctaggccccatggcagagatacgtgtcacccaaaggaacctaccaagtcacacgactaacttttgggataatatttaccccaagtctatgtgggaacctcttggttggtgcgaggacttgtttggcttacggtccagatgagtgaagtgggttagtaaggtgacacgtggtgatctcggtaatcatgaaatcctaggttttcttttcaggcctcttcaatcacgtggggcatttgatgcttcaatttaaaggtttcgtgctcttggtaattgcactaatggttgtactcctatagtgtactcattaccactttttgagggaaaatggaaatttagtttggacgcccaaattaccatcgtgcccctaggaagatttataaaagtagagtaaaaatttcatttgtcacttttcacctttcaaagaaccagagagctctctttgaattttcaagcatcgtgttttgacaatttccaagcgttctactctgagaacttcgtgaccatcttcccaatgagtaagtatcttgaatacgttttacctctttttccttgcatttgaagttttgcactttttttcttttttgcaaaattttgggcttgatgtatgagtgttcttcactgtttgaacaaatgcttaagtttatgatgatttaaaacgatgaacatatctatgtagggtgaatttgtggaagtaggggtgagcaacggtcggtttggtcagttttttacacaaaaaaatccaaaattcagttttcaattttcatggttataatccaaaaaccgaccgaccatt

SEQ ID NO: 114309 - DNA, 4137 bp, Cannabis sativa
aggaaaaaccatgtttacaaaacaatcataagacaaaaagataatagaacataaatacacataatccttatttgtagctgcctatattttgttaatctaaataagactccattctctagtcaaatcttgaaatgctagcccctcgaacccttttgtcttaaataaccaggtggccacccagaatttaatctttccccaaaccacttcagccccattttcaactccttcacatatcttatcttcccatttctttccatccatatactcgaaaaaactgccaatattgctgctgtctacagttgtgtcattcttctcccacctttcaggttgcacatgattagctggctacatgtctgatgcatataccatttaatctcgaattcacacaatattctagcccacaagctattactaaagggacattccataaacaaataagacgaagtttcaccatgttttctgcagcagactcactaacccagagagagtacctgataagctcttttcctttgtctctatttgaaaatgagctcccccttcccaaaagaatctcctcaacaatctctcaatagtttcaatgattaaggctagcgccttgaataatggcaaatatttgataggtagagaagaaagagcaaactaaatgtagtctaactccccttgacagatgtgcacatttccatcatgccattcttttagacacctttgccaccaccggatcgcaaagtataatttcttgtttctttttttttttttagaaaaaaaaaaaagaaagaaacagagattatatgtcttagattgacctcctctcaaatttattagggtgtctcacttttgtggaggaaaaccgtggtaacagaaaggcaaccctaagtatttcatagttcaagagttaacttcacatccagcttcttcttctctatcagccacccactcatcattaaaattaagtcctaccaattggcttttgaggcatttgattcttaaccgtgaaaccatgcaaaaggtcttcaaaactttcatcaagtgagaaatattttggtccttcacctcaagaaggaatatagtatcatccatgaattgcaaatgtgtcaactaaacctatatcatcttccctactttgaagcttctcaccacagttgagtttttgctgtatctaccaatctccccaacacatcccctgcgatggtgaaaaggaaaggcgacaaaggaacaccttgcctcaaacctctagaacattaactttcctttaggttgtccaataagaaatatcgagtaagaggctgagcacacatccttttatccattttctccacaaacttccaaaatctttctccattccaacacaaagtcaaggaagtcccattccaccaaactaacagttctatgagctcataacagagaatgcttatctttttagggtgtagggagtgctggtattaaatttttaatcaaatttatgtcttataggaacttgatgttgaaagttaaacttgatctactattgcttatattttggttcgagtttttaatctggtttcttgatgggatgtttgtaaaaaagtagcgctgagttaaataatagccttcctggctatcttactttctaaattgctcatttgatcttgtctcttaatgtatgtaggagagcttttgtgttttctttatatgacttgctaccattctacttggttaatctggaatggtatctgaatgagattcaacatttcaggttcatgaaaatgcatacatcagcgattttcatcactgtttctccacgacatcaaagtcttcaggtgggatatcttatatttctctagaagtaagtttaagtatgttgaaataacaacaaatcttgtatgactgctaaaaggtatcttaggcactaaagcaccatatatatatgcaagaagccccaatgttatactcttttggttacatcattcttagcttttgatttgttactttctattgcttatgtctgcatgcacaattatattttcgaacacatgtttctcattggatccaaaatagacaagacttaatttttattcttgtggatttatgttgataggggcaaattctacaatgctagaagccagacttaatggcattgatgttgttgttggaaggtggggaatcctggtgattatttgtgtttctcaattctagtaatcaatgtgaagctgtagatttttcctggaattctcatttcatgttttgttgacaggcaaggtgagtcatgtgattcagtttgcaagtcaaatggacaatcatgtgttccaaataagcttttggtgcttaatcaatgtgacatgtaagctgattattactatcactctttaggttcagatacaattgttttacatgtgatgtgttaggtttatggtcataattagaaatggggagcttgaacacatagataacctgttttgataaataaacttttcctgagcagtatgcagaaatacatgcgatgcaaaggagcttgtttgtcaagcatgggatccgatcaacctgctgaagttgttgataatgcccctaaacatttggtaatactttttcactatttatttattatctcggggctatttaatattgtagtaatctattttcatgataaaacatactttcaataattgaatttccatatataagtgtcaacttgcttccaaaatggggttctttggataaatgatgaggaaagagtattaataaattattttatattcatagcccttgatggattatgcaattgatgttccactgaacatcatgaaaatgcatgcttgttcaacaccaactttgatattttcactaccttaaatgttattgttttaccacctgcagatctccattttttcattgttccatcactttttaaatcaatagacaaattgagttgtgaactttcgatgctatatattatgttttatatttgccagaatcctggagcatgtttgtacacccggacgcagtccatgctttcatgtgatggttctcatcagcataccaggaggttgtgcccttgtgcatagtgtgcatttaattggtgagtaggactgtccatcatatgtatgtggatctacagttacacatgaagatattctaatgcatttaatcattggcagattcatgtatgttcatattggctgctgtctgcagtttttctaatgctgtttgtgaaggtattgaatgtttcgaaaagttttgaaggcccccacaactagatgaaattgagaatcacactattgtccagtggtcaagttttgaaatttcattccatgcatacgtttaaatatttttggttagtcggaaacaaaacacaatggttatttcaggcactatactccagagattataatctttgctttgtaatttcaaccaaaaaaaagttggcaatcttgacggaaattctgtatatactaggaaacatcagtaccactcttgggcatttcttatgaatgatgttaataatcgtaactgatggaatttgtgtatcatttccttctaatagcaacttctattgataaatttttaaccaaaatgggtgggatcagatttcctcatttatcatcatccctttgttaggctttcatgatgtgctttctagcttattaaactactagacaattctgtagatgaaatttattgttaataagaagataaaatagattattaaaaaattgtagaaaaggatgaaagatgggatttttggaaataatatctattttaagttatggtgttcagtttatttttagactggtaatgggaaattggaatgagtggcatattgataaaaattttctttaatttctttccttttggtaaaggtgtataaaagaaggatataaggttcatttgtaatagtgattacacaggcataaagttgtaatatttattcttaaactgtgtaatgataattacattgtaaagatattataaagttttcaaaatcaaactaaacattagagttgtaacaatgattttagagtaaatagaggcaaaatttctaaactttcttctcgttatcaatcaactctcaaaatttattttttgggggtaagatttccaaaattcgcgttagtaatttaatatttttatttatttttggatgttaagtgtttggactgtcta

SEQ ID NO: 114310 - DNA, 1422 bp, Cannabis sativa
acaacaagtattgtgactaaaaatacattttctcacaataaattgtaatatttgtgactaatacttttagctacaaattttttagtcacaacataggaatttgtttaaaagcttagaaatttgtttaagaaaataggttagggagatataattttcatgaataatctttcttagaataaaaaaatgaaaatagataatacatattttatgtattgtatatagtttatatatgtgtattttgtattatatatgtatacatattattattggaaaaaatatatatttataggtaattgatagtctttatttttttttttttgaaagagaacctcggttcataaattaagcaagaaacctaggattgacaggagaaatccctccccaatacaccaagagttattctggcttagacagccaaattgtttacagaactcaagttgtctctcttaataatgaagcagaatttgtaggaacaccgatacaaacctccaatatggaattttctttttcttaagagcttcgatagccaccgtacagttggaaacaagcaccactgcctcccaattcttcttaaccgcccacgaaactaccaacaaaattgctctcaactcagcatccagacccgaaatccccattgagcaatggctcacactttcccactttagattccttttgtgaattgctaccactaccataccgcaccatgaaaccttaaaatcatccttcaccaagattttttagttaggggacacaccaaaatcaagcaccaacccctgatctattttatcacctgacccagcttacaaactccaagaattttttgcaaatatcctcttgaagccaacataatctttttgactcccaccacgtagtaaagagtttctataacccaaatggtgtcacacacactagcaaaatagaccaatagcataagaagttgatcacccacaagaccttgccccaccaagattaacacatctaacaaatcacttccttctatttcattagttttcagtggtaaaggggcaccgaaccagagagcttttgatagagcatttcaaataaaaggtgaaaggggttctcactcgcatgatcacaaaacagacagcttctcactacaagaaatatcacttttaccagcacagttcgctactccgctagtaaaagtaacttttactagcgcattttcgcaaactgggctgacaaagaggtcaaagttttaccagcgtacatttacaatggctaaaatctaacttttaccagcgcttattgcgctggaaaaagtcattttttctagcgcttttcattttacgctggcaaaatttttaataccaacattgatttgccaactcccttttgccaacacatcacaagtaaattctattttaccagcgcaataccaacttttgctagcacaaaaat

SEQ ID NO: 114311 - DNA, 3081 bp, Cannabis sativa
tgtggcttacgacagtacgcatcgaatatttttaaattgaacataaaatgttgcaaaaacaacacacaaaaaacctttacattaacatgaaaaaaactattttattctatttaaatactgtgtggtttgtttagttgcttttaagtttttgtatttcttttcttgaaaattataaaaatgaaaaattgatcatactattgttgatgataaattaatattctctttatttttttatcttttccttttgtaacaacacactgtattttttgtagagtaataaccttaatttttattttattttagaatgttaatatttttaaaattatacaatttctgtcaattttattagtagcatcaacactatgacaaccccatgataatcaacacaaaaagacatttcaataaacaaaatttaaaattaatattcccatttttaatttcttttccctaaataagagcaaattttatacctctttaaaatatcaaataccaaccatatcacaactttgactgaacatcaacaatattcaaaaacaactacacatcaacaagttttttttaatcgaaactacacatatcaacaataacttgtaaatatttgcactttttaataatgatcttgataattacaactccaaaacaacactacatatacatgtacagttaactaaatatatattatgtattgcaaatagagctttgcaaagtacttcctgtatttcatcccccattctggctttaaaatattgcaccaaacacctattagtaaatgcctaaatgaataaataaacccatgaaagatctttggaactaacgtatacatgagagtttttcatttccagtttagaagcattgctgcaagcatcgaagtgcccccaaaatttaaagacattctgaaaggtttcctgttcatgaagcataaacacgacctgacgaccaaatcgaattaaccctagtttccaaacaggtagaaaacaaacaagattaaaaaaatcatcatagctttcccaaaaaacataaaggaagtttgaagttggtcacacctcaagaactcgaagaaagtggtcccggaccatagagtcgaggtcgtgcatgcttgcaaaggccatgcaacgacctctgaaccaatagaaagatcccggcaccgtggagaagcacgttagtggtagagaaaatcgttgtagctatcgataatgtctggaatctggtagtgaaagagtagagtatctaaaatcccaaaatagatttctattgcatgtattgtatacatgttaaaaaaagtgtatgatcctataaatgtaaatatttgaccctatgatcaatatatatttggaaaaatccctatttacaatcatttttcttataatgtatatacaaatatatatatggaagagggattactactgagaggagccttctgactaagattagttttctaaggtttttgttttggctactttggtagcaggttgtatattggtgatctattaagaaagattatttcttctttatgatgaaaaaataataataatcaaatttgtgtgtcaacatttaaaaattccaaatattatataattaagcgttaatgaaggactttgctttgtagtctgtgagctataaaatagagaatgagagagaagaaaaagatattagtggaatatatgtcatgtaatgtaatatcatttacaaaatatacattttacaaaaagttaatggtgtcgcgaaattgttggagattcattggcagttattaaaaaggttcaaaaccaaaaattgtagacacagatatatatgtttgcattgttacattcactatttttaaacatgaccatgattcggtaaatatataggctcatatagtactaaccaaaacctaaaaatagatttcataacaagaaaataacacagtattgtgtggttttcaaattttgggtatgatcctagactggaaataaatctgaaaaattattagaattataaaatcacggttagatggatcatagaagtcaataactagtttagaaaaagaaaataataataataataataaagagagggggggttggatgagacaaaggaggagagtagagtacttgaataataattgttgattgagggtttttgacgagttcaaaaatggacaaaacaacaagaattagaagaattgagatggtgggtattgtgttgttgcttagttttggttggctaatttgttatgcagtgggtgaaaaattccacgatccggctcttataggcaaccttcgtcgcgtgcttgctgatagtaaatcagatggtgatagtaaatcatcagatggtgatagtaaatcatcagatggtaagagtccatcatcatcaggtgataataaagcaagcatcagacagatgctgagagagagtccatcatcatcaggtgatggtaaagcagcagatgctgagagtccatcatcatcaggtgatggtaaagcgtcagatgctgaggctccatcgggtgatgataaagcaccagctgctggtggtgcatcaggtggtgatgtttttgatgtcacaaaatatggtgctgtatctggtgaaaaaaataatgtgcaggtaatataaatatatatcaatctcatgcattgtaaacacttttaaaggaaaaaatgttaatttttcattcagtttatatctaaatttatataattaattctaaattaaaaatgaaaaaaaaaaattatagagaccctagaaaagttttgctagttctcaaatcttccaaacatggccttgaacccaaatagattacatgcattaaataagtcatcttttgttattggaatgaatatgaaagaattaaacatctatgttggaagagtagcagtgtgacttctgtgatacggtgagacgaggggtagctgcatgccccactcaatcaattttgtttcttttaaaaactattacatatttttatatatatttgtggtcgtaagcgtaatatctcctgaaaaaaatacatcctgaaaaaaatacatatttttatattttagtccatatgtgtatttttttttttttttttttttttatttttccctttttttttttttt

SEQ ID NO: 114312 - DNA, 2793 bp, Cannabis sativa
gagggacatcaataattgttggggtgatttgtttgttggacattcaacactcccaaatccacaaatagtgaaaattttgatgagtctgcgtcatgtacaatatcaatgtcaacatcattgatgtcatcggtggcatctgcaaccttgtcccaaagttggcgatgattcacatcttggacaacgttccaatttcgacctctaaccaaatcatcaacaaagaaaacttgcttcgcttgactagccaaaatgtatggctcatctttgtaccatacactactcacatttatatatgctagtgatgttattttcggtaattattttcttccttctgggatctgtgttgaaccatttacacttaaataatacaactgaataagcaccactaaaagacagatgaaaaatttctaaaagttcactgtaatagtcaaaaccttatgtccctttaacagacaaaccattattttgagtttttttcatctctttcgagtgtaacaacagcctgagaaattcatccatgtcctttcccagtgatctcgcaccaggaataagggtagtcaacatgaaattgttgtccttcatacacaaccacgatggaagattgtagattgccaacactacgggccacatgctgtacgcttgactcatgtttccaaatggattaaatccatcagcatctaattaaccctaagcgaacatttctaggatctttggcaaaatcaggatgcaagttgtcaaagttttgccacgctttcgcatctacatgatgacgcatgacatcatcttctctaactctcccagtatgatgccataccatctcttttgtagtatgtcttgaactatacattcttctcaaacatggagtcaacgaaaagtaacgcatcaccttttgtggtattttctttccctttgttgcttcattaatccatctactactcccacacactgatcataattctttggatgcattcttattataaaataagcaacaatcatgaacacacacatgaattgattgataccccaagcctaatctacttagctttttcttggcctcataatgtgatgtaggaatgttgttctcttttggaaagaaaaacttcaacagttttaatcattcgtcaaatatattgttcggaatttttccttgcacttttaaatgcatcaattttgctagaaaattgagtgacgacatccaatcacaaccggggtacaactcagcttcaatctccttaaacattttgttgtaatgatcactttgattttcttcatcaatagttgttgtctcttcgacaaccggctgaatctcttcaaaattgactaaatctcttcaaaatgtaaccctctgccgcctatcaacagtcaccatagccaccctctacaacccaaaaaagcgagagatgaaaatgatgaacaaaaaaatataatgctaaaatgaaaacaagcttaccaccactgagagggctaggctgcgtcgacggcgacagagaacggtggacgacgatggttggacttcaaggatttgggcgaagtggttatttgggctgagaaatagggtgtagactcgtagagagaaagctgagaaatggggtgtgagaaacaaatgaaataataaaggctgagctttttttaaaaaaattgagacagttggggctgacacgtgcgtgcccactgtcatgccctttaccatcaaatggcacgccatgtcagggcatgggttcgacgtggtcatgcccatctgtcctagagggaaattcctgcctattacaacgggtatttttcaaagataaattggtacgactttatcgtgtccattgggccacatgtcgcgcccacatacctccaaaattaaatatagggacacaactgtagtggtgtcgacccaaagtataccaaaaaatgggcaccactttaggtcgtgccctagttagacgtgccaatatcccattcttcttgttgtgttaagaccttccccacaagcgagttaggattcctcattatgcaccacacttgtttagccaaaagggctttgttataaacaacttaaggtctttgaaccccaatctccctttctccttaggtgcacataatttgtcccaaagatccccaatgagttttttattcttctttttagaagacccccatcagaaacggattgccataccatgaagctaatgaattgttttttttttttttggagtcgaaacaccctcatagtgtagccaggaatcgcctgaagaactgcttttaataagcacctctttgcctaccgccgagaatagacttctcttccaccctctaactttattccacactctttttttagtagcatcaaaaagctcacatttctttctaccaacaaaaattgggattccaagatacttatcaaaatactccactgccttaactccaaatacatcaatacaatccttcttaaatagtagcctcgtcaaccgtcttcccaaagtacatttataattttttgaagttgatagtctggcttgatgcagcttcgtagctagcaagcatctttttaatttgattgcactcctcacggtttgcctccataaacatcaaactatcatccgcaaagaagagatgagacatcgagatatggccctcccaaacttcaaaacatgaatacttccttgatcttccgcattcaaaataaggctggagagagcttcagcacacactactacaaacatatcttttattttcgttttttttctttaataaattaaaaatccgaagataaaactattttaatacccctatcatcgcttatttagtgaa

SEQ ID NO: 114313 - DNA, 834 bp, Cannabis sativa
taagtattattactattaaaaaattaaacatagatacttatctgcaaccgacaattaaacttaagtatctacattgtgaattattctattattattttaattttaaaccaatttaagttgtttgtaattaaaatattcttcttcacgtgtaaagacacatgtatatatattattaatttgaatgaatataatcatatatttcatgtgaaaccattacaaaccatagctagcgttcaaatcaatgtctcttataaacaaatgtgcacacaaaaacatacttcttcttcaaaagaatcaataaattaaatagttttcaataaacgtggacggtgctctattccttattcaatcaatcttcttccaccactcatttcaaaatactatttgctactaacaatcataatggatatgcagttcatcgatcaagctcgagcctttcaaattatggcacttttggattagtttagaagactacaaaaatagactttccgaccaatccaaatataacatgtgatttagaaggcttgggatgaaccgcaatactgtaattagaaaagaattaagtctgtctgtagcaattttttttgagagatcttatggactaatattgaaaaaataacaaagaaaaaaaaatctttaaagacaaagaggttgagacttgagagtcctctagggcttcactacaaaaattaacacctttagttacattttttttgtcccaaaataaatttttcgtgactaaacaaaaagttatttgtaattaaaatatagcatttaaatacaagttgtcactaatttaattttagttaaaataagtattgtgattaaaaacac

SEQ ID NO: 114314 - DNA, 2282 bp, Cannabis sativa
  modified_base (2219)..(2242): a, c, t, g, unknown or other
aattaattattttagaaaattcatatataggatgttagattatagaattataatcaacatacatgtcagtaaatctaaatcctggtaaaataagttccaacagttcatcgttccaatatattggtactagaactagtttcatgttctcatcataccgaccaagtttgtatgcttcagagtctgtaacttctattacttgatatgttccttctcagttagttttgagcacaccagttgtgttgtcttttgtatttgagaacgctcttctgaggaccatatctctcacaaaaaaatttccttgctctcacttgtttgttgaagtaccgagctaccttttgttggtgggccactagctttaggttcgctgaagctcttttttctttgatttcattaagtgattttatcaggagggcatgcttagtctcctggtcgtaagttaatcttctgtgagatgggggttctagttctacgggtagaattacctcataaccataggccatggaaaaaggtgtctgcccgattgtcgttcgttcagttgttctgtgctaccacaatacctatggtaattcctccggccaattcccctcagcttccttgagctattttttcacggtgtcattgagtgtcttgttgagtgcctcaacttgcccatttgtttgggggtgtaccactgctgagaaactcttgatgattccatgtgtcatatagaaatatgtgaacatctgctatcgaattgtttcccattgtttgagataattttatgtggaagttcgtaccggcatatgatgtttttcactacgaaatccaacactttcttggacattattgtttctagagtttcagcttctgtccacttggtgaagtaatctaccgttacaactgtgtattgtactccacctttgcttttaggcaactatccgatcaactttattccccatatagcaaaggcccatggactttgcatctatgttaactcatttaatggtgctcgggggatcttggaaaatcttttgcatttgtcacactttttaacatggaccttttaatcttcaatcatggtaggccagaaatactcttgccttaatattttcttagatagacaatgcccccagcatgattaccgcaaaatccttcattacctcaaacaggagttgtgtagcctcttcattcgttacacaccttaacagtggcatggagaaacctcttctatacattacaccttctactgtgatgtaccgtgtcacttttctcatcattttctgagcctcattcttgttgctcggatgttctctagtgttaagataggctgctatgggagtgatctagtttggtgtagtgtctatcatttcgatttccttcgtgcaggtgatactgggttctttcaaaaattgaattggaactaggttagccttatctgtcactatgttgcttgcaagtcgtgctagggcatgaacaattgcattttcttctcttagaatttccttgagtgtacaacccttgaattgtgcgagcaggtcatggatcttactaagataagccaccatttttccccacgagccatgtattcccttgagacgtgatttactgccaattgtgagtcactgcagacttcaatgtattcagcacgtacctcccgagcgagctttagtccagaaatgagtgcttcatattctacttttctattggaggctttgaacccaatttaattgctccatccataggttgcccctaggtgtaatgagagcgattcctgcaccagagagttgatcgatggatgatctgtctacgtgtaacttccagataagtttgtcttttacattttgttcttgtggggatgcctattctggtcctttttctggctcagggttatcttttgaacaatttgattctattcccgtgcattcagccacaaaatctaattaagcttgtccttttacaattgtgtagggtagaaaagttatttcgcactgacccaactctatggcccatttgagtagccatccataagcatcaggcttttgtaaaacttggcgtaaaggttagttggtgtacacttgaacaggatgaacctggaaataggcccttaactttctagtggctacgataagacagtaagttagtttttcaattagggggtactgattctctgcctcaactagtcttttgctaatttaataaactggatgttggatattattgttcggttttgtgccctaaannnnnnnnnnnnnnnnnnnnnnnnatttacttattaataaagatcacaaataacattttatgtt

SEQ ID NO: 114315 - DNA, 1832 bp, Cannabis sativa
aagagaattgtaacattaggtatttttgccactaaaaataaacattagatatttaagtgtataaaatcggaaacattaggtatttataccgcaatttacccattaattcaatttcatgcacttttgaagaggcatgaatcttaaattctacatttttagtatgataacaacttatcacctatcattacttcattaacaaaatttatatggtttttttttctatttagatagtagacaaatttcttcaaacctttaaaaaattatatgactaaatttatatgttaaaaactatatgactaaaactatataatattatccatattacacttacaaaatcattaaaaaaaaagattaaaaagttctttgggatggtgaaataataagtgtgctttggtgtatctcttttagaaaagtacattgtagaattttattttattatttttttttaaaaaaaattattgggtgcttctacaatatactcctataaaacggatgcaccgatgtactcctacctattttaacatttgaaagaattttttactttaattttttttcataatcgtgtaaattattgtaaaattttaaaaaatttgaaaaatctactatacactaagtaatagtttatttcatatacttataaaataaaagagtcatgagttttagaatttctcaaaattttacagtatgtcgtaaatactataacatccaccactataaaaaaaaaaaaagaaactacaaattttttcaaatattaaaataaatataaatatatggtataccctgccttgtacattttttaaaataatatattatttatttatttgtaatttttaaaataaaaaaaaataaaaaaaataaaaaagacttcccaagaaggaaatttgtcggtggatggggtagtgttggttggacactttgagaatgaaacaacatatatccttttcaacagtccgtacgatgacgtggaaatttcacaaaaataaataataatatttaataaaagaatacaataattaactatttgcacttttttttagcaaaatttgaaaatagttatgatatatactatagggtaagtttaaagaagaagtattctagtggatcacttataaatttctttgactaatttaaaatattaaaaataaaatttttatattttattatatgttttattattttttttatacgcgtggtaaataagtaactcttttaaaccttatttttcagcactataaattatttagaatttctaaaaaatttacaagtagtattaagtaagtacaacatatgtaattataaaaaaaaaataaactacaatctttcgtgaaacaaatttgtgatcatataattgatgtttccagctttttctcccaaaatgactaaacttgcaaattatcatgttcctaaaataaatggacaaagttaaaaatataagaacaaaaaaaagattgaatttttattataacaaaaataaaggctatttaaattttttttttaaactttcacatgtaccaaattatgctcgtaaatttttaagaccgttaaaatttcttttgaactatttagattgttggattaaaagacatttatccttttatcattcaattttactagttttgtgattatccatgtattaaatcatgttctttagattttgatatctatcaaattacgcctttcgaactttgctatgtacatctcttaaactttcatttatgttagattttccttactaaaataaaaaaaaaaaaattcttaaatctaacaaagttaggattttggctaactaacaattttttcccttgaactttgacatgtactgaatcatgccc

SEQ ID NO: 114316 - DNA, 3108 bp, Cannabis sativa
attcatctaattaattaaaaaaaattaattataaattttaattgctaaaaaaactccattcaatattttaattttgatatttcacttggcaaatcactaattaatgttattaaatatttatttgattaaatatacatgtatttgattgttttattttatttttctaaaaaaaaaaaatctatatttcaatcaactaatagaaatagatatatttcccccccaaaaaaagtggtaaatctatttaaaatataaagtatttaactaaatattcatttcccaatttcattttcacaatagtatacctaatcactacataattaggttttaacaaattttacatttatgaaaagagaacatccataataggacgtggcttacacaaagcctccaatggcactaatttaggcatagtgagtcctttattttcactcatatctattttctcctcactaactctctcccactcaaaacattggatcaatgaccccaatgtaaggcccactacacgttgggccagcccaataccaggacaagaccttcttccaagcccaaatggcattagtttatacccttcaccattctcactacctttaccaatattttcaaatctttctggcttgaaaatttctgcatcttcccataatttagggtctctgtgtatagcccatgcattaaccaatacaatcgtgtcacgtggcacgtcaaatccactaatggtgcaatcattggaggaatagtgtggcacaaggagtggagctgcagggtataatcttagggtttcagaaataacattttgaaggtaaggtagtttagagagatctgattcgtctactaattgttgttgaccaatttgagagtcgagttcatctttgagtttttgtaagacatgaggatgatttagtagattagacattgtccattctagtgtcacggctgatgtatcagttcctgccaatagtaatatctaacggaaaaaaaatagttattagagcactcataagtcacaattctattttttaaaatatattaccacaataaaaatacttaaaaagttgtacttaaatatttattgtttgatgacaacaaaagtgcataagtaatttttttttattaattattcatataaaatatttaataatagcttacaacaaaaactatgctttctagtaaatttgaatccgtatgcaaaaccagaaaaattaatgaacaagtgacatatataatatatcatatatgtataaataataataataataataaataaataaataacaataataattaataaagttgtaaagaatagtatgcattcaataattttttttattttgcttaataaatttttaaaaatttacaaattacctcccataatacactattataaaaagaaaaacaaataatagactaataaactcacaaataaatgaatagggatatataccaaaactttaccaaaaatttattgtttcccacataataataattcaattttgtatatacataattcatgtttttcaaaataataatttgtctaattattcttttccatgtgcaaactgtaaatttatataaatagtatttattttgcactatcaagatcaaataataattttatccatctaataatctcaaaaaaaaaaataataaaataaaaaataaaaaaaaataaaagaaaaatcaaataatccaaataataaaatatagaaaataattaaattatttatcattattattaccagtacgaagcctttgataatttgatcagtgtaatattcaggttgagactgttgaagagtgagtaaatgatcaatcatagtattccgatcaagattactattctgatcatcatcatcatctttccgattccgatgctcatcgatcaaaccctgtaaaaacgagtcagtcttcttcgcaagcttctcaattctcttctcataactattcggaacccaattcaaaatcggcaaaaaatcagcctgattcccagctccgccgttttcaaaaacggctttcataatttcccgaaacttccgggcttccacgtcatcagtgacatcatcaccgtagtaacgtttccccgccatcattctcatcacgatgttgaaagtcagctcagtcaacatcgatttcatctcaaccgctcgatcagtattagacgagatcgaacggtttatctttcgaagtaaccggtcgatctcgtctttacggatgttgagtaagagattgagacgggccgtggagaagatctccacggcgccgatcctgcgaagatttcgccagtggtcgccgtatggggcggccactatagttgtgtagttgtagcttatgtgtttgcccattagtagtggaggacgattggctaaaacgatgtcgtttttggtgaaacattcttctactgccgacggggacgatacgacaaccacgcggcgcgaaccgaaccaaagagtgaaaacgtcgccgtatttggccgagagagaatggaatattctgtggacacgtggcttgaggaggtgaagatggcctattatggggtatgagggtggtgatggtggtagatttttgtagtgttttttgtttttggttttgatgaagaaaattaggatgattatggtgataaaggagagtgatccgtaaaggaatggatcttgaatttgatccatttgtttttgtttttgtgtttttgtttaattaaagatatatatgttatatgaatgggtgatatttatgtatatatatataaagtagtggttggcgtgcgttgggtatgaaatgatcagattgaaaaatattaattgcgtacgaaaagagaaagaaaaaaaaatagtattatattggtgtctaaaattttttttacgtgtgaatattattggtgtactttcgggtctcatataactaagggtaaatagtgtcataagaatttaaaattttatgtttgtaagcgacaatataaattcactgatttttttaacggtataagtactcaatgtttatagaactgtaattttcttcttattatcttaaacaggacacgtataagactcaaattctagattatttggtctggacgaaaatatgtagtatcagttacttctaattttttttaataaa

SEQ ID NO: 114317 - DNA, 1590 bp, Cannabis sativa
attttaaatgatacaattatatagtgttgtaagttcaagagacaaaatattaattatttcttaaaatagttatacctaaatagttttaggagtcactcacgtgcgaagaacgtactatctcactagtattccaataaatttaaagaatacaattataggatcatcaactaacatgtataataacatattaaaacaatcataaaacattcaatccataatacatatgaaattatatgttcatctttgcaattatttttagtaatattttaaggagaataatttttatttaaaaaataaatatgaaggcgactataagtatgtttggtattgttttctactttttgttttaaaattgagaacaaaaaataatttttgaagttttcaaaacaccaatcttgtatggttaatgtttactaaaaatatttttcatttcatttcattttatttgaaaaaaatactcatcacttaagacccatatatgaacaagatttgatcaggatctaaaccccaacatcggacccggatacggacacggactccgaacctggccctggccccagacctaaaccacgacccttaaaccaaacccggatcccaaccctagacccaggacccagaccccgtactcggacctggacccgtactctcaccctaaacatgtactcatacccacaccccagccccgaactcgggcctcaccctgaacctagacctaaaccctggccttgacccctaacccagacccgtaacccgaccctaacctcgagcccgtaacccgatcccagtctcagacttgtaacccagcctcaggcccagaccccaaatctcggatcccaaccttgatgaaagagaaagtggtgagagagaaaatgaggagaaaggtgttgaaagagaaaataatgtgaaaaaatgatgaaagagaaagtgaggaaagaaaaaataatatgagaaaatgatgatagagaaaatgaagagaggaaaaataatgtaagaaaatgataagaaaaataatataagataaagttgagaaaaaatattgacaaaaggtcaattattttttaaaataaaaaataatattatgttgttttcaaaattcttatttttttataaatttaattttaaaaatggccaaatacgtctaatttattaattatgatattaaacatgcattatttcaaaggagaaattttgaaggattactatcctctcttatttcttttccttctattatctctcttgtcaaacaaatgaattgagtatctccccctatctttctactctcttctgccatccctcctaccaaacataatgtaaagattggcggacaacaaatcttaatcacttagttaaaaagaagtatcttaaatgcctttgtttacttatttatttattttttctgaaaatcttaaatgcctttgttgattgattaattctctcttacaaattcgcaaaacttaattgttctcctacctattaactatttatattgatcaattttgtgaagtagggaataccaaattaatttagtggattgggtttattttataaatatggcttttttgtaagtggtttagaaatatatggagaaat

SEQ ID NO: 114318 - DNA, 5179 bp, Cannabis sativa
  modified_base (3036)..(3043): a, c, t, g, unknown or other
ctctctctctctctctcttacaaggttattgaagatgtggattggccttgatgaaaagtcgttggttatattgttagtgatcatttttagctatgagatgtgagggctttcatattactcttatgttttgcattaactgttgtttagaaaattcattgcttttcttattgcttgttttgttttacaatgagttagtcatttctcaataatttttccgttgtctttacatttttgttctacctgatttttcaagttttaattgaaggactgtaatttcaaatgactaatatgcacggtacgtcagtttctgtctaatgatgagaacgtttattatttattgatatgtgcattgatttcttatttgagccatcattttttctgctcctaacaaaaccttattcaaaaattcagttttattgttaccaaaacattatgagcattgccacctaacatgaatatttagtggtttctaatattcttaaactaagatatgtggtacccaacttgcactaataagagtatgttcaccactggtgctccatagaaattctttgactttacactattttttttatgactattatgattttctttttgtggttgtgacttgtgaggatgttgatatgcgcttggtggtgaaagccgacaattaggggtgttcattggatcacatccaatagattttgacctaaccgatccaatctaattatttattggatattaaattttgtcatccgatccaatccaatcgaattgagtcatccgaacggatccaatggatgtattggattggattggttctaaccattggatgcatcgattggttttttattagattggattggatccatccaatctattttaactaccatttaagttaattttattaaaaaatatatatatataaacaaaaactaaataatccaatatacataataaacattagtttagaccaacttaattctcatgatctcataataaaaccgctaaaaaataaaatttattcaataatcattgacaattttattagcatttaagacgatgagaattaatattttagatctaattttttttttctttaatctcacgtgttaaatatatattaaatcaattaatatatatttctaaataaaatatattaaatatataaaattataaatgtattttagaaatatatatatataattggatgaccattggatgataattggatcggtttgattggttatccattggattggatgtcccatccaacaactgatctgatccgattggattttcagaatttacatccgacccgatccaattatgtttggatatccgattctattggatcggttgggattggatcggtcaattgtaattggattggatgactttctgcacacccctaccgacaatggtggttgaatccgccgtgtctaaacttgaagatgtaagtgttactgaatttttaatgttcatgaattttcaaatttaatttttgatggcattcgtccttttaaatgatctcattacttgtatgaatctacaacatatgtattttattgtattactgtttagtgtggtttacaaatttactttgtttttgccctgtgatggaaaaatctcattgttggaaacaattccttggcttttcatcatctgcttttacatcttttttgccggattatcttatcataatcatcattctcttctttttattattattattattatttctctttctctctctctcaacctctcttgaggttattgaagatgtaaatttgccttgatgaaaagtcggtggctttattgttaatgagcatttttagctatgagatctgagggcattcttgtaattgcattttgggtgttctgctccagttcttccaatttaaaaatcctatttcatgttttgtttttgtttgttttaaataattgatttttctatgtctttggttttctattacatattttattgaagagtcatatattatgataaatgttttcttaggctatatcaatggtacatgacatgtgaacaatgttttcttatcaaagactaatgactgacctgaagtgtagaatgtataattcttcctttgtttaaagttgtatttgtctcttgctctttttgtaattgcaagattgtaatttcaccagcccaatgatgaaaatattggtagtttcaaatcaaataatttcatgatttttcatcataaacctttccatctttgctttgcaacaaggtgatctttttattttattttattttattttattttcactctctatctctctctttctctgttggttgatgatgatgcaaactggttttaatgagaatcatggttatatgtttgagtgtacaaaaaattctctgcttcaaaatgactttgaaaagttgtttttctgagataacagagggctgtatcacaaatggactaatatgtttcatctcgtttgcactactctaaaatctgtttgttttttttttaagtgttcatataatatccattatcttttattattatttgtttctgccgatgatgagaagttttgttttcgtattgatatgttcattgatttcattttgagcctgcatcttttctgctcccaccatcttctactcgccatcacctgcaaaagtcctaacattgattgcgtggttgtggtagtagtagtagtagtagtagtagtagttgtggtggtgatgatgatgatgatgatgaatatctttgtttgctgttggtgatggcgaatgctgatgatgttggttgaagtccttgaagatgtgattggttcttaatgaattttcgatgatcatgaaatttctagtattatctctgatggcatttatctattgtttattgtcacatattaattggttgattatattatactaacatgtttttggccctgtgattggaaaactcatattgagaagcagtttcatggttttttcttttcgttttgcatcagaagcattgttaaatctacaaattgtctcttcacacacacacatacatgcatctctctctctctctctcnnnnnnnntctctctctctctctctatttgtggagaatttttttcgctctgaggcttataatgaaaattctcatgttatactgttaatgatcagattagcttatgagatctgagggcttttattgttttgtcatcaactcttttgaatatttaattttgttattctccattttattatgccttactgttgtattaccataccatttcagttttgatttgccattttatgatgccttttaatgattttgtatcaattaacttgaactagctggtagggactagggaattcttgtttacaattgttttgatttcatccttctgtttttggtcttttttgcttctttgtaagttgtcaactttttttggctgatgatgacagttttacgcatgagtctttagtttggtttttatctttctgctcccactaaaactgatgttcattgtaagccattattctttttttgttagatttagttacaccaaattaaacatagcatttatgttaaccattggaatctctgctttaaagaatagagtacagaagctgtttggagtgctctttatggtggtttttatggtggttttggtgaatgtcaatggcgggtggttgtagtggtaatggatttaaccctctgaatgatttgattggattattatgcaatcttctgctataaccaccattgccttccctttgatgctttggtctgcaagcgtttcattcttctgttggtatttttttttttaaaacaaacattctcagttatttttttgattactggagaaccttctgatgttattaataacacgagttaaaaatattatctcctctgtcaatgtctatttcacttttctttttttcaatgtttatgatttaaaatttgtatgttagatcgtgtatttctaaaatctacaatttgttaataatttacattactgttaaataactttgactagtgggaaaatgaatttggtaatactttacattgtagatttttgttcactcaagtaatttgattagtgggaaattttttttgagaaatttctctttcaaatcatatgattattgcttgtgcatattttttgttgaaataactttttaactgtagtatctttagaagccctttttatttattaattgccaatcgatgtgttactgtgttagctatattgaatttaaatttttatggttttagtttggttattgtcaattaatatttttatccttttgcataaagtttttattttctgattttttttagctaattttatttatcacaggctatagtgagtagaaatgaatggaacacctattgactttatttaatcagatgatgagaatgtttggtgttgatatcatttacagcctccatcttagtctgctccaaccatattaggcgataggaattcaataattacttttactatgagtatgagtaatgatatgtgcacacacaaattgtgagacttattatacatgattactttttggtgctgttgattttgataatgttctacccttgctgaggatggtggtgatgtgatttgctattaatgaattttcaatgttcatggaactgtttactataataataatctcagttcatgtatgggatgtgcttctgcatatagctttaacatttggagatttactggacttattttgttgagatattgttaattcaatatttttaggtttgccctgtgatggaaaaactcatttgggaacaagtttcatggttttgcataatgagctttgttacttctgttctgtcccctctctctctcttaatggcactcacatcagcttctcgaatatctaatctatatatatatatatatatatgtactaatctctctctctctctctcagaccagattagttatgaacttatgagatctgagggcagtagtagatgatgatatacttttttgaatatttacctttcttgctgaatgaattacctcaaagtagattaactgaaaataactttggtgatcagatggggattcaccattaagaaagctgttgataaataaaaagagataataggaagggttattgtctttaataaaaatctttgggtgaagcagttaattacgaatgagatacaaccttatcgatcaacaagttgattaaaggataa

SEQ ID NO: 114319 - DNA, 3709 bp, Cannabis sativa
  modified_base (3674)..(3683): a, c, t, g, unknown or other
tgagtagattataggagtattcttaagaaaattgaattcctttaaaacaacctttatccaaaattcttccttaatagcttctgttacagagatatactacgcctcagtggttgacatgacaactactagttacagttggacctaccaacttatgcagctacctccaattagaaaatattaagttaaagtagatcttctagtgtccttgtcactagcattgtccttctgcaaaaattggattttgtgactacttgaacactaaaccaatctcagtagtccctattagatatctgaaaatccaattcatatagctagccagtgtagttttctagagttagccatgtacttacttagtacacttataacataggcaatcacaggtatgtttcttaaattaagtacattatggacccaacaacattagaatagggtacttggctcatctcctccctttctttctctattttagggcattcatctctagagatcttgtattgactagtaattggcttactggtcttcttggcaatagtcatctaaaacttcttaattactttttatatgtaatcttcctggcatatctttaggattcctttacctctatctcttacaatagttatccctaagattttagtagcaagacccagatccttcatcttaaattcagaactaaactttcaaattaaccttagatcttttcttatttattatcaacatgttatctacatatatcagtaagtagatgacatcttcgataccattcccatgaatatacagacaagtgtcatagtagctcttagcaaatcccttcttagtgataaaagcatcaaatattttattccattgtttgggagattgtttaagtccatacaaggacttaactaacttttagaccatgtcctttttccttttctacatgacccttatgttgttccatgtagatatcttcctctagttcaccatgtagaaaagttgtagtcacatctatttgatcaattttcatgtcaaatggatttactaggcaagcattaatctaatggttttatatttgactacaggggaaaaaatctctgtatagtcaacacctatgtctgtgtaaattccttagctactaatctagctttatacatcactggttcgttcaggttagtagaatctgcagcttctaactccaaaacacaaattaatatacaaaaggaaagcaatggtattttcataaacatttcacgcgtccatgaagaatggtaaaaataaaaacacttgagtccaacaagactcgatccatcccaataatattaccaaaataaactccaattctttgtttaaacaacttagatcaaattgagaccaaagtctcgaaccttcctcgtcttctccacaagaaaacttagggtttctttcataatcgagtacacagatcaatcacacacacacaatattagaaatcaaccaaacacactcatcaagaacacatgcagacacattcaaaagagagattagagttagggataaagagaaacaaacagaattaagagagaatctaaacaccacgatatgatctcggagttaaccccaaatcaatgggctacgtctccatcaagctacctcagagtgcttatttttccctatgaactacaagtaattacaatgttttcttttagatttctaaccacaatgttcggttaataatttgttgacttttctctctatttttcttttcttttctcttgactaagtctcttttactttctttgatctggttacaactgagctcaaaagagctacttctctcactactctctctctacatcaatggctctcacaaaaataatgtttcaggtatccttcttctcttagcagtaggtattttatagctctaggggcgatgtttgaatttagactaataacttggtctaaattcagactgagcaaaaaaaaattgtttttgtaggagtcttttgtaactgaaagtttgttgcaagtcttggtctatatttgagtattagtctaagggcataattttaatttgttgttatgtaaataactgagcttataattaaattacttaacaatttatttatcgcattttattttaaatgtaaaactttgatatttgcagaaattagattttacttaataatacttgataaccaacttgttaggggcttaaaaattacgatttttatgataaaatatatttttgctcgatataatactccataatattcaaatataattctttgaagagccttcatttttcattcaagtgtccatttgggatggtatttatttatttttaccttatattgagatgtacatgtttaagatgtgtatatacccatttaaaaaatatatagcttacaactatgattgaaaataaagtgttattttgaattttaacgtgtttttaaaatataaatttttcaaatgtacatatgcacatttttactggtgtagccaatccaatctttgttatttttatattagggagggagatcgagaagtataaaactacgaaactatatctatgaccataagttagattgatattttagtgggggtgatttttttttatttttttacccaaagtattagtgaaaaatataattttttaaaaaaatatataaattttaggggggataaaaataaaaaaaaaaaaaaatatgggggaataaaaacgaaaaatattaattttatagggatacaaaatataatatgtgggaaaaataaaaaatatatattttatgaagaaagacatcatattttttttttataatatatcactaaaatctctttttttatttattttatataaatttttacattgcactatacattagttgttctattttttcctttaccattgtaatattattgtttttaatatattatattctttaaactaccaagtgtgccattaaaaagctctgtggcagttgtttctttttaactattttttaatttttttcttttgttttttatggttttttttttttttttttcaattttcgttctggatttttttaattttgtgagttattcctttccttcccctgttatgatctttcgaacacatccctatctgattttccttgctacttatttttcctcacatctgctctaatggataatattttttttcatccactaggcctagtatatcacttactgatctttaaaaagaggttcttgaactattgaccactattagtacgagagttactgaacatgatgataatactcttttcgccagagttttatctttcaaaaaatattaatcgaaagacttttcaaattaaaatgattggtcactggaaagggtgttaccctgttactatcactgatcatcactctggcctgttcatggtttcttttgggtgtctaagagataagaagatggcactcatattatagccatggaactttcaaaaccaccacatcgtcatatgctctccatctactctgcgaaacgtcacagttgattccttacaccattctccgttctgggtccaacttcatcacttaccatttcttagcaagtcggaagctatatctatttgggttggtaatattgttgggacattcttagaagttgatgaagatttcttgaatcaaggatgtaacaccctaaataattaagcatgctactcaaaaatacttatgaaaccctaatnnnnnnnnnnggattactaattaaaatagcgcagaa

SEQ ID NO: 114320 - DNA, 1604 bp, Cannabis sativa
gtttatcattatatagtaaataaaagatattgtttttgttggtatgttataatattatgcagctagtcagttcaaatatgtgaagcaccaacttaaagagctggattgtgataactttctgtgcaagtattctatgattgaaggagatccattgggtgacaagcttgaatctattgattatgaagttaagtttgaggctaatacttctgatggaggttgtgtgtgtaagatgaaaagtagttacaacacaatcggcgaaatcgccgtcagtgaggagaaaatcaaagaaggcaaagaaaatgctgtggcaatttacaaagttgtggaaacttaccttatggagaaccctcaagtgtatgcttaattagtttgtgtcttgttcatatttggagctaaagataatttatttgattggatttttatataaagataataaaaatattctttgtaccataattttagtgtgcttggtacaagaatgacttataatatatatatacaagagtaatggtttagtgtgtctaaataccaagcagaaagaactatatatcttactattggaatttcattttattttatttttctaagtgttacaatgaataaaatcaaagattacatttgtgagtaatatttagtagaataaaacttgagctatgaattcattgaatgatttttttcttgtgtggtaggtggctaggtaggacaaaagaaagggcattacttcattttggaatagattctagaataaaaattattcttctcttataaaattcatagcacaaaacaatccatgattgacaatatcaaatttcatatctttctctaaagaaataactttcttttaactttacacttgctatttattcttgccaacaaaaataacaatattggtatcctaagaatctagaccaactaaaaagtgacataaaataaagaattggtttgttaatttgatttgaaaaccatatagaataagaaactattatcattaattccttcaatctgtcattcatgaagaatatcataacaaagctttcatgaagtagaaattgaaagatttagtctatgtttcagaaaggaaaaaaaagtaccttaataatgttctggttttgtgcttttaatatagattaacgcatgatcccatactttaagttgtttgcataacttgttatatgatatatgttatgtttggctggcaactcgatttttccccccaaataatatcattgttttttccaatatgcactttatacatttcaatttctatatatctagatttcttttagagagaaaaatggaaatttctattagacaaatcaagcaatagtctattgtatgattgttgattcaaaatataacctaagtatcaggtagcaaattcttgggtatggaattacaaatttacccttattgaaaaacagagattacaataagaaaaatagttacaaaaagaagctcaaaaaccagattcaaaaatagacagttaaaacagttacaacaacaacaaagttattagggctcaaacagttacagtcctagatcagtagttcacaaatactaatctatataaaaaaccgagtttttgcaaatgtcagttgtatata

SEQ ID NO: 114321 - DNA, 3394 bp, Cannabis sativa
  modified_base (2422)..(2423): a, c, t, g, unknown or other
aggaaatcagatatcaggaactattccacctggtattggaaatctagtaagcttaaatgagtttcttatgtatgacaataagctaaaaggagctcttcctgaaaccattggtaaacttcacatgttagaaagagtgcatctccatgctaatgaattctatggagaaattcctttttccattggcaatctcagtcgattgagtgagcttcgattagatgagaacaattttcatggaaacatcccttctagtctcgaaaattgcaaaagcttgttgtggttggacctttccagtaactccttcaatggtaccattcccccaaatgttattggtttgtcatctttgtcaaagtctctaaatctgtccagaaattatttgagtggttctttgccttgggaagttggtaacttgaaaaatcttgtcgagttagatgtttcgaaaaataatttgtctggtgatattcctagcagccttggggattgcacaatcttacaaagacttaatatggatcataacaagtttgaaggagttcttccagaaactttgtactcgttgaaaggcattgaagaaatagacttatcatataataatctttctgggcatatctcaaaagacttggctaagttatcttccttgtcaaaattgaacctttctttcaatgatctggagggtgagcttccaacaggaggtgtttttggtaatttcagtggaatttcaatttctggtaatgacaagctttgtgggggtatacctgagttagaactaagagaatgctttagaaaacataacttgtcttttgaggccaagttgacaatctctatatgttgtgcccttgtagtattactactattatatgctgtaatctactattttcttaggaagtcaaaaaggaaagctttaaaatcttatgagagagatcctgtcatgaatatttcatatggggagctccttaaagcaactaatggtttctctcccaacaatatgattggacaaggtgggtttggctctgtctataaaggaatccttggaccacatcaaacaattgtagctgtgaaagtattcaaccttgtaaatagagaagctacaaagagtttcatgaccgaatgtgaaattctaagaagtgtcagataccgaaaccttgtgaagattattgatggttgctcgggtgttgattaccaaggtaatgatttcaaggctctcatatatgaattcatgccaaatgggagtttggaagattggctgcattctattccagcaaaaaattcagaagagcaacagaaaagtttgaacttgtctcaaagattaaacatagtgatcgatgtggcatctgccttagattatcttcataaccataaccaattacatattgtacattgtgatctgaaaccaagtaacattcttcttgaccaaaacatgactgcccatgtaagtgattttggtttgtcaaggattattattgaagacagttctataaaccagacaagttccattggaataaagggtactattggatatgcagctccaggtaaatgtgtttcaattacattaagaagaatcttttgaataacaatgcctagttttgaaaaatctgatttccattttgtagaatatggcatgggaagcaaggtgacaactcaaggagatgtatacagtttcggtatcctcttgttggagattttcacagggaaaaggcctacatatgcaggcttcaaagatgagttgaatttgaaccggtttgtcaaaacagctttacctgaaagagtgatggaagtagttgattctcgtcttgtttttcgcgaagaggaggaaagagctactactagcagcagcagcacactgctccaaacaagaagaggaaaagtagatgagttattagtttctatactcaaagttggagtcatgtgttcggaaatatctccaagaaacaggatacaaatcaatgatgctcttaacaaactgcatgaaattagaaacttggtccttaaagatgagttggtttagaaataatgcataacaacaaccacaaaggtggttctatatattgcctaagaattcaagatcaatatagttttttaagccaaaaataaacacttaattggcttactttacttgatctaattgatgatatagttttatgattttgcagccttagaggagggagttgccgcaactgcagattagagaaacgagagacatgtgactgatgctgttgttgtaacatagacttattggtacttgtgaacactcaaacatgttacatgggatgaaatgaagattgaaaaacaatgtggaagggacttaatgtcttgtacaagagaatcgaacttatagaagcatttagctatttgtagtttgctaaataaagcaacaaatccttttatcttagtatctacgaatggagttaggtggcgtttggttggaggnnatgaaatggaatggaatggaaaggaaacaattttcattccattactttgtttggtagtactggaatgttattccaatggaatgacatttccaccattttggtggaatgacaattccattttgaaatggaaggaaaaaccattctaatgcatgataagtaaaaatctaataaattttttatcaattgcattttaaattttattccatttcattcttattctcattcccattcctattcctatatttttttttctcccaaccaaacgtcactacttttctttctttctagttcttcttctaatttctttttcttccttaagtttggccacctttacatcattattacaaaacattaataaacaaatttaatacaaatttttaattacaatattgttattaattactttttaaaatacataattataattaagtattttttttattttttcatttcaaaatagtttttttttttcttttttttgaatttttataaaaattcacataacaattaacataaagttaaagcaaaatagctattaagtggcttactagagacatggacaaattttttaacttagtagaaataaaatatttttcctaaggattttttagaatagaaataaaaaacgaagtcactagaaaacaacaaccaccaaaataatacaaactataaaaatgaaaaaaaaaataaaaaaataatatgtaaaagactaattaggatttttatcttcctttgacatgtaccaaatcatactcactgaacttttaaagtagtttaaaaatgtactattaagattgttggttttaaagacttttgtctaatgttagtaaaaaaatactaacatggatgaaagttcagggacataatttagtatatgtcaaagcgtacatgatttggtagatatcaaaatctaaggagcatggtttagtacataaacaatcattgaaataataaaattgaatgaaattaaa

SEQ ID NO: 114322 - DNA, 4121 bp, Cannabis sativa
aaaggaaattattacctataacaattgagtctttatagtagtctccaccaccttccatgtacttcaattcagacttattttctttagtaacttctgtattgatggcactccatttgttaaagtagtctgatggtaaatttccactgaaatcattcatggacagatcaacaatccttaactttacaaatccaatatcatgatgagaatcccatattggaccatgaaatttgttggaacgtagcacaagaacttgtaactctggtaaattctgtagccaagaagggaacacatcattgatgacattgtgtccaagattcaaaacttgcaatgctctgcagttgatcaaagatttcggaacctttcctcgcaatcggttgtgactgagatccaatgtctttaaactgtttccattcaaaaaagtctcaggtattttcccactaaacttgttgtgtttcatatccaacaccagaagtgagctactagagttaaccaagcattgtgggattgtgccactcaaatgattgtttgacacatctaaaacttgaagaacacttaagttacagaacagtaatggatcaattcctccacccaatttgttttctgagatgaaaaagtgtgttatggatggtggcgggacaataagcgagccttccaagctgttcaaacgcagatctagcaatctcaaatttttccaaggaagagtaataagttgagctctttcccaaccagtgaatgagttgttagaaagaatcaagtttgacaaagtatcaacttctatgttgaggaaccaacttggaatcttacctttgattttgttgttggaaagatccaagtatcttatttcatcttgggtttttaggaactctggaaaagtttcaccaatgttgcatgaagataatagtaatgtgtcaaacttatgtacacttgaatttgtactccatgaagttatggctaaatcattattatctgaaagaccaaggatctgaagctcactattctctgggaagatttccaactgaagttttccacttaagttatttgattgaagctcaagctgaagcaggtttgggaattcggaaacagaaatgggaatttgtccatctagatggttgttttttattgatagatagctcaatggtgatgatgacacattttcgaactctagaggacctgtaaacttgttgttttctatccaaatctctgtcaaaagaggcattctataaagagatgaaggaattggtccagtcaatgaagtatctgaaattatcaagtatgaaagttgggttaagtttgtgattgtctttggaagcatcccattaaaactttcaccataaagcttcaagagactaaggtggctgagatttcccagtgaagatggaatttgaccttcaaactttccagaaattgttaaggactcaagaagtttaaagtttcctatccaaaagggaagttcaccagtgagtccagtatcaacaattcgaagataagtgagctttgcaaggttttgcaatgtagatggaagctgaccctttatgttttctcctacaagattaaagtgttcaagttgggaaaggttacccagtgtagctggaagttgaccaatgaaattactgcctccgagagcaaggtatttgagttgggaaaggtttcccaatgtagctggaacttcaccattgaaattgttgcctccaagatcaagtacttcaagttgggaaagattcccaagagaagatggaatagtccctgagaaattgcatctttcaataattaattcaattaaagacttaaggttgccaatggaatctggtaatcttccatgaaactttgtgccataaagatgcaaggtttgtagttgacttccattatgaaaatcaggaaaagaaccaatgaggttttcattatctgacaagacaatgacttgaatattaggcagttggaaaatgttcatgggaaattcaccatgcagattgcaatcataaagagataaagatatcaagtgagcaaattttgaaaaggacagaactgacactgaagaaagattcacaccatccaaatgaacttctcttaactttgtcatgttctctgaaactgttttcatagtcaaagattcacacaattcacacccttctcctttaagaatatcaaaatacgcaaatgaagatagatctagtgaaatcaagtttgacaataaagcaatttcagatgggacaaacccataaaaatttgaggaagataggttgagatgggttaacctaggaagctgagtaaacaaccttgatggtatagttgagagagtgaagttgttataagcaaagttgagcctttgaagttgagtcaaactaaagaggctgctattagaacttagaggcccttgaagacagctgttactaagatcaagccctattacatgtcctgtttccaagttacatgtgacaccatcccaatcatcacaacaatcattaccttcaatccaagacttcatcttttggttagacaaagaacaagaatcagtgaaactggagttgttaaaagcaaaatcttgctttagttgtaacaaagcagaactttggtgtgagaggcatcttgatgttggtatagaggaactagaagcagaatccacagcatataccagtactagtgttgcagcagcacaatacatcatgattctaaaatccattttctcaagaaagatcaattaagttgtgaaagtactgtgttggggttgggataacagactgtatattaactaggtaccacatattttgaaaatttgtataattttaaggatttttttctttccttctttctaatttcttctgtggtcaaatgaagtagtagtctaagatgggtaaccattcatagtctcagagttttaaggccatacactatcaaaaaattgacttgaattccgtttgaacactattaataatgttaggccacttctaagaattttaaaatacatcagaaaaattataatttattttattttttattaaatttttacattatattacatcaaatatatctagactctctaactcataaacatttgtaagagatttcaacattgagtacataatgcttcttctatgaattgaaacatttttccagagaagattcagatcaaatttcttcaattcagcagagtataatactaacaaaaacttgatatgaagcacattgggaaattagttttggattaaaagctttaatggttgggattttaactaaacttaattagtatctgatatatgttgtttgtttaatgattaaactaaatgactaaaacaaattaaacacaccaacaacaataggcattgataatggctaaagagatacccaaatgagaattcatcatgattctacaaagattgaacttcaaaaatcaatataaaagatcataaattatacatattaaaacaaatcacctgagtttcatcaacttccattactcccatttcaacactgctattggttcctgaaaatgacaaatttacatccgaattaaaatttcaatactatttatttactatcagcaaaatgacactgattgacatgttaaacaaaaaaaaaaaaaaaaaaaaaactagaaaaatcatattgaaataaaccaatcaaaatttggaacctgtataaattagggttaaatcaaattggggcaaattctaccgttctctcaggcagaatcgtttacccttacaaagtcatgttttgttcaatataaatggaatcattattactaaatagagttactttcacatttttaatctctagaaatatgaatgaattattactttttattgtttaattagttttggaatgaaattttatgcaccttaatcacactttattcacttttatttccaaattctcacactattatattgtttggtttaacttttatggcacaagaattaatggtagtcattcgaagaaaaggagtatttactctactaattttttatgaaatgtattaagagtaataattttttatgtttggtagagaagaaagtgaaagaaaagaaattatatcatagaaaagtttaaagaataaaaaagttatagtagtgtttagtaacaaaaaaaaaaaaggattgaaaaaagggttaattttacaaatg

SEQ ID NO: 114323 - DNA, 3318 bp, Cannabis sativa
tcgcgtgggagacccaatattcggacgccaaatctaaggtcctccataggaacccatcggagacgataaagtttagtttaatatattagataaaaatgtggtagcataagtggttagttaaagcttagaaagtatatatgaggtcttgggttcaaatcttacaaatgacacttttagtttttttttttttaattcttttacataatcatatataattatatatatagttagtaattgatttaaatttgtagagattatgggtgacgttcttatctttagtgaattgagagatactaagaagattcttagtgaattttaattattgaactttctaaaaaaaaaagtcttgtcttatgacatggtgtgagagtttcttgtgctggtctggtcttcgtttttggtgattattgtatctcgttttgttgattttcgaacatggctagttcaagtggggtaggaaatggaggcagagaggacgtctatagcttttagattgaagaagaggatttggaagagttaacagtagggaataaaggagaggaagaggggattgatgacagatggtgtcttgtaggaagatttttgtctaatcggatgatagactttgataaaatgcagaattttttagcttcgttatggcaaccgggaatgggaatgtttgtcaaaaaacttgatgatagccgattcttatttcaattctaccatgaagtggatattcaaagagttgttaatgggagtccatggacatttgatagaatgcagttgatcatctaatgtttgcctgtgggaggggatcagaattcgttacagttaaatcaccttgatatatgggttcaaattcacgatgttaaaccagggtgtatgaaggaaaggacggttcgaggggttggtaatacactggggaagtttattgagtcagatccaaaaaattttataggtgtttggagggattatcttagagtgagagttactcttgatattaggaaactgttgcggagacatatgaagttaactcatgaaaatggtagttggttctgggttcatttcaaatatgaaagagtgccaaccttttgtttcatatgtggtttaattggccactccgacaagttttgtagcagattatttcagcagcctttagaccagattgtgaaaccatatggtgattttatgaaagcattgccacaaaaaacttacaagaacatcggagcaaggtggctccgaaacaaagggtggcagtcgaaggggatcactggggacaatgcacctggacaaagctcaaataagccgaatatggaaagaaatccttcagttgacttggtcgcaaatcatgtccatgaaaatctgctgcataatggtgagaatcatggcatggataacattatgatggaaggtgatcaaggtgaggaattttagtgtattaaagagggagaagtcaatggtgctatatatgtcaagaataaagaaaaggagaaattgaatgaagaaaattctggtttgattatctatgatagtaagaaaaggatggttggtgaagagtgacacttgggtcacgtggggcaagcccaaggaactagtggactttcaaaaaactcatcagtggcgggccttggtactggggctcgccagacattatgaaaatattaagttggaactgtcgtgggttggggccgccacgtaacattcagttccttaaagagttggttgatcaaaaaaggcctaaagttttgagtaataaggagaaagtagttgctttgagtaagaatttggggtttgaagggtgctttgttgttgattcccaaggtaaaagtggaggcttggcgttagtgtggaaaagtgaggaagaagtggttattgattcctattatttgaaccatattgattgttttgttcattttgaagggcaaacaaaattttgtttttgtggcttttatggggagcccaaccgaagccttaggaaaactacttgggagttgttgtgtactcttcatgcaaggttttaagaagcatggtgtattatgggtgactttaacaatattctgcaaaataaagaaaaaagagggggtaagccttatccgagttggcttttggatgggtttcaagaggtggtccgacattgtggtttgtatgatttagacttgcttggtcatagtttcacttgggaaaagagtagagacacctctgcttggattgaggctaggcttgatcggacgatggttaattttgcatggttgactcgctatcctgaagctaagttatttaatttggaggtttatccttcaaatcatactccattgttttttaatatcttgcaccatcttaaagctactggggggaaacattttcgtttcgaaaattattagattcggttccaagagtgcgaggcagtcattagagacagttggagccgttcgtgtggggttcaaatgcatcagaaaattcaccaatgtggtcaggatttgcaagtttgggggactggcattactggtaatttttcggcaagaattaagcaatgcaacaaagagcttaaagtgcttaaacgaaggcgtgacagagaggggaaacaaatgtatgcggataccaagtagcagctttttgaaactctaaaccagcgggaaatcttttagcgacaacgttcgaagcaattgtggctccaaaatggtgatcagaacagtaagtttttccattccaaggcatcgtctcgtaggtgtaataataatattgtttgtctgaaagatgctatgggaacttctaagtattgggatactagtttgggggatttaatgcttgattatttctccaatattttttttggccaaacttggtagttgggaagaagtgttgagttgtgttactcccaaggttaatgaggagcaaaataattttttaatcagaccaattaaagatcaataagttaaagatcctttgttccaaatgcatccggataaatcaccggggcctgatggaatgaaccaaaagttttttcaaaaatactggcacattgttggttcagatgtgatagcttgtgtacagaatttctttacgactgaagagatgcctgatggtttgaacgacactaatattgtgttaatcccaaagaagaaaaagcctgatcaaatgagtgagttaagacctatttctctctgtaatattgttgctaaagttatcactaaagtgctggctaatagattaaaaggtttactcactggtatcatttttctgaaccaaagtgcttttattccacgaaggttgatcacagataatattatggtgtcttttgagatccttcatgtggtttatgtgcttatttgatgatagttt

SEQ ID NO: 114324 - DNA, 2075 bp, Cannabis sativa
taaacttatatgaaaaggaagtacaatttcccattttgtttccaatataaacattccaagaattacataataataataatggctgttttaaaagaaatgtcagagcaagacaatgccttcgacgacacaaaggactatgacaacgttgtagtacccgattctcagtctgattccgactccgaccaatcaatggctaaccaggccaaacccaattccgatccctcgcaaaagccatttgattcgaaagaaaatgaaaagttgatgaaacaattggccgatgcccaagccatgcccccaccacctccacgagtcaggctcccaactagtcctcactcagatttggagaagaagaagaagaagaagaagaaaaacaagaataagaatggtggtgtttcaattgtttcgaaaccccattttaagaagaagaagaaaaagaagacgagtaagcaacaattggctgatgagaaaaagaagatgaagcaagtaatggaagtgggtgatgatcatgaaacttcttgtgagagagagagagtatggagtgaagatgatgatatatttgtgttgcaaaacatggttgaattcattgacaaaaattgttttgattacaacaataatattatgagggagaagatcatcaaggattcgtacgatgttattgttgccaaagccgaatcactgtccctccaaccacggctatctcagaaacagttgattgagagagtttctcatcttaagaagcaatttctagacaatgacaatgatgatagtttctccaatcctcatctacagaaagtgtacaatctttcaaggttgatctggggcactactagaaatgaagatgatctcaagaagaagaagaagaagaagaagaatcttcaatccatgcttaaggattatgtgtctcatcatggtttacatatgagttggattgagaaatcaaccaaacaagctttgggtgataagtggttgagatttaaggaggaagaatgcaaatatttgatgcagaaaggaatatttgaatctaccatgcaaactgtaaaacttgatgtttataggaaacgttttgctcctaatcaatagttttattacatctattttttactttttcattatttcatgttatgttcttgtgtttgtttgtttgtatggattttaatggcaaaagcagttttaaaataaaacacttactatattcaatgattttagtaccctgcttttacttttacttttgcattatgttcttttgtttggattttaatggcaaaagcagttttacttttgcattatagaaaatgacattctattaatcctttaaaatagaaaatgaccattattattattagttagaagacttaatctggaattgagcattcaatgagattacgtcatttgtaatgatctaattggtcatgttgactatgagtttaaatcttgggcaatatggcattatcagattaatgaatcttaatttctctggtttaagattttggttcatatgcaagtgtaatccaaaactggagaacattacaacaacaaaaaagaagaaaatatggagataatatccaattaaaatactaaaaaacaaataatcatatacaagtacaaatatatatcctcaaccaattgatcaatttctcaagaaaaagaaaagcataataattattgtgaaagtgaaggtaataatatagagaaaagggaaaaatgatttaagaaaatgattttcgcttgagggttagaatttgagcttcaagatgtcctctagaaatcaaatattcacattcccttaccttaaacttcttccacctagtcactaactctttcaatttggactcatatgaaatgtcactaaaatccatcttatgagtagccaaataatgctcaagtagtaacttcattggatgattttcataaccaaactctttttcttcatctgagtttttgtcttcgaaatcagtacaactaatattattattaatattattatgcttattccaaaagatgttacaaagctcatacatcttttggtcatgaggggttgagaaagtgagtgtttggctatgaagaaatttggcctt

SEQ ID NO: 114325 - DNA, 2717 bp, Cannabis sativa
ccaacggtctagctatgtgttttatattacaacctcagcaaaacataacattctctaatccatgtgggacaaaacaatacttgatgcttgaactatgctctacctcaaatccatgtgggacacaaaacaatgctggatgcttgaactattctcttgaacgctttctatatttatatgtctaaatcttacatctttcgggaaagaggagaaaaaagggttgtaaatgcaatgatgtaaaaatatagtcgatagttacaaacctggtagcccagctatactgctgtcatcgatatagcagcagaacgaagcttcacaccatcttcatcccacttggactctggggcagttgctccagctataattgcctttatcatagacaagggagagaatttttttttctttgtaagacacatattaatttaagggaataacgaaaaaggtctagagccttagaaagagtataacaccaggatcttgacataaaattcacaaatgaacatagcatgccctatacatatcgaatggatacttatgatatttccattttccagtgtaattgagtgaaggaaataaaatgccattcttagcttgtgactttcaacaataaaagttcatgtaaataacaaacctttccactgttaacagcagcatacaatgccacatgctggtcgtatcggccaaattcatagaagtaataagttctgaaacatatcaaaatatataaatattatttatgaagaaagataatataaaatattaatcggaaaggtttcttaagaagagtactcaataaaaaaaaacattaatttgtgaatagaaatcgtaaatatcaaatgggaagtccttagtcacttataaatatttatagatacatgttgatatgaaggaaattataaggacaaataggcagttctgagaagcaattaaacaaacagggataaggtttctgattatgcccaataggtaggcaaacctttccattttatgctcagatacacaggtcatcagtttgaagatgaatttacctgaagccttcatcttcctttatttttattgttctagcggaatacaaagttgctccacctggcattgccacattgtcagaataaatagcatatgctatatatatagcagaaggaagagccaaggaaagatataaagagtcactgatttcagatagtaattgtcaagctaaaagtgggatagaaagagtaaaaacatagaccaactccgtccagaaagttgatcaaacacaaaaattaacagcaacagaaaaggaagagaaaaatgcaaacctggaacaaagattcttgctgcctctttcaaggaacctaaatctgttatgtcttgggcctgtttaattagttaaatatcatgtaagttgcacggaaaattcatcgaaatataaaaaagtatgtcctcatcacatagatgtgaaataaaaaaaaaaaaacaaaggatcttgcaaaagcaatgagaactaatgctacaaacctctaaaaaggtgatcttgagttgattggtcgagcgaattatgacactaacaacttcagaactatatgtatgaacaaataacaagaagaataatcaaaataaacttacaaagtacggaaagctaataagattgcaataagatcagtactctaacaagccactctcagaaaggaaaagaagaaaagccccccttataataaacaaaatgaaacgtgtaaaaaatatgatagatgaataattgagtgaaaaaacacatagaagattaagggagtttcatgtaaataaatacacacccatcagaagatgcaaaccgcgccgcaaaggtcttcggttttaccttatctccataaagagacaatccctcgttgaaatcctaaaaaaataaatatataaattagtctttaagaaaatataatgaaaaaggaaaaaagtatgggtttatcttgttccagctaacatgtatcgcttaaaatcgcaatgcagctacaaggagtacagcttccaatttcagagcaaacataaaatctcaaatcatatataggtacctcaggctccataacgtcctcaaagtcaggggggatcctaatggaaaatccattgccaaagaattggaaccaagatttggtgttgacgatgccggaaagcgagggcttcgccgatgccgaagaacgggcaagtgggaattgcagcggggcaaaagagatgaggaagagcgaagtgaacttgttaatcaaatgtctcctggtgccagtggggagagtggtacgagtagagtttgcagtggaaagagaaagggttttggggattaagtagggtttagggttcagggggtgagggaagagtgagagggagagaagaatggccatgagagaatgaagaagaaggtattcatggctcagcaaattttggagggagatgataatgtggggacaccagcttttgtaatgaggatcagtcaggggtagtttcgatatttaagtctaatgtcgttacatgaatcagatgaagagcgttatttctcgtttgtagtttaaatgggtttgctgtcgttaattgactatacgacaggtcgtttctccgtatctaaacagcatactcttcttaacatgtactttacaatagctaagataagaaaatagagaaaattatattctatactttttttatattgttctcttttttaaaatttattatttttacctctttttttaaacattgtacca

SEQ ID NO: 114326 - DNA, 4865 bp, Cannabis sativa
  modified_base (4813)..(4836): a, c, t, g, unknown or other
gagagagagagagagagagttaagcatgcaagtttgtgaagctagaaacatagttggggccataaagattgcgtagtactatctcacaccacaaaatacattccctcgcatagatacaatacatcatgtatatgtgtggcacttgggattaccataccatacgcattgaatttcataaagtgacatggaccatgattgattaaaaaaactttatactcatctttattaattttttttttttaaaaaaaaaaaacaagtaagtagtggtactcatgcaatgcaaagaaaaaaaacagtaggtaatcttaagttccatacatcatcacagcattgtgatgacgtgatatatacatattattaaattagtataatttataaagatggtatagtcaaatcccccgatctcaagcaaagtccatgtgggtcttatgggtcgccaacaccttaaacactttgactttcaaaatttcttacagcacattctctccccatctctaataaacgtgtataaatcggttcaaatatgtaactttgttatctcatctttattttccttttatttttttaaaaaaactaatatagttttcctgttttgtccaaacgctgatattgaaagtgcaaaactgttgatacatatttatacaaagaaagaaaaggatgcctagtgagattgagaattgtgagactgttgttagagaccctcgtccggtggttaggaaatttttggctaggcaacaacacgaagggttaggtgccattgttagaaggagtattggcaggtgacactttgcatacaaaagccaacatggttttattttttcattaaatttacttaatcttttgagttttttttttcttctcttgttaatgggttcagaatgctttcagatttgagctcaaatactttgatccttttcttgctttggatgaattttcaggtgggtgttctctgctttttcatctattcttctttatttatatttacaatttggtttcatgagatttcatttcatttttctatgtgtatttcagttactgctccagctgggtttcctgatcatccacatagaggttttgatcacttgatttaagtctcttttgtcattgatatgacatgttgcttaagttctaactctttcttcttcttcttttaaaatctcagggtttgagacagtgacctacatgttacaggtatagtcctataatataaattatcttaatcttgaatcaacttatattggctatattaattttcaatcaatcacaacatggcatcaaatggccagtgcagcaggcaatatggtagactggttttactttttattagccaatatcagggcgaaaatgatctgggcctttttttaagggcaaaaaagttgtattttataacataaaaaaggaaaaaggaaaaaacaatttatttatttggagttactttgttgtaaaatatgaataattagggagctgtgacacatgaggctggcgatctgcaatggatgactgcaggaagaggaattgttcactctgaaatgcctgcagcccagagaacccaaaagggtctacaattatggatcaacctctcctccaaaaataaaatgtaaaaacaaaatagcatccttttttttttcaaaaaatactaatttaaattcgctaatgcaatttaagaaaaatatgacacataattctccaaatgaaatagtttactttttcccaaagctgctttgaattattgatttttggtgtgaatgtgagaaatctatgtaccattttacccctatatcatggttttgaagtaacttttcaaaattttggcagcctgggactaatctcctagaataaatgaactacaaatctataacattattcctttccaaatttaatttttatatatatatgtaatgaattcaggattgaaccaaggtatcaagaaatgttgagcaaggacatagcagaagtagaaaaagatggaataaaggtaagagtgatagcagggcatgccttaggaaccaaatcacccatctacacaagaacaccaaccatgtacttagacttcactcttaagtcaggagcacaccttcaacaaccaataccagtatcatggaatttatttgtgtatgtcttagaaggtgaaggaatcttttgtggaagcgatggtggttcgaagctgatctcgccggtgacagctcaccaccttcttctcctaggatctggggatggattggaggcttggaacaagtcttcaaaataacttagattcatcttagttggaggagaaccattaggtgagccacttgctcaattgggcccatttgtgatgaacacacaagaagaaattaaacaaacaattgatgacttcgataactacactaatggatttgagaaggcaaaacattggagatctgaagctgctactgcacttggattttagctctttaatttcttaccatttcggaagaaaaagaaatatttgtttttatttttttggttttgtgaaccaaaagatttagagaaatgctaactagagtttcatgaatatccatgttattagtgtaaattaatattaagtaccacatatttttcttgtttaagaaagatttcatttcattaattgataatgtcactcttatcggagaacttgaattaatttatattaattattttaaatagaacttatgagaaaaaatataaaagttaatataggaaataatgtcactaatcacaccccaccttgtcttttttttattaacaccatactacctttttttttaagccacataatgatttcttcaatttataaatttatatctctcttctatcttttaaaatatattattttatagcacatttttacattatttcgtatattaactaatatatttgttttgtatttcttctttatattatatatataatatattttaatatatataataaatattaataaatttaaattaaatataatttaaatatgattagttaagatccgtacttctttacatataaaggagaagagtttgaagaaaataaaaatctttacgtatagaattatttatctgatggaaggtatttttttttttggttctttattttttttttaggtatagattcttcaccccactcaataattaaaaataaattttgttaaattggagttttaattaataatattagtgttggacgatgttaaccaataatgtgtattctgttatttgttagttgagattagttcactttcagttgtaactgtcaaagttagttagtttcaattcttgctttctttgtaatgttgaactatctctataaataatagaaactctcattaagagagtcaatgattccattgcatttcctctgtttcttacaatagttttctctggtttttacctctttctattggttttcatttctacatggtatcagagatcaagctgattggggaggagaataccggccctttgcaaagtttttaagagatcaagggattcatttttcacatccatgtccccatgatcatgagcaaaatggtcgtgctgaaagaaaacatcgacatgtgacagaaacgggtctcaccatgcttgctcaggctggccttgacttgtcttattggtggttagcttttcaaagtgttgtcttcattataaacaggttacctactgctgtgttggattttctcacaccatatgaatgtctatttcaaagagaacctgactacaatattttaaagacctttgggtgtgcttgttatccccatctaaggccatatcgatctcataaaatggattacaaatctgaaatgtgcacctttgctggctattcctctcatcataagggatatctttgtgagaactctcaaggacgaatttacatagcacggaatgttgtctttgatgaaacttgtttccgtgctaccacaacttcagcaacaaactccaattcacaggtacacttgttttcttccaatgctttacctactgcattttcttattttcctactagtgtgacatcttctaatgctactgtttttcatcctccacaccatcatgtacctgttcctatatcaccctcacccgatcttcaacatgtctcccaaacacacgttaaacctaatcctattatatccacacaacccgacccacaacctacatcaagtagccaaccttcctcagataataattctacacctgctatatcacctcagatacagccccctttaccacgtcagacacaaccccctttaccatctcaaacacagccccctttaccacttcagacacaaccctctataccacaggtatcacccgttccaatcaacccatctgctccaaataattcagttgctgcaggtgtacaaagaactcatccaatgacaactcgtgctcataatggcatcaagaaacctaagtcgtttttagcttctaaacatcctttacccgaagctctcttccccaaagagccaagaacacttaaagaagctttaaacaattccaaatggctggcagcaatgaatcatgaggttgatgctttaaagaaagcccgcacctagacattgattccttatcaacctcacatgcatatcattgacaacaaatgggttcatcggatcaaactcaatgctgatggaacattggataagttcaagtctcgccttgttgctaagggatatttccaaaccccaagaattgactatgctgaactgtttagtgctgtcgtgaagccagccactgttcacattgttctatcgcttgctgtcacctccaattgggaagtaaaacagctggatgttagtaatgcctgttgggaattattttaccannnnnnnnnnnnnnnnnnnnnnnntgtttattaacatcctaaatatgaccttt

SEQ ID NO: 114327 - DNA, 3210 bp, Cannabis sativa
aagctccaaatgcttttgcacaaaatgctcaagctccaaatgcttttgcacaaaatgctcaagctccaaatgcatttgcacaaaatgctcaagttccaaatgcatttgcacaaaaagcccaaggtccaaatgcattttcacaaaacgctcaagttccaaatgcatttgcacaaaacgctcaagttccaaatgcattttcacaaaacgctcaattttcaaatgcatttgcacaaaatgctcaaggtccaaatgcattttcacaaaatgctcaaaatggtgcccctacttcagtttcaagctttagtcaactgggagcatcactcaatgggcagaggtaagtttcaatcgttaaaatttattcttagttaattatgatgttggaatttctgctcatggctgaaatcacctctactgtttgggcatattaggcacacaattaaataaattttatcaaagaaaaatgatctttagttgacctgtatgtaatactcaatttcctgttttaaggtactgtgaatcttggtgcaaagtctgttaatcaaatcgttgactgcagattaaattggcaacttagcctttacaggcaagagaattaataaatactcattatagcctagtttgacagacaacaaggaagaaatacaaaataaaagcaaataatacaaaggtggaaagatggtagcttagcatagttttcgggtagacctacctaactgggtggccgtcattgattcctctgctagtaaaaagctgtaaacctgttcaacacagaaacgattgtcagattatgcaaggctgtagtggccatctctaagatattacaattgtaggtaatttagactccagatagcatgtcataggtttgtgagctcaaaagttggaatagatacttggtgattgttggtcaactttggcatggaatgaggtgtacttatagaaggttgtagccgaaaaacatctaacccatctataatgtgatgttaatgttaggccttaggatattaaataatgagggtaaacgggtcattgtaatggggtattgaagtagtatatgtaagagtgcattggaaagggttgagggcgagaaaatgagcaagtgtagctcttttgggggagaggcactgggtctctcgaatacccagcaacattgttatcctcttcatctacatcaatatacaattcactatttttctatatatgctactgtaatactaaattgataggaaatctctatcagttaataggtctgaaatatgttcagttacaagagtgtaatgaatatcagaaacataaatggctcaaaaagtatgaggtttaagaactcatacttttaaatgtataaatacaagaaatgaagtagcccctgtctatcaacacaaataaataaaaatcttgttttcttgttcttctctttgcttcttaagtagttgagctattgtttgtcaggccttctgcacctttaagcaatgcttttagtcagaaaaattcttttggagtttctagccagacttcaagtgcatttggaactagtaatttgtcatctcaaagtcaaggtaaaatttcagagatatttttatttatggtgttctttttttatttgatttctaaaatgacatattcctatttcaacaggaagccctttcgctactgctcccttcagcaatactagcttcacgagcaacccaataaccacatctacaggatccaatggaccaagtagtacagggtttcagcaggcgtaagtctctcgatttcacttcttgaacttgggtttggaaaccataacatttaatactagcctaggggaatgattcttgttgtttcgtgttatattcattactatgctttcaaaataacttgttttgcaaatcttacaggaattccacacaaagcgaggttccatctagtgtggatgcaagtgtatggttgaaaaacagttgggctcctggagaggttatattccaagctatttattgttaaaagagaattagttatttgatatgtcacttgtgttttgagttaaaacttttgcttctttgtttgctagattccggaagaagcgcctcctgatacattttgttgttgaaggatcagagttccaatgtctactgtatcaagagaacatttctcatgagctgtgcgattttttcggtcagtacatcaagctcgcaagaccaccgctactgacaataaaaatgcagaacaatgcacatattctcgcctatcatctccaactgggaatatacttcaaagaagatggtattagcctaggatttaagaacacatgttattctcttgtttaaaggtaatccttaggatttgaattgtggaataagtaggtttcatgatttctggtgagaattctgtaaaactaagttttggattcatgtttacatagttacattgtactaaatgaaatataaagaatattattgattgaatcacataactcattccttgagggtggagggtaattcttgtttttatgttcaattcaaaatttcatgtcaagctcaaattctgtacacttactttaagagtaataaatatttcatttgtaatgcacacaattttcttttgggctttttttatttgcatactacaatttgtaaaatattactataataatactataaattaatatatattacatatctattgtgtaatatctattttatttttaaaataatgatgaggtaagaaagattatataattgataaatcatgtaacttttctttttgatttatagttaatttgactatgcattaataataataataatatatttatggtgtattattttttttgtaaaattatttaatatatattattaacaaaagagaagtcaatatttttgaattttcaaaacaaaacagccgggattgtcaactgaaaatggtaaagaagacacgtggcgttatataattagtgcattaaaaaagttccatggagtatgagaatgtgattatgtgttacgtggaactctaatgtccatgcatatttattatcactctctcaatttcattctcattcttcatttttctttctttcttgctttcttctaattcaattcaattctctctaattttctctaaaaatggggaatttaaaggccattagcttaaaaattctgttcactaccacaggtttagccatgttcatcactctaatttacaccataatcattacaccaatttcagacataacag

SEQ ID NO: 114328 - DNA, 1393 bp, Cannabis sativa
tacacagtctctgaatcatcccacttgaccttccctaggcggtgtgggattgtatagcttacccggtatttctccttacggatcacgggactactgactgtcacatggatcctgtccactgagaaccaagacatggagactgatatgtacattcttgggagacctctgactcatggctccagttttccttttactttacttgcacctcagaggacccgtgagtcacaaaaacttatcaagaaaagcaagtaaatcacaatcctcatatacaatattagatacaaataatattatttttacgttagttgtcaaaagacatgtatgaacagtaccgttagtttataaacgatgcaataaaaaaagttattcttgtctattttgcaaagacgcaaactacaaactaaaaaatttagatttgaagtcggttccagatctgagattccaccgctaccaccacctgctacctaaaagacttgccccaaatccattttttttagccaccttaaccaatctgagcctggccaatattttaaaggtatattattttgcattcgttttgggtattgattaacgtattaagtgacaaaaaatatcttttttagtacatgagcatagttatttaaataaattaattcatcaaattaattaatttcaaaaattaaactaagatattacattttacatgtgcaatcgagaattcaatcctaacattaagtcatatatcgaccgtttgatatataatctaattatacttacttcattttctaagatatctatgaattctatccacacaagcaattgagatcaaaatcacatgcattcttaaaatggtaaattgtacaaataacctattgatccccaaatttttcatgagtataaagagaacctccatttactctgatgaataaggcaccttgggagcctattagtaagttagatatatatctccgatcacggcacaaatgagccccatgtgaactcactgtcgttgactaagtgactcccttgagattattcgctcgcggcccaaacgaatgcaatggctctcggtccttgcacggccggggctcagagctcctcccttgcactactaccatttgcattcgtgagcccacacaagcctccactcgctcgtctcacaccaatagcttcataagggagccctcagacctttccttaagcgtgattagtattgactctcctacgaggtggcacaaaagacgtgtaggaggaaggaaaagctagaggtacgaccacgccacctataaagctttcaagattgtagtggcagtataattaggcataagtatagttggaacaagaggcacccacgactttgacatttgttgtcgagtgattttcgcaacaccaaaaagtataatttaattgataa

SEQ ID NO: 114329 - DNA, 1804 bp, Cannabis sativa
  modified_base (43)..(54): a, c, t, g, unknown or other
tgtgaacaatgcaacataaaatgatttctaatcttttattaannnnnnnnnnnnattatattgaaatgggttttgtttagggcacaaaactcaacacataaactaggatattgatggaggattgagaggtggctctaagagagactaatcaactcttacaaattaaaaaccatggctgtaataacactgtagaaaacttctgaaaccaggcttgaggggcctattcaaggccatacaaggccttataaagtttgcatacatgattagggtatattggatcaacaaatcctgatgattactgcatgtgtatctcttccctataagtcaccattaagaaatgcattattacatccaactgcctgatttcccaaccatttgttacaactatagtaagtataactcgaattgtaatttgcttgaccatagggttgaaagtctctgaatatttaaaaccaccttgttgatggaatctcttagccactaggctttctttgtacctatttagtgagccattaatattttgtttcactctaaacatccacttacatcctatagaatagttattttggcaggaagaggaaccaaaaggtccaaaacccatgttttgttcttcttgagaggaaagaattatgtagacatagcctcaaactagtgaggttcttaaaaggaagtctttattatttttgtttatagatagccaacaaggctttaggatttatgatgcatgctttaagtccggttgtcataggatgagttaaagtaaactataatgtgttagtatctacaagtaaagcattagtaataataggcagattagttgtggaaacattaataatagaaatactgtttgggataatagtggagaattggacaaggacatcaacaagattatcagagacaagtataggtgatggaccagtttgagagttggaagcaacaggctgaggcattggagataagatagtgacatatggtagataagtagtttgagggacatgtggtgaaggtgggcgatgatgaatagggattggaattggtaagctagaacctcactacaagaaaaagtacttttgctggtgagattttacgatgacaaaggttaactagaatcgtcgataaaattttgtcagtgagttaccctaccagcattagacggtcgagacaaggggtttttctagcaaatgtagttagttcgctcgtaaaggcacttttccccgctggttgagctattttcgacccatctttcccagtgagtttagtcaccgacaaaaaattattgccaatttttaacttctcacaaaagttttgtcggcgcaagtaacttcgctggttaaacctcatgtgctctgggcccatacaacaattgaaaaaactacaacgacacatactctattctcactggcatttggctcaaaggaaatgttgccagtagaagtgaacattgtgaatcacaggcatgaattctacgaccagtatcaaaaccaagaactactcaatatatctttggatctacttgatgaaaaatacactgagtcacaaatcacaaatgatgcttattaacatcgaatcacaagacacttcaacaaaagagttcgaaagagactcttcaaagtagaagatttggtgctgagacgtgtgtttgctaatagggttgtacatcgatcggtttgggcagtttatcctatatatttttttaactcaatctaaagttcaggttgctaatattaaagtgcaacccgcccaattttaaaaaaaaaatctataaaccaaccagcagtttgggcgggttaacccgcccaaaccg

SEQ ID NO: 114330 - DNA, 1641 bp, Cannabis sativa
gacccttttagctccatatatatatattgttgtttttggcctcagatttgaattgtcaacattagctcggagatgtcataactgtcataactaactttctgttagcacatcaacatccttattatccttattgtccaaatcctataaatgggatcctctccattctagctaaatcatccagaaaccaagagtgtgctactgagagagaattagagaaaagaaagagagaaactagaattgagtgtgagaaagatgagtgcctctttgtaattgaaggcaaagcttcactcgagtggttatgaactgttcttgacagttcttggtgtaactttctggtgtacattctctatcaataaagattaaatgcccaaagggctttctggccgtggagtaggtagaataacaagctgctattcctgctcgaaccacgtaaaatctatctccaatttactgtttttgtttgttcaattcatttaaattgcttagcatttgctccacattcctgtgctcatttctataccctgttttgtgtttgtcattgtgtttttggtcgactttttcttcaacatatatatatatatatatatgtataaatataaatatatatattcaagtttggatgagcttgagcatgataaaatcgaaatgggttttcctaattgttcaattcaacatctttaatcttacctgaaagatggaacgtccactgggtaaccctgagatcctcttaacacctctttgatccacaatcctagtagctcgctcaaagttctttccaaacaagaaatttaagctaaatttgaagtaacaaacataacttaacacctatatgaactttaaataaacccaacaaattacaacatcaataacaagttactcacatggagagttgctcatctgtcactgtcccatttcacattgtttcctctcatcaaaagttaaaaacaaaacgaaaattgcaatcataaagcttaaggaaataagtacaataagaataagtaagttgaaatagaaagtattacctaaggaagttgattcaatttgtttccacacgttctctgccactatacgactacaactcatttctctttttgctgcaccttacaacaattgtgaatgttagttccagcaaaactagaaatttcggttttgaaaactaaagaaagcttatttaagaggctcttacaggttttgaatgattaaattatcagaaaacagcagtgaatctccgttccatttgggaaagcactccagatgtttgatgtaatgccaaaaccaaaattagaaaaactgaaacacgttcctaagagaaaaaaaggaatttgctttacccacccaattacaaagaaaaagaataaaagtaagaaatttacaatgggaaatcctaaataccctttatattacactttatattctgtacgtactctcaaattattattattttataaagtgaagtgctacaaaatactcaaaaattccactaattttgactgttaatttagattgtctatatgtactatacacaatgtaaacataattagatttgtctacttaaattaatcatttaaacatgattaaatactattttggatcgtgtattttgcaaaaattaccaattagactatctgttttgttaaatga

SEQ ID NO: 114331 - DNA, 1371 bp, Cannabis sativa
ttattcttcactattacttttattgcatttatcactgttatttgtttagctaattaaatgtttcgaatttggtcaaaatattgttctcagatgtttaaattggagttaatatcatatgggtattttctaaaaacgagtaattctcgactgaaaccgtgattggtttttcaaaatgtacatcatctcaaatcccaaaattacaagtcaagataagtattagtcattaaccaaatgaactagcttatttggcctatgtatatatatattgagaaattctaataggcaccaccagtggtgtaccagtggtctcatataatttaatataatagtttttaggaagtatcgctagctaatcgcaacgcgacacgtcttaaggttgttaggcaccactggtacctaatagcaatgctcatatatattacatgaaatacaatgttgaagttgaagagtacaatatatagcttcaattattataccactaactttaccttgataacttttggccattttttcaggtgccaaccatggacaattgcgttgactggggcttctgcaattgcctgtagctggctgatcttacactcagtattagtcactgtagttgtatcattactgatatgcgcatggtggtacatatttttgtactcttatccaaaggtacatacatagtctattttgcttgctttccccctctcttgtcctatatctcaatgaaatttgccatgtattcattgaagatttcattattgtgttaggcatacgaggacatgattgctgaaagaagaaagagggtgacaaacggtgttgaagatacgtttggattgaggaagagtcagtgatactaaaaacaaaatagacatgagtttctttcctgtcttttgtaaagattttatgtaggtctatatattaattgtatgatttcattgttgaaatttagaccaaggtgtttgccttcaaatgaatttgaattccaaggaaaaaaattgattacatttcatgaaaaagaaaattacaggcattgcgtggttaataactttacaagtattgattaggggtgttcatataattcgtaattcgtggttctaaaccccaactaactcggaccaaattatttgagactagactaaataaatccggtgtagatgatttgatcaatttggaccgctttaaattttctggttcgatcatggttttagaaatctcggtagtagttcaaactaaaccaatttatacaattattacatatatccttaatatatttttcttttgagacaaaatgttgatatttgggaataattttaagtagaatattgatattgagtttatattgttacgataataattttttattgttacttattaaaagtaaaa

SEQ ID NO: 114332 - DNA, 1203 bp, Cannabis sativa
  modified_base (48)..(55): a, c, t, g, unknown or other
  modified_base (1124)..(1162): a, c, t, g, unknown or other
ttctgtttctttattgatatttaactgatagagattacattgaaatannnnnnnntttagggcataaaacccaacacttttatcacccgccttgccaggaataccatctcacctatcattcctcatgccaaccctttccctgcacttcttgagaaaataactactcaggaaaaaggcaaaaaaattgctactattcctcaaactttgcctattctttccaacatttctctgccccatcatcaactattgcctaatctctctatttaagaaaataaagccactgatctgccttcatcttcttctagtaaaggcattgataagcatgttactctaggccctactctcctttcatcatcttacactaaaatctctgaagaccatggtaaatcaattaaggataagggtgaatcaaggctcatgaatgcaatcaatccactgaacattgactcttcatttaatagatctgctacaagtgttcctatagctcctattatgcctacccgctgcctacacacatatgactcatcttcaccctactacatctccattggatcaagccacgtcaatctcagttgtgactccaacaatcaaccttacaccagaagtctcatctgctgcaactcaaccaattcttcactcaccaaattccatactgatgaatgaaattagactgtaatctgtgtttgctaaaaggaaaattgttacaacaagaggaagtgttcgatctgtcctgaaacaatgccgcaccagatcatctcctctctcagattctacaaccaaccctatgcatcaacaacctcatccctcttctgaaatgtcttatatttcactgatggcggatggaagtgatgcttctttggcgcaggctgaaattcagcctcaccaatcatcatgaatatcatttcttggaattctctgagcttgagcaacccgagagcattcagacaacttcatttgctcatttctcaatgtaatcttgatgtaatttttactatggagtctaaacttagtgttgggtctattaataaattccaaaatgttttaaaatatcctaatggtattgaaagtcctaaattaagtaggtcttagtgggggtctgttggagtttattttaccaggatctnnnnnnnnnnnnnnnnnnnnnnnnnnnnnnnnnnnnnnntgaacttctaaaacgataaaaaaataaacacatataaagtt

SEQ ID NO: 114333 - DNA, 3480 bp, Cannabis sativa
aattaatttgttgatgctgtctgtgcctatatatagattggcttgcctaatacttgataacccggataaatttggattgcaaactttatatatctatacatgtctgctataatagtactggcatttttcatgcgtatgtgcaaacaatcattttttttctttagaagcattcatataattaagaacatttgtttgattaattcaacacacttttggtaaattggtctcaagaagtacaaactctcttggatatattttgattgttagtttcttacataatataaaatcactatgtatcgagtaagaccaattctaccttgctacttaggaagaatcaaaaaggcttccttagaagtaaacattatgagtaaggattgtgataattttgagtagatatttgtacaaaacttggtgaatgtttgctaatccatttaaaaaaacaaaacaaaaaaaaaaggctttttaagcatcattaaggaaaaaaaaagtgaaaaaatagctataataatgtcttctttctcttaggtgattattcaacttactttacactacatttcttttttctgaatcccaaagccctgtacttggttcttcccttctgccctgcacctaattttgagttaaaattgttggcaagtgcaaatatattactttttcccccttacttcatttataactttcacattccatggattttggcctcttaatttatttgggtgtcagcttttgaggggtttggtttagagtttagattcaaaagttggtcttgctttttatttaaaggtataggtacaacgtgtgaaggttgtcattttggctgtttgaaaatttgggatgcttgacttgttattctttcatgtgcagaaatgtaaatgtttgtcactaatttgtatcactggagttctctcaaaatcctaacttcaacaaaactcaacacatcacattcacataacatttttcggtcatacaatttcgtttctcgctgttcttcctgtgcctctcaccttttctcaacattctcttgcaaaaccagtctaaacgaacaatcatgcgtgcaatatattcagaggtgtgggaccttgaaccagctcaaacaaatacagacccagattttcatggccggattacaccaaagtaggggtcctatcaacaagctcatggccttctgcacagacccatctcttggtaacatggggtacgctgaaaagatatttgatttcattcaagaaccatctctgttcatttacaatgttatgcttaaagctttagctaaacagggcagcttcaaaagagtggtttggctttttaatcgtttaagagtggttggcttgtggcctgataatttcacgtacccatatgttcttaaagcaattgggtccctgggagatgttcaagaaggaagaaaggttcatgggattgtgattaaaactgggcttgagttcgatacctatgtatgtaactccctcattgacatgtatgctcaattgggtgaggttcaatttttcaccaaactgtttgaggaaatgcctcagagagattctgtttcttggaatgtcatgatttctgcttatgttaagtgtaggaggtttggggatgctattgatcttttcagatgtatgagagtagagagcaaagaaaagccaactgaagctactattgtgagcaccctatccgcttgtacagcgttgaaagatatagaacttggtaaggacattcatgattatgttagaaacaaccttgatttcactgtcagaatcaacaatgcattattagatatgtatgccaagtgtggttttttaatcgacgctcgaaagatttttgatgagatgccaatgaaaaatgtcatctgttggactagtctggtttctggttatgtacactacaacaagttggatgaagctagagagttgttcgaaagaagtccgtttaaagatgtggtgctttggacggttatgatcaatggatatgtacaacacaattgctttgatgaggcaatttctctattccaggagatgcaaagacaaagagtgaaagcagatagatttacagtggtttctctcctcacaggttgtgctcagttgggagtattagaacaagggaaatggattcacggctacataaacgaacatggaatcaaaattgatgctgttgttggcactgctctaattgaaatgtatgggaaatgcgggtgcatcgatgaatctctggaaattttcgaaggaataagggacaaagatacagcctcttggacttcaattatttgtggactcgccatgaatgggcaggcaaacaaagcactagagtttttctcagaaatgaaaagagttggcattaaccctgactatatcacatttattggtgttttaagtgcttgtagtcatgcaggtttggttgaagatggccgccggtacttccactctatgacaactctgtacaacattgagccaaagttagaacactacggttgtttgattgaccttttcggtcgagccggactgttacatgaagcagaagggtttatagaaaagatcccaaatgataatattgagactattgttccactttacggtgcattgcttagcgcttgtagaatccatggaaatgttgagatgggggaacgggtggcaagaaggctagcagatattgaatcaagtgattctagtgttcacatgcttcttgctaacatttatgcctctgctgatagatgggaagacatgacaaaggtgagaaggaacatgaataatctcggagttagaaaggtaccaggatgtagttcagtagagactaacagtttcgtctgttagtattctattagagatgtgagaacactagaatgaagaaatccttgttgagatcaatagagaaatctgcaccaagagtccaattgcatcttcttgtgtccttattgttgaagctatgaagagacatttgaaagagtccaactgctgcttctacttaccatgttcttcattggcctagtgtggtttgtttaattaaaatcacaaagccccttgtgcatgtattaagaatagttgatgggattcacttactgttcgtttcttacgctgaattagataatattgatttgtatagtattattttaaattgtattgtatattatatttttgtgtaatattatgttaaattttgatttatataaaaatattgtatatcacacaatactaaaatatgtaccaaatgttggctctgtgaatcactttgttttcaagttgtaaaggagtgttgggaggaatatctttcggtggcgattcaagagaaaattcagcggtgtggggagattctctcggagtgggaaaaagactactttggaaactttgcttctcgcattaaacactgaaaaaatgaggtgagatgatggaagaatggtcgtgatcctgatgccattactaagtacaaaggggccgagactgagcttttcgaagttctcactcaaaaggaggttttttggcgccaacgctc

SEQ ID NO: 114334 - DNA, 5839 bp, Cannabis sativa
  modified_base (26)..(34): a, c, t, g, unknown or other
  modified_base (1428)..(1431): a, c, t, g, unknown or other
tgaaatcacaaatttgaatttctatnnnnnnnnnaactacttaattaaaaaaaatattaaaaaatatctctttttacactatttcaaaaatattacattttggaaaaataaaaatacataaatatatgctatgttttcaatttgattcttttttttcaatagcattataaaaatttcaaccttataaacacaaaataaaataaattcttaacaattatatatgctaacttactattacctattattaatacataaaccattaaaaaatgaattctttctcatttttttttttacaaaattaataactaactttgccctcaataaagtgttgatcttataaactccaaagaacacagtcggtgctttaccaactatgctaatttattttcttacaaattttgacgtacatttaaatatattacatgtttctacatattatatataccaatttttaatttcgggcttccaaaattatggggcctggagcctaggccccagttgccccactctagggtcggccctgagatttggagggtagacagctccaagttctttgacgagcatcgaggaccttgatgactgaaagagtgaaaaagaaggggggattaggactgaaatagagacaaaggaacaggatagaggggaaagagaattgtcacaagagatctgggtttatgggattagagggccacctaaaaattgcttgaccatggagaagaaaactctgatgagcgaacatggggcttgggattcaaagactctctagtttgataatgcctttgttgcattgtcttgtggccagagaagctcagtcggagttagccgagagctcgtgagcggagaaatgagacttcaagctctagagacctttattttccttaggtatcgtcgattgagcatggattctttttccttagggttcgacaaagctacaacacaatggggttatgattttttattctggaaaagatacaaaaggaggtggtggaaggaataggttgaagagatgatgatttaggtttagggttaatgaaattagggtttattataattaagttatgatatttttatttttaattaatttattattatttttattttaaattagtttattttaatttttattttaaattaaattaatttgtttttaaatattatttgatgtggaacaataaaattttgtcatgacgtagacaacatactgagtacacatggtagtccaccttgacagttaatagctaaaagtggatgaaagtgacaaactgctaacagaacatgagttttaggagttttaccatgaaaaaaatgggaattggagttaattgctagcaagataacacttttggaggttatgctgtaatttactcattttgcatatacgtatacgttatagttatttaagatatcttacaaaattttgagaaattnnnnataatttacaatatagaaaatagtgttcaaaacgtctattttagacacgtataaaataaaatagtcacacgtacaacacacttgaactctatttttagcgtgttaaacttttttgaatttcttaaaattttgcaggatatcttaaataactataatgtacatgaccatgagaaaaaatttgactaataaattattttgaataccaaaacaaataaggatgcatgcatcccttttaagggagtgcattgtaaaatttttcaaaaatattttcctcattatttaaaaaaaataacttttttagataagaatataagtagcaatcttgcgctttgaactttcgacaataccgattctgccccctaaaatataaagtttgttaagaatcccccctgaacttttacattgacagatatttagtccttctgttaggttttgttccattattttgtttaaatgctgatatatctttataaattagtaactttaccctctaaactttgataaatatcaaattgtaccccctttaaataaaaataagaaagattctacatgtttttgagtaaatcttaaaaaattaatttaaatcttaaataaattattttgaatgattaagaaaataataaaaaaacaaaactaattaagcaatttaaaaattatttacttttattaaaaaattcaattatacattaaaaaaatattttaaaaattcaatttttgtaaaaactaaattttatgggaacaaacttgagtctattttatttttctcaaataatattgtagaattctttaagtaaacataacatttttttagtttaatttctaactttttttgaaaataattttatatttttattatatttttaatttgttaagatatgagtttataaatataaataagtttgatttttgattttttctttaaaaaatcttagtttgtttaaattatttatttgattttcaataattttggtttgattttttaagatacatgttcttaaataaaataaaatttaaaaatatatttttaggaataatttagattttttaagtaaacttaaaatttttaattaatttaatatttttattaagttttttaataatatttattaatttttcgcagaattaatataatattataattttaaaattaatttttttaataaattggggcaatactctgtattggtcaaagtttaggggataaaaatactaatttttaacggtaaaataaataaaatctaataaaagaggcataattatggaactattatattttaagaggaatttttaataagtagtatatttaaggaggtaaaatcaatgagtaaaaatgttaattattctttagctaattgtataagttatattttgataaataataaaataaaaaaataattttgatattttaagttaaataattaataaatttattttaaaatattattaaattaatgtaacagtattagtattaattattaaatttaacagaaaaataacaaaatctattatatttatttaaatatggacaaatataaatttggtagggcttgaagggcaaaaagtgctaaaactctaccaccacgcccaagaatgacggccaatttcactgtttgttctatttctgtcacctaatagaaaaaatgtaagtactattctttattgtaggttttatttgttttaattctttcatttctaattaaattctgcttaaaataataaatatagaacttaaagaaaggaccactatccttgtattaaaaatttattgttattattattatatgattttagatgcatgcgagtagttggcagagagatcaatattttaattataaattgtttaaagagaataaattaagaaaagaaaaaacaaaataaatatatatttaaatattacatttgaaatgtgcgtcacttgccatgtcaatggtatgtcattctctaaggttatgtttggtagagaagaaggagagttgaaaggatagagactatgatggaatagagaagataatatcttttatttatgttgtttggcattgaaaatagaagaaagataatagatataaattttaaatataaaattactattataaatatatttttaatatatttaaagaataattatgtaaattttgctttatcttcaatcttcccatttttttagggattaaaaataaattaagtcttcttttcttcctctccgttgtgtccaaaaaaaaaagtgtaagttttagagaagatataagtagtggtagtagatgttaactagctgggatgggagtagtttgttttattttcttcactttgccttaaatgtgaaagggatctggatgggcttcaagttttgtgcaagttgtacctattattagttactcacgtttgtttgcaatttaatattgaaactcattttcttattaatttctttttctctatattttcttttaatttgaagtacaaagaattagataagacatgattaattaaactgttattttttttttataggtattttttattttactcatttgataatttttagatgcaagaattttaaaagataaaatttattacaattctttttcttaaatattttaccattattaatttatataacataattttaaaattacttattttaaagttttcttgtgaagttaataagtttatttgttttgtattttttttgtctaagtatcaacttttatagttatagtttttatttttttggttggataaagaagagctcaagagaatctaacaattatttcggcaaaaattataactttaatggtatttgattggttgctggaattagacttactctcaatttttttgagtatgattgtttaactttgatctctacctttttaaagagattttttttttctgcaataatctaggttctcttttagatgtttttttagtttacggccaaattttttaaagtgttccttatttatgcaaatcattcgatcaatatgactacacataaattagttgtatacacacttagttagaatggatagtgaattaatttggatagagtttttctatctcttattatgatgtgcatatttttttttttaatttttgtttgttcattgttaatttttttgttttattaattaaaatattatcttaatgaccatatttttcttctcattatcgtatagtttgacaaatatatttaaaaagggtatcaaataattttctttgattagagtgccactaaaaacttcaatcacaacaacatcattgtatataatcataaataaaccgaagaaaatatttcttttttcttctttttttttttttctctcaatgatatcttaatctttacttttttatttatttatccattttaaagaggatcataaattgtgctattttaattttataatattttatagaataattagtatttttgtcccttagactttcgatactacctgatcttgtctaaaatatacggctagttaaaaattctccctaaaatataacagttacgtaattatgcctcttctgttagattttgtttcttttaccgttaaaaattaatatttttactccctaaattttgactcaaaaatttttgcccccttttattaaaaaaaaaataattttaaaaattataatgttctatttttttgaataaaatcataagatttacttaaaattataatgttctattaattctaaaaaaaataataaattgttaaaaaaaccttaaaaaatattaagtttacttaaaaaacctaaactattcctaaaaaaatatattaaactttatattatttataaacacgtataatcaaactaaaattattaaaaaatcaataaataatttaatcaaactatgattttttgaaaaaaaaaaatcaaactaaaaaaaatattatgtttacttaaacaaatgtagatttttggagaaaaaaatagactcaaacttttcctgtaaaatttagtttttataaaaatcaaatttttaatatatatatatatatatatattattttttatatttaaatggattttttaataaaaaataaataatttttttaatcgattaattagtttaaaagttttaatttcttttttaattttcttaatcattcaaaatatttttttaagatctaaattaattttttttttaagatttactaaaaaaaatttaattattctcatttctattttaagggggtacgatttaatagttgtcaaattttaagggacaaagttgctaatttttaaagacacgtcaacatttaaacgaaataatggaagggaaactataagaaggactaaatttttataaatgtaagagttcagggggaattcttaacaagccgtatattttaggaggcataatcagtattgtcaaaagttcaaggggaaaattgctaattat

SEQ ID NO: 114335 - DNA, 3893 bp, Cannabis sativa
  modified_base (3858)..(3867): a, c, t, g, unknown or other
gaaccacgcaacataaaatgttatttctgatctttattaactagtaaatcggattacattgaaatgggttttatttaggggataaaacccaacacgaagtccaagtacggggttggcatccgtaacataaataaaaaaaatacaaatagattattattgaaggaaaaaaaattaaataaattttgaattaaaaaggaaaaatatttaattttatagaattgattctttaagaaatattttttttttcattttttcaaaaaaaggttgattaaaaagtgctacagaatccaccttttatttttaatatttgttttagtgatgtaaattattatatattttaatagatattaattaacttattattataaaggtaaccttatgaaataaccaatctaattaaattagattcaaactataaaattcacacttaaatcaaatgcattatattaatattaaataaaatattgaatccctccgtactcgcttcttccgattaagtgttacttcaccactagcctctgtatattcatttcatctaagttaggtctttagctatgttaacatgaccatctttgggtgattggaagtgctaatttttcatatcaacttccactactacaaaaagcactatttttgctggtgctcaaatcaatttttttcaaggatcgttgctaataaaaagaagtgactttttaaaactgtcggcaatagttgcgtattctcgaagattttcaacagccgtttagtattctctacgattttaaacagtcacaagcacaaaatattgaaatgaggagtaaaaaaggcatcctcgatagtttaaatctatcaagtacactatagttgacggtttagctaatagtatacctgacggttttaaaccgtctaggatgctcatgttttatgtaaaacccccttcaatgtttcagatctcatattcattctcactctcagatctctctccatccttcttcctcctcctctctccatcctcgatctctctttgtcctcgctctctctccatccatcgttgtttgcacaagcagacatgctatttttaacgacctactgcttcaatgaagcatggatctgagattttttccaccgaaatattcaggtaccgtctcatcttcgtcatctaatttttttcatcatatcatatattttttctctaattttctcttttttctctgtatatagattcttatagtgttccctctccatgtcttattgaattttcatgtatgacgtttttctacatatcaatggaggatatgtgtcaattggggcttcaaaatgctctgagttgcatcgtggtttgacatcgcaactgttcagggtcgtcagagcttgagatatatatctccaatttgttttttaatgtggcagtttaaaaccttcagctatagtgtcagtttttgcttacggttttaaagtattgaaattagacatacccgactgttttctaccgatcgatgcctattctattcaattttgcgagggtggaataggcgtcggtaatagagacaggcaacaataccattactggattcttttaaacagttaaaaaatcctttcttttagttgtgatcatttagttttagtttttatttaattttagtgatgtaataaattattatgtattttaataagtattaattaactcattattataaaaggtaatcttatgaaataactaatctaattatattggattcaaataataaaattcgtacttcatatatatgaatcagatgtaatgtaaataaaatagtatgaatttgatgaacactcttatatttttaactcagagaaatattgaaaaaattgaagatttatattgagaactaatttttttacaaaccattcatctatttttttaatcttggtatcagagcaccagttcatttccatggctactgcagaagaagccccaggaaattgttcaactcaatctgtaagcaatgttgctaaccagaatcctagtgttaatggtgtctcttcttctatgagctatttcacattttgggagtactttaaaccaactatttgctctcaaattggatagaaacaacttctctttatggaagacactggtgaaggccattgcaagaggacatcagtttgatggctacttgataagagcaaggccagaagagtttacaccagtgtttgatacagagagacaaccagaaattggatttgagatcaaccctgagtttgaacagtggatcgttaatgatcaacttttaatgggctagttgtgtggctacatgactgagggtattactactaaagtcatgggatgttcttcctctgcagagttatggagtggtctagaagccttgtttggtgctcattccaaagccaaaatggatgagtacagaactaaaatacaagcttgtgggaaaaggacgtatgactatgacaaattatcttaggcaaaagaagcaatgggtttatgttctggccttggtaggtgatccttaccctgaacctcttcttgttgctaatgttttattaggtttggacatagagtacctgcctatagttatgtagattgaagcaagggaaaagaaaacttggcaaaccctacttcgacctactgctaagctttgacaacaagctggaaagactcagttctctttttggaaacagtaagcattctaataatgtctttcccactgctaatcttgctaataaaggttcttttggtgctgaaaatttcagtccaagaaatattagtaacagaggcaaaggaggtaccaataacaacaacaacaatcgaggaaggttcagtggcagaggttgtccaaaacatactttccatgtatgtgggaggtatggacactctgcaacctacttttacaatcattttgatgaatcatatatgggaacaacaccacctaaaaacacaagtgacaacaacaagtctggacaaaatgctattgtatttatggcgagtcttgaggtgctacatgatgatgcataatatgttgataatggtaccagcaaccatgtcacttctgaagctggaaatttgaaccaaaaaaccaagtataatgctagagactctcttattgttggtgaaggtagtatgttgttcattaagcatactggatctggctttatttccactaataacaatagtcctcttattttaaaagaaatgttgcaagtgtccaagataactactaaaatgatgttactgttcaattctcatctaatgatttttgtgtaaaggacaaccaaaaaaaagaagaaattgcttcaagggaaacttaaagaagggtctattagtttgattccaactgtgtcaagtcatctataaaaaatccccacaattaatctactccttctcaatctctgcaatctaaatctacttgtttctctacattgtcatctgttttaaatcaaaatataactcatcttatttctgagagtgtgtttagttataatccaatcaaggataagtggcataggaagcttagccacctatccaatcatgttttgaaccttgttttaaatcaaatgaatatgaaaatttttaagaatgatgagtttcatttctattaggcctgccaatattgcaagtcacatgctctgcccttcaaattaaatcatgacaaagtaaagtttccccttgaattgatacacactgacatttagggtccagaacccattatgtcaaacactaattttaagttctataatattcacttcatagatggctttagtagatacacttggctttacccattgaaagcaaaatttgatgttttcaagctttcactcaatttaaaaatcttgtggaattaaaaccagtttgatagattttggaaatattttaccaggatnnnnnnnnnntaccatgtatgtttcattaacatcct

SEQ ID NO: 114336 - DNA, 1184 bp, Cannabis sativa
  modified_base (53)..(55): a, c, t, g, unknown or other
ttttagtagtcacaacaagtattgtgactaaaaacacatttagtcacaataannngtgatttttgtgactaatacttttggtcacggacttttagttacaacgtacgaatggcgatttataattaatcacaaattttaatgtgactaaaagtaagattttttataatgccaagtagccgttgcccttggccgagtgactatttgattaacttagataaagttttgaacttggttcatatatattagatcaagagaggagtagatcaaatggttagatttatatagcaattgttttagttttggaaaaaggaaaattgggttcatcaaaaattcacattacaaaaaatttagatttttagtcacaaacaaaaataatttgtgactgaatgtacttttttgtcacaatttgtgataaataatattttagtcacaatgaactatttgtcacagttcttaaatttttaaattaaaaggtcacaactaaatattgtaactaaaaatatgtttagtcataattataaaattttatgactaaaatctataactaattattatttagttactaattaatttattgtgttgtcactaaaaattatttttttagtcacaaatattattttttatcatcttttaactatatttgcgacactatatttccataaaaaaaaaactatatttgtgacactataaaggtttaaaataatattgtacaattgaattttatagtttctgttcatcattatttttttgttatttttgagtatttataaaactattattggaacaagccttgttgattgggcctagcagcataggccatcaagtttatcctgatggttcgatatggaccaatgtatattgtaagttgggcctgtgggccgggtaatgggccctggcgtggtgtgtagaagtctctaagtacactgttagctcgtaaaaaaaaacttttttctctaagacaaaattaagttgtaaattaaaaattaaaattttatatttttttaatataataataaatttcgagtcaaacaatacattaattattaaattagaggaaatttcttccaactaaaaaaccccatttcccaaattttgttaacccgtatgttgccttattattatttctatatccattagtttgtaagggattcaatgcagactttgatggggatcaaatggctgtt

SEQ ID NO: 114337 - DNA, 2309 bp, Cannabis sativa
  modified_base (2282)..(2284): a, c, t, g, unknown or other
taggatgttaataaaacatacatggtggtaaatctagatcctggtaaaatatttcaaacagaaaatgttatttaggtcatttgattttagtctttatgtgtggaattatttggataagtaatagtaatccttattttgtccttagggagttgtgttatgctgaaattcggatagataatttatggaaaagtaaaattagacaattcaaagtctctttctcactctattggggtcagtcacatctaacgccgtatgagctgtaatatttcatactttttctcaacaattcagtggtccttttgttgggaattcttaggaaaagaaggaattagctctaggtaagcaagttcccttctttttcccataaatttgatggttttgagtttaactgttcgtgcgatttttaagttgtgtttctataggattgaattaagtttgattctattttttgaggttgatttcatgttatttggtctagtttaagcttagatagtagcttctagttgtgtttgaataaagtttgaggtttagagctcaaactttgctcttcagtggttgattgtatttcaaaggttattacttagttctattgcttgagttaagtttgttgttgcccaaataggttgtctggaaggtttgaatcaatttggggaagattgctttgtgggtgaagtttttagagtttctgtagagaaccagtcaatcgactcatgcttgccatgtagaactgattaaccagttccccaggcagaatcctaagaaccggttttttgttttgaaaattttgttaaccagttctagtggttttggaaccctatgttttcatatattagtgatacgtaaggtattgccatgttatccaatgatagagaacttttagttatgattttatgtccccaaaaagtaattgagcgtatcacttattagttttgcgaacattgtgacttaggggcctgtaaactgtcgagcaacagtttcactcaggctgaccgacacacctaagttcaggatagaggtaaaattagtataatgatatacataagtgattatatatttagtgtacatatttatgaatacatgttagatagtatattgaaatagcggtatcagtatgcataaattatatttgatatcgatgaatgtaagattagcataagtattgattgatgctatgaatcgatacgactagagtatcgagtataggctgatattatggtcaatagtactatcgtacgaacattctagaattagtacgcgtggaacacgtattagggctatgattgtgtgcatgggcgccttgttgtaattcggtttaagtttatgttatgattatgcttttcttgctaagttttccaacttatagttactatttacatgtgtaagtaagagaaaagctaaagttgagcatcattgagtgtgagtagatgaagattgtacatgttgaggcggttaggcctggagcatacaatctttgtgacagcaggctattttgaatagtcgctaggcgacaacttttgtaactaatattttctaatacggttgtaaaaattttacgtacgagatccaattttatgcaaatgttatttattttcatttcagggttacttagtaatatttaattaatcacgtttttctaaccaacacgtttattagcaatggattgcatagttagtatgaaatcatgacaacacgcctaaactagtagggtgttacacgtggcctcgaattggatgaccattaccttgcgtcttctgagtgtagttggtcaaaagtttttctgacccatattgcgcttcatttgggatatagacttctttcccttgtcccaaatcttggatgaatggattatcttccactgattgtcatgttgggatttattccctaaaaataattaattaatggataatatattagaaaatatatgaaatataattataagataaatgatatattaattataagagtaaaattattaaatatctaaaaattctttattcatatagagaaggtataatattgtaaggatgtacaagagaattaagattatgtgataagaaaaaaacaagttggtagtgtattaaaatattgggaatctttaatatggatctgctaagtatagtttactatacactatacttcttgttgacctcccttttagccaacgacaacgagtggaatttagtaagcgattagtgatttataggaatcgatatataataaaacaatgtaaagacacgtgaattttatggaggttcaccctcgagcagttcggtaatagcctnnncctcgttatttgtattgacttaaga

SEQ ID NO: 114338 - DNA, 2778 bp, Cannabis sativa
  modified_base (2166)..(2173): a, c, t, g, unknown or other
gtgatccaatgactaaaaaaaaatgtaactatgtggttacaataaaaatgtaaccattagaacctcctccttataaataattaggtaagtgtttaagggtttgttatatgtttatcatgtataattagacatgtttacatataattaggtatgtttatatataattaggtaagtataaaaaaaaggttggaccaacccgccaaaccacccagacccaacccgcaatccgcacacctgtggactcagccaaccgaccggtctatacacgggcgggtgcgggttacattttttttctcgaaacttgcgaacccgaaactcagtaaacctgctttttgttaagtcatattttatgtaaatttctctcatctattatattttaatgtttacccaccaataaataacaaaacaacaatttgtattaatgtttaaatagcaagcaaggattagaatagagttttctatagagaaaaaaatcataaaatttaattgtgtctcatcaaccacatggggaagcattcaaacttgagacttcttctttctacaaaaagaaagaatttaaaaaaacaaagaaaaaacttgagacttcttctttataattagggtaagaaatgttgtactattaaattatgcctataatcaccaaaatatttttgtggtccacttgtccttgataatatttcaaacttgaaaatggagggtagagatgaagaaaagggaagcggccagttatttagaaaatatctgttctaagtgataaaatatatatggacaacagtagcattatttcattggttggtgcttgctttacagctagtactgctgtgggaataataggactaaccatttcaatatttatgccatgtttggacttttggagatattgataaagaaaaacaggccactacttatcctccatgaccaagaccaacaaaaatcaaattcatgtgttcaacaattgcagctgcctaatataaatataacaactttttcttctttttctttcaaacatatttcttctctatctcgacatatcttaactgaaatctctatatatacgtagggccaaccgtttgttacacaatcctaaatatcttttatttgtacctttttaatatatatacatatagtaatataatgtatatatatgactaacttttctatctaatattttgttagttacacgtacgtaatcataataatgaacgatagatatatattgctatgtaggttgccatatccatcatccatgcttcgtttcaactaagtagatattttcattaatatatttatatttatgatttggtatatatatgatactcatacgagtaatcttttatttttcttttgtatcttgtttatcttaattatccaatacaaattacatagtcaaaagataaaaagaaaaagaaaaaaatataaattaaataaacattggaaacatgacttttatatttatatatctttttgttttttttataataaatataaaacattcttttcatacacaactataaaatagcctttttgtgtatgatcaacacgtcggtaaatacctatatttgacgcaaaaaattactgagattttttctcattttggaattgacgcagctttgcatcggttaaaatatgatatattggtcttttgcgtcaattttaaaaagatgtcatgcagcgtcatttccaaactgacgcaacaccccatccaaactgcacccccattcagcttttctctctctcttctctcttatgtctctctcttctttctcttctctcgggatctctctcgcacacccatccaagttgcaccccgtccaactatgggctcctaccgcccaagggccaccataccactctctcgcaccactcctacacggtggtgactactttcgaactaaaaccactgtgcggcattcaagccaccatctatctctctcgttctcccaaagatctctctctctctcgtaaatatgatattttcatatttcttttgtaggcccaatgtggatggtgggagctcccatggtgtttgcacaattttttattggcaacgacgaggatcttcaatggtttttgatttgttattttgtgaaaactatatatttgtgtttctgatgtgtggagggatttgaatggagcgagaacttatctttattattattattattnnnnnnnntattattattattattatgtgtcagtgcaaaactgacgagaatatagttaaaattttgacttttactctatttctgtcggttccaaaataacgcgattttttaataccgacaattgaaaaatgattcaaaataatatttatttgcatctgcgacaaatatgtcgatttataaaactaacaaaaatattttaaatggcagttagaaaccgacaaaaataaacatatttgtagtagtgacattgttatattaggataaattttctctccccgcgagaaggactacactaaagaggattcgcagtatcgaaagtgacctcgcaattaggtaaaataagtacctcgcaatatcaaaagagacatgcagtatcaaaataaaaggtgtgaacacacaccaattaacagaaataaacgataaagcattcaagcttcattatatctaacattaaatttattctataatcgatgtaatcagtaaaattaagtacatgttattattgtaacagtctaattatgttgaagtcattagatccactaaaagaaatgtcacttttaccagcacagttcgctactacgctggtaaaagtacttttaccagcgcatttcgc

SEQ ID NO: 114339 - DNA, 1909 bp, Cannabis sativa
  modified_base (1282)..(1285): a, c, t, g, unknown or other
aaaatttgcatccgatccgatccaattatgattggatatccgattctattggatcggttgtgattggatcggttggttgggattagattgaatgactttctgcacacccctatattctaactctgatttgataaagtctttgacatatatatctaaaatacctttaaatatgtcaagaaagtaatcaaaagaaaaatatatatatgaaggtaaaaccctagctcgatcgttaattttctaatttgtggagtttttagttattatgtgcaaggttattattatagattctctaataagccgcaattttcatttgttagagatattattatatcattagattacaaattgaatatgtgtgatttgtttacttattaattattattttctgaattgttaataaaacaaagtactattaatgatttaagcttttgacaaagagtgtgtgttattattattattattattcattattaagtgcaaaccaataaacataacgtaaatcttgtcataattgttaattcttatattacacatcaaatgactaataagattaattatgaatgaattctagaaccatcaattgttaaaacacacgaggataattttatgaacattattcgatcgaattatgtattaatctcaattcaagaaatgaatctagcaattgatcattcaaattttaaagatgagtactaattattaatagattgatccatagtgatgaaccttaaaccttagcaacattcatctactaaaatcatttatatatgttttttttattattattaaatgttactgatatattaatgttaatgttgtaatgaacttgttcattaatctataatatcttcaagagaaaaaaaaattatcataataaaaatttatttgtaacttatgaaactaaaacaatattgtcatatagtcacaagttgttattattatagtgtatggtaatacatatgagttttagtttaaaattaatagatcatatgaaaagaataacgtcgacctttatattttatataagatatttaagttctcacagataattaatggtaatatttaatcgagggctttaaattaaaaaaaaaaaaaattaaaaaattttgtcaaaaaaaaaaaataaatatataaaaattacaatataaaaaatttttactattaattactcatcactacaaaattttttacttttagtcacaacaatttgtgactaaaagtgaaaaaaattatgactaattataaattaatcacaaaatttacaatttgttgtgactaaatnnnnttttagtcacaatacttgttgcgactaaaactaaattagtgacaacttgtaactaattattatattttagtcacgagtaacattttgttttaactaaaagtaacaattttttgtaataactctacttcatataagactttgtacaatatatatttaacataattaattccacataagaaaatgttatagacatacatgtccaaattgaaatatattaacaaagataaatttagattattatatataattagatagggtggcagtcacactcatgcactatataaaaggctcatatttcacctgtagcagcagtagcacgcgccatatcttattttgtttttattaaaatagatagttatgaaagaaaaataaatatatttataaatatcaaaagaaaatataataatttcaatctctccattaaaaaaaacaaattaatataatactaattaatgaagtatgggattagtatagtaaatattattttctttcctattaaattaattttaagcattgacattactagattgaaaaactctaaggggaccttgagacaatgggataatgggcttgattgagtactacaaggatatttttactgctgaacctactagctgggaggag

SEQ ID NO: 114340 - DNA, 2691 bp, Cannabis sativa
  modified_base (2661)..(2665): a, c, t, g, unknown or other
aaaaacaaaaatatgttctataatcacttttgttttttaattttaaaaataaaaacaattttattttcatttttatttgttgattttatttaagtcagttttgagattgggatcaggggtaggtccaagtctggggccaagtccaagttcggtttccaaggtctaaattggggtcgcattccaaaatattgattaaaaaaaaaatctttaaataaattttgaaagtaattttttttaaaaaaaaaaatggattcttaattaaaaaaatgacaagtaaaaacaattttatagaacatgattttgaaaaaaaaattacttttgtaattttaaaacaaaaagaacttattaaaaaatattatcaaacacacccttaatttgttaccgtctaaataacctgatttgttatacacttcacactctatgttttctttttgggcaatttacaataatatatttgtatttaatttacaataataattttactaacactaaagtttcattacctgaatttcggttaatcctaaatttttgttttggttattttttggttacttatgatttaccgtgattttcaaaaatcgattaattagagcataagaaaaatataaagcaataaataattcacaagtaatttttacatggttcaagcgttaataatctctagtccacgagtctgttgtattagccttgttggtgagtgtttgaatattacaagtgttttcagtataaatattaactcggtattcctttcgtttctcttgaagaataagaaagctaataggaattttgatagaggttctgtaagcataaaatttgttcacccccctttacacatgaaaataagggtatttataaatatgtatgtggatgagggcatatcccttacccacctagggtttcatattcaacacgttacactgaccagtactataacattaccatctgaacgttggctggtaggaggccttctcatcgtgtggtgtacgactgttgtaaaggcaactcgtgggactaaggacacgtctcgcctaaaggtttcactttgtaaagttggtgtctagataagtcgtttgacaaaaaaggagctacagaggtacgtgcgcgcattaccaaggtttgacgcagggaacaagatctgatctggttaaagaagacatgtaactgtccccctaagctccaggtaagacatacacgaataggttccaagaacatctggctagagctttcctgaatcaaactaaactggagcactcgtagcttttgatccttcttaatagtaaatttaataatgggaaatcccagagtcctttccatcatcgctgacaggtttgggtaacttttggtaaatagcacatttcgtgacatcgaaaggcgaaaggtatacactaaccatgccttatctgatgtggcatccttctgtgattgccacataccgggcatctgagaacccccaagctctcgagactcacgagtgttgggagcttgcaacttccttctaaatgcttgacttattattcagacttgttgactaggtattagaatgtggaagaattttccatattaccttgggtaactcaggagtcaatacgctccgtgacactgttgtcaattcactgaagtgtggtgcttgtttagtggagtcgtggagctctcactctgagcctaggcgcatttctcatgggaaacgaatgacggttgtacttgaaaagacgttaggatcctggcacgttggggatgttgcaacgaaataatgagtattgaatactttattcttttttcttctggcttattaaatgcaaaccttttgaattcctaatcgttggatgatatagcttttgattgattcaatatggaccgtgcatttcaaaaatgattaaaccgctgccacccatataaataaaagtcttggcgatggaattcactttttcttcttcaccttaagctacaatcccttgcccagagaatttttctggactaaaacttcaacccagaatcttccgcctagaaagcttcgcccccactcacctttctgaaccaagaactttgtctccttctctcgattttgccactgtatttcttgatgtccaccacgtacccaagcgactagctgactattgaagcaaggcatgactaggtcaccatgcacccggtggaattttagatgatgacaaccagcatcgtttccttttaatccgtctacaagtaagtatctcttccgctcaaactattatgtcttatcttgattgtgaaatgtcgtctcgagctagcaaaatttattgccttgcatgcgtaggatttaaacttgaaaactagggttgttgtatgtgagatttgcatgcatgaactcatgggtaatacttctggagccgaggccctactgaggaattttccctagtttgggttgaaatgaacatctactatttgaatttttttggtttagaggcttaggtcaagcatttttaggtttaggctagtgtctgaaataacccccttttgcccctttatgcgtatatgtttttcgttgtttgcaaaagggggaaaaaaattttgtgctattattgtgtttttgggttcccgatccatcactgtagctggttgctttgcttgggttttctttccacgttttcagtgtctagtgaagatggtgttgggttttatgcnnnnnataaaactctttacaatctgattagt

SEQ ID NO: 114341 - DNA, 1342 bp, Cannabis sativa
  modified_base (1297)..(1298): a, c, t, g, unknown or other
aatagatacaattgaaatcaaaagtcctaacatttattcactgttaatttcttttattaatttacttacctcttactttcgctaatttcttgtttttcttattttaattttctctaaaattttactcaaccaaatagaaagaaaagtttacatttaaagtacttaactacaatctttgtgggatcgacctcactcttggtgagtctactacttgttacgatacgtacacttgcttgtacaagatatcgactgtaaatggactggatcaatttttattgttcgaactacttttttttaagtttagtgaactttggtaccccatcacgtaaatgggtacgtgtgaagagtttaagagataaatacattttcatttgcccaattcatccttcgtagtagatgtgggatgccaggcaaaatgcatctactttacgcaacacaatcggatcaaggtgcagcgaggagcgtccgactcgggcatctaccatatcgggcaggctagatggactttgggttcagttttgacactgcaatcctctccataaagcccccgtttgggctgtagtaatgtcaataatggtacactttcattagagattaatgtctataaatatatgtttgtacagtacaccttatgagagaattcaaacaacaaaaataaacatatatttgtggtcattctggaggatttcatttagttgaaagtagtatgtttgagtcaaagaattttagtcaagccacaatactaagttcaattgagtgtgtgtttgaactaactatatatgtaactttctttgaacaccttccatacttctccaactctgcaattcaaggcgagaaggatttttggaaaacgataaaaaaacataagaagattgaagaacttggagaggaatatcttgaacatcttttatcaatgtcattcttccaacattcaagttataaaaaagaatcctttctctgtatacatgacatggtacatgatttagctatgtttgcatcatctggtttttgttttaggatggataagagtaaagctttacttggccttaccattacatgaagactgagaaatacgatgctagcacactcgaatgctcgattaagtgaagctaattgtttgcgtacctttctagcactaccattacaaggatatccttttggaaagatgatagtttcgtatgatatgtttcttacagcaaaaagttgtttaagagtgctttccttaaacaactccactatcaaggagctgcctaattcgattagctatctaaaacatttaggtggcgtttggttgganntaatgaaatagaatggaatggaaaggaaacaattttcattctat

SEQ ID NO: 114342 - DNA, 1523 bp, Cannabis sativa
aaaaaaaaaaaaagaagagtttttatgattagagaatgtaaatgttagttcttgtttttgcaatgaaaactctctttctaagttattattatctagtttttctacaatattagttttcattaattatacaatattatcaaaattatatatctaacattttttttattattcaagttttattgtttagatttttgggagcacctcttttttaccaaagctcataaataaatttagcatgctaataaatttgtttagatgaatggaatttctttacttttatctttggatatttttttctttaatatataataattatccttaaaaaaaatttatatgaatatgtataatagtaatttttcttttacaaaaaatgttatatattagagcaatttaattttttttttatatatattatcttcattttgatgtgctcgaaactataggtatattatattatataatttagtgtaaagaaaatgaaagtgaaaataattagtatatatatagtaataataataggacaaataatattttgagctacgttctctttactcacgagtacacattattcaattcaacacgtacgttttaatttttgacatgggattaattaagttattatatatgtatatatattatattatatgcttacatatataaatcatcacagaagattgaatcaatgatacttcattttcaaaaaaatatattaaatcataattatataatagttatatattactataatgcgatttcatgctggctgaacttcgatatatactaaattattaattctgaacttttttagtcgttaaaaatttatcctaaactattaagattgttgaatttaaaattttttgtccaatttcattcaattttactaattcggtgattatctatgtactaaaccatgcttctcatattttgatatctaacaaattatgcctcttgaactctaactatgtgttaaatcatgcccttaaactttcatatccatattacacttttcttactaaaattatataaaagtctttaaatccaacaatctcaatagttcaagaataaattgtaacagttttcaaaatttaaaggatatgatttggaacaaaattcataattagccatatatttatatataatttggtctgtgtggaccatgataacgagtttcatagttttgatttgatagattattagaattattaattttgtaactccaaaaaattataaatttccacatgtcataattatttattataatatgatcaaaacatataaatataaatttaaaccattcactaaattatatatatatgtataaaaaaatgggttaatatgacttgtgttttgtaaaagttatgttatgtaaagttattgattggactatctgttttattaaataaaaaaaaaattaagaaataattatgtaagacactattttttgtaaaataattatatttttacattcaaataatgtttttctttttttatatttttacggttttttaaaaaataacacgaaa

SEQ ID NO: 114343 - DNA, 2864 bp, Cannabis sativa
ttgaaattgcagtgtatgtgagtcacttacgcttaacaacacaccagttgctggaaatgtggtgttatgtttcacaacaatgaacaatcgatctccagtgtcagcagcagtcacttcagtgaaacaagcaggtggggttggagtgattatcgccaagcatcctggagatgttatcgggccatgtagcaatgactttccatgtattgaagttgactatgaactcggaagccaaatactattctatattcgttccaccaggtacattaccacacaaaatccacacttggagtttatgatcaatttatgataacttgtcatttaaccatttctaatgtttgtttggtacaaagatctcctattgtgaaattgagcccttctaaaacattagcggggaggcccgtatcaaccaaagttgctcacttctcatctagagggccgagctccatttctccagccattttgaaggtgcaaaacactaaaaatttatccctttataagttttatgattttgacattatatttttgaccaatacatagtttttgtgttgatatacagcctgatatagcagcacccggtgttagtacactagctgcaagttctccctttgatccttttatggatggaggatttgccttgcattcagggacatcaatggcagcacctcatgtgtcaggcattgttgcacttttaaaagcaatacatccaagttggtctcctgctgcaataaaatcagctcttatgacaacaggttatgtatctttcaaactcatcactgagactgctgaaactattaaccattaaaatcggataagcaaactatattttcattttttttgcagcttggaagactgatccatttggagagcctgtttttgctgaggggtcaccacaaaagctagccaatccttttgattatggagcagggattgtgaacccgaataaggcagccaaacctggtctcgtatacgacatgggcacagatgactacataatgtacctctgtgctgttggctataatgattcttcaatcactcaacttgttggaaaatccaaaacatgtccaagccccaaaccttccattcttgatgtaaatgttccttcaatcaccattccaagtataagaaactcagttactctcactagaactgtcacaaatgttggtcctgttaattcagtttacaaagcccaaattgactctccacaaggaattcatgtagctgtgagacctgatattttggcttttaactcatcagttaaagatttatctttcatagttgaagtctcaacctctcacaaggtcaacactggctactattttgggagtttgacttggacagatgagacacattatgtgacaattcccatatcagtgagaacacagatcatccagttttatactgattttaactgaaaatgtaatcccaagaccaagaataatggaaataaatcattggataattagatgggcaaagaataaaagaagtttcaatattctgtttctttgcacaatgtcatctcaataataataataataataataataaaatctttagaatagtctttttgactaaattgttcatgaagtaataaatgaaaccgttgattgaaaataatatagggtgcttctacaattgatgtatatctgtttcgatattcagaagaattttttagcttatgttttttttatatttgtgtacattatagttatttaagatattttaaattttttgagaaattcagaatgatttataatataaaaagtagtgttttcaaacagtttatttcacacgcgtataaaataaaatagtcacgcgtgcaacacaattttgaattctatttttagcacgttaaatttatctgaaatttttgaaactttacaggatgtcttaaataactataacgtacatgattatgagaataaagttgactaaaaaattatttaatatacctaaatagataggcatccatccatgcatccctttagtgcattgtcgaattctccattaatatattacttcagttaaatatttatctatatatatatttatataaatgaaactgagtgatgatgtgacatgttatattttttttcaacgtatttctacaattttttaggagcttcacgtttttattaagagaaaagctcatatcatcttttattaacttagttaaaactctcacataatttaaagatagtgttacttatatagtttataaataattttttttttactttgatgtaatctaatattaattttaattaatttttttaggtcaactaatatattatttatatatttaaatttattatttattgtttatgtctatacatacagtaatagtattgagaaattttaagaaatatataaaactaaaaaaggtattgatttttaaaaattatacatcatttttcaaaatttatttataaaaactaaaataaataaataatttaagtgaagttagatatacttatggacaacagtaacaaataaaaaattatagaatatattccaaatatacttaaattataaaataggtaaccaatttctctatataatattataggaattaaaagattatttggttgttattaaaaataattacaaaattactaacaatcatgatttatatgctaaaaatatagggattatttcataaatatacaaaaatgacaaaatttttacatttttgtggatttttttacaaaattacaatattgtttttctgttatttttgaaacaaaattgttttaacattgctgctaagaaaaagcaatataactttttttaggttaaatactattttggaccctgtgttttgttaaaattaccaattggaccttctgttatgttaaatgacaaaa

SEQ ID NO: 114344 - DNA, 1408 bp, Cannabis sativa
atgatttagtacatgccaaagtttagggagaaaaattgctaattagccttttatttttattttttgaaatataataaattaatattaatttttttaataataaaataaattaatatagaatatatttaaaattaagaaaattattcatttagacatcatttacttataacaccactcaatactatgtgaaaatattttattactggacattcacacatacaaacattttttttttaaatattcacatatacaaacatttaaacattaaataaatagcaaaattaattatcatccactgtaagcaaagatattattcatattaactatttaacatcttctataacatattaactatttaataaaaagtaatatgttcatcttcaacaacaacttaataattaaatttattcccacctataatttatgtacttgtcatggtattaaattctttaaatgcggtcgaatctttcatccctaacaaatccttgaaagtctatagccttgattagttttattctctgcacataacaaagaaccaataaaatttatcatataacatatatactatatcttatcagtaaatatagctgaccaaaataagagcttctccaaagaagcaacattattattagatcatctattttttcatattggtcacactattattatttgggaccatattatattggtacaaaattaattttactttaataattattataaaaattacttaaaatacatttaaaaagttaataatatatatatatgtatactattttttaatctaataattccactacatcaagaatgaaggacaaacttacatgtacgttaatatgtcaccaaattgcaactaagtttaaaacacccactcgaccatacttttatctaggtatctagccgtttctctaaccgcatgttgcagtcttcatcgcccaattccttggaccaaggaccctcctttgttttgagtgtttcgcctctttttttctttgtgacctagtgctttcctccttcgctgcttgtgtgtagccattcattgcagattcgggtcttcaagtttcttctatttcactatccttttcctattggaagggattccacctggtcaattctccataatgcaaaaggctaaggactactcattatggttatctccgtaagaagtgctcatgaaactagggcataacactcacattgttcacacttgcagacataatcgatacaatcaaaaccatccttcatttaccatccctttatcaagcgttggttttattaggggtgttcatcaaaccgtccaaatcgttcaaactgtccgcaccgcaccacaccgcaaaaaaaatacagtttgaaattctttgcggtgcggtcgcggtttgaatttttcctaaaccgcgcggtgcggtgc

SEQ ID NO: 114345 - DNA, 2281 bp, Cannabis sativa
  modified_base (1908)..(1913): a, c, t, g, unknown or other
  modified_base (2247)..(2253): a, c, t, g, unknown or other
ttactaaatattagtttaattttatttaaaattacatatataaaaaaaatacatatacaaaagggctcattttttcttaatttgctaaaaccgtcttgggcccatattttttcagagccggccctgcctgttggacacaaccgagttccaaatttttatattctctattggccaacgttcatagcaaggatactacatatttcatttttctcaagtcagctagatctatttttctttttttcttatcttagaccattactatttttcttcaatgccaactaatatcctatggagtcacgtagcaccactaatctccatttttgatatacactgaatgtatctatcgcacccaaagattatcatttttcatagctaagttccaaacatacctgccaatagctgctatattccatctctcaatgtttcttgaacccaaccctccttttttagattttcacaacttttcccaagcaatttatctcggcccttcattttccgagctatttcatagaaaggcttgacaaattctattaatcttttgtaaaatagctttgggaaggatagttatttgggaccaataagagttaattgagatgagaacaaagttaatgaacatgcaccttccagcataggaaatattcctcgtgccccacaacttgattacagcaacctttttttcaacaatactatcacattcttttttttgaaatccttttagcacatattgtaatccctaaatagcaaaacggcattccactaagttagaaaccagagcaatcagtgatatattgaatatcgtcactcctcattctagaacaatatatagcggtcttgttcctgttggcatgaagacccgaagtttttgaaaaacgggtgaagaacatcattggcaaaatacaattaaatctatttcaaatcagcatatcttgggtgaaatttaaaatctggaagagaggcgactttcatgagcaatctacagaaataccctatgccgataaaaaataggtaacatcagatcactttgccttaagcctcgattagcttcaaactaaccattcatttctatatcaattagtagagaaaatctaggagtggacacacacatcataactaatttaataaagggaccgggagattctaaaaaagacatcatctcctcattgaaactacatttcaacatatcataagcttttttagatctattttaatcatacaagatggagcattattgcttctaccataaaggcgcaccaaatcttgacaaatcataatgatatcagcaataagtgatatcacccaatttgttacactgcgatcgtgttagtaaacgggctatgtcgtattaaaaggaaggaaaattaccactaaagattactataaatagaatatggtagaaattggaataaattaaaataataaaatgatgagtgataaagagaggatgatcagataaagagtttgataaggtaaaaaatatagttatgcaaatcttattctaataccgatatcaattcaaaacacaattgtaactctacatcattaattacaactggaaaacatatatgttaaaagcacaaaataattaatcttacataaattgaatctcacttctaatttaacaacatatcatattgtatatcataaatcgataaaataccactattggtagaatgcagtaataaacattcaatataataaataccaaattaataatctaacttacataagaaaacataactaaacttatataaaatatactataaattttggaataaaaactagaagatgaaaaacaacttaataaatgagatatggagatggagcacaaaagaatcaaaacaaataattaaaataggaagtacaatagctacagtctaacctcaccaatattactattctaatacactnnnnnntgtcactaaaataagtataaataaaatagtaataagaaacaataaggagactatattctaaaaatctaatgtctttttactacaaatgctgcctatttatagagccaaaatggctctctaaattagtattttcgtactccaataagtggagaaagtggcacaaaaatttaggcaaaaagtagtggaattgattgagataacggccatgggatctgtgcctaaaaggtggagtgggggaatttgtgaacacaaaattttgtataaggagagagtggaaaattgatggttaaatatttatagtggttcaatgagaaattaataagttagagaattnnnnnnntaaattctaaatctacttattggaagct

SEQ ID NO: 114346 - DNA, 3355 bp, Cannabis sativa
tgcacttgcgtagtaattaataattttcgcaacaagttgatttccctatgcagtcactgcccttaggtgtaatgagggcaatgcctccaccaaacagttggtcatcatagcttcaatcaacttgcaacttccaggctgaatcttggtgctcttgcttctgctcttagtctggcttcgtctttggctcttgcttttctccatcttgtgagatttcaagagatatttcgctacatttagacacaaagtcagcaatagcttggccttttatggccatcctttgttggtatgtgatctcaaatttgccaagctcgatggcccatttgagtactcggcgagatgcataatacctatcgcaatggtttgtcattgtaaaccctttttggatgagcatggaagtatggtcttagctttctttatgctaaaagcaagcaataggtcagcttctccataagtgggtatcgactttcaacatcgataagtcttttagggatgtagcacactaggtgctggataccatcttcctctcttattaggacttcacttacaacatgttctatgacaaccatgtaaatgcctagttccttattatctagaggttttgaaaggacatgaggttgagccaattttttcttcagctcttggaaagctttttcacactcctctgtccactcaaattttttgtttactctaagtatgttgaagaaaggaacgcacttgtccgtggatttggacacaaatctgcttagtacagcaatatgtcccatcaggctttgtacttcttttatctttgagggaaacatcatgtccaaaagggcttggatcttttttgagttttttttctattccccttgcattgactaagaatcgaaggaatttgcccgagcctactccgaatgaacacttgagggggttgagcttcatgttatactctcagaggatcttgaagcattcatttagatcctcgacatgcccccagcctttttagacttgacaaacatgtcttccacatacacttccatgttacaaccaatgagatctttgaacattttattcataagtctctgataggtggcatgtgcatttttcaacccaaagggcatgacttcatatcagtacatgcctaggtttgtcatgaaacttgcatgttcttggtctggtgggtgcatcttgatttggttgtaacttgaataagcatccatgaaacttaggatctcatgactagctataacatccactagctggtcgaccctaggaagtgggaagtagtcctttggacatgtcctatttaggtcagtgaaatctatgcacaccctccacttattgttcaatttgggtaccgacacgaggttggataccaaagttggatagaatgattcagtatgaagtcattggcgctcagcattttgacttcatctttcaaagcttgtgcacgctctttatcaaataacctccttttctattgtacaggtcagatgtttagatctatgtttagtgaataggtcctcacagatgtgtctattccgactatgtcttcatgtgaccatgcaaagaggtctaggtttgtccttagaaattttatcaaggctaattttatttccaacgttaaacctttcccaatcatcaattttcaggttggaagagtgggatcaatctccagttcttccaagtcctccataagtctaaagctatctggaggatttccaaagcgaggatctatgtctacttccactctttgggctggacttcatttcccttttccagactcctagtcagagcccttggcgggcatcttctcttttttggctttagataaagtgaagttgtaacagtgtctggcagattgttggtctccccttaaaaatcctaccccatgccttgttgggaactttaggcataggtggtagatggatattactgcctttaggttgtatagggtaggtcgacctatcattgcattgaaggctgatggcacgttgattactacaaatttggccatcaacattttatgggattttctctgaccttcaaaggcagtcaaatgtatcttagtggtgcaatgccttggatgaagaagttgtatattagttgagggcatggtgctaggtcttttagttagatccctatcttttcgtaagttgatttgaaaaggacgttggaggacgcttcattatccaccatgcacctagcaactgtcatgttccctatctatgtcgatatgaccaaagggtcattgtgaaggaacctgacctatgcaacatcttcctctataaaggagatggcaggatctccaagcttaagctgtgtggagtctctttcttcaacaactaggatgtcactttttggctagtgatggaaagtctaattatagctctccctagccttgtttgtctcgcctgctatgtggggtctgcctattatgacccctaaatgacctgccactcgtggtggcatagcgtctttgttttgggcagcttctaccttagcttgatcgttttgcacataacgacacaagtggtgattgtttttccttataaggaatttaatcttccttttcaattgttgacactcgttggtgtcatggccaaaatcattataaaatctgcagagcttggacatgttcgtcttactgatatccttcttaataggaggagtccttttgaatgggatagtagcctaagtggccatgtaaatggtagaagactgaagcatctgtacttctcctcctgttctttttggtttcgtggcataggagaagttttgtacttcccttttctacaactatataggccaaaactattgttgttgtacttgcctcaagtattctagctgctaggggctggctggaactacttgtactggcttgcatgtttggcaggtcttagggctgtatagcaccctgagattgcctactattgactttccctcatgtctattattttctaacaacttcctctacttttacgaacctgtgtactcgttcgaggaactcctcatattattagttgagatcctcctgatatctttctagaagtcactcaacggaaggatgccccctagtatggtcgtatatcgaccttcttcttttaggctttttaccttggtggcctcgaccataaacctttgaatgcaatccttcaaaggtttgcctaatctttactttacctcgacaaggtcttccaactgtgatgatattgttagggattatttcaccaagatctagatttactaccatgtgtgttatttaacatcctaaatatgaatttctaaaacaatgcaatttaaacacatagaaagttcaagaaaccttacattggttgctgcggaattaaataactccttccactcagatctctaa

SEQ ID NO: 114347 - DNA, 7283 bp, Cannabis sativa
ttatattaaataatcagaataatggttttttttaatatttaaaaatattattgctggcggatccaataattgggtccgccggtattaatcagtctgcgtgtaaaggtgcaaatactaataccggcggaccccaccgctattaatccgccggtattaatattattaccggcagatttccattttcgtcgctaacaaccatttatagcgaccaattattgccggcggataattaccggcggattccgccggtaataattaataccggcggtctgggcatttaataccggcggatgcttccgccggtaatatacatatctgttgtagtgtattaaatgaaaaatataatgcatttaaaaaaaaataacaaacattaatgaggacattgttgtcagtaaaattctttgtcgtcattaatattttatataaataaaaaaaaaattatcaataacgattttgtaatgtcgttattgatggtggacctattaatgacgacaatttgttgttattaatactggtgtcactgatatctatttttcttgtactctctctctccaatggtcgacgacactcttcccaccgctcctcctgtcagacacatatgtcttcagacatgcttcctttctacctttgaatgtttggttcaaagaaggcttccaccaccaccaccgctgatgacaacaatattgtttttcttggtgttgacatcggcaccgacagttctgttgtagatattggttttttctttctttctttctttttgctattgtgtttgttgttttatttgagttattgatgtattatcggatggtgtttttagagtaaatatggtatatgaattgtgttgtgagtgtaaattgttgtggtttgaacaatatttatgtatttcatttctacaggtttatttgatgaaaataggaagctttatggtttgttttgattcaaatatggaaaaaaggtgactgttgttgactgaaaaatatggactagacttctaagccacacctgcttgctagattggtgaaaagaaataagtagttaagtaattataagagagagtaaatttacactagttcactctttgtatcgcaacagtaaaagagctatgtctacttcgatatattatttttcacaacatggtaattacaaaaaaaaaaggctaagtttctgcagctctaatttctagagagagaagctctgagtttgtgagtagttttctgaacttgaaaaatgagcttatggagctctctttttataggtgaaggaggcccacaaaaataaggaaaaatacaaataagatatttttgactgttgatgatgatctaatggtgaaaattatctcttggtggtgatggccattttttagagcccagcgggttccgctgtgcgtaactcgatttttcattttttggtgttcggacggtcggtgtactcggtttggtcggtttcttgaattttttgctcacccctattggattcaagtcattaaagtctaaacttctatcccgaatatcccgaaatcaaccagggcgcaaggccaggatatgtattattttgcctcataaacttttcatctcgaaattcactggacctatgtatttttgtgatcttgaagaatcctctcgtaatgcactggacctatgtattattgtgatcttgaagaatcctctcgtaatgcactggacctatgtattagtgtgcctcataaacttttcagctcgttataaataatccctcaactattcacagtgttataaattagtcatttttttaattttgtcacacgtggcgaacaaaattatgacatggttgtttagctaatttccacgtcagcactacatgtataatataaaattaaaaatatatatatgtatatattttttaaaatatatatatattaaactaaaaatcaattaatgattaaacaaattacgtaaaattagaattaacaaatttattttttaaaaattaattacacacatggtgttaacatggctctgaagtgacaattgattaagtagttatgttatcattttatttgtcacgtgtaataaaatttaacagaaaaattaatttataatattgtgaatagttaagaaaatatttttgatgagctaaaaagttcatgagacacaataatcataggctaaaaaaaaaaaaaaatcctaaatagccatctttatatacacatataattataaactaataagttttgatttgcaaagaaaagttttgatgttgatcttgatagaagtttttatgtggatgaggcattggattgagtttgtttattatatttcatctttttgactaagcttactatatggtccaaaaacaaaaagcaagagaatatgataaatgattgattgatgggagtttttcaagaaaacgacaaactcgagatccagattccaaatccaaattctaatcccaactttatgggctctctctgatccatttcttttttcttctttttacaaaaacaaaaattaaattataaatggggtgagaaaggctcgagctctcgacctcaggagaactcaaacagctatgagatctacgcacgcgctagccaactgcaccaccacccccttatgttatttttctcaacaacaaatatgcaatcgtctagaaatataatatataatgcacccatcttaaatgcaccctctatgttagagaattttttaatatatatttttttaattttttatattgtaattatttaaaatatttttgtaaaattttgagagatttaaaaaaatttaacacgcggaaaattgggttcaaaatcaaatagtctactgcatgagagactcttttattttatacatatctgaaataaattgtttaaacattattttcagcatgttaaattttcttaaatttctaaaaattttacagtatgtcttaaataactacaacgcaaagtcacaaacgactataaaaaaattgtgctaaatttttttcctagatatcgaaaaagataggagtatatcgtagactccttttaaagaatgcattgtagaatttttcaaaatataatattcttgttttgtcaaaaaaaaaaatatatatatttttgctggtatttatatataatatatttgtttgtttttttttttttttggctatgtttggtatttaaagatactgtatattttttaaaaaaaaataaagaggaaaaaaatttatggttgattaagaataaagatctcttttatttgtaaatggactgtttctatgtgtatatttgttgtttgttatatttattcaaattaatgtaggctaagcaaactaaggaatccaaaagaataataccaaacttgctgtgtagtttaatcaatcctttttgttgttctttggttccctttttctttttctaataacaccctttttctttttcctatagagttgaaacttaacacattttgctatgtgcaaaataacacgcacaaaaaacacagaaatatttaagtatatatatagtagcttaggaagatataggccaagtgtcaagctgtcaacttgatatgtgggaatcaagtcatgcatcaaaacttacgtttgaacagttattagaatgatatgatcattaaccaaattccaaaatcctaacttttattaaaaaaagaaaaaaaaaaaaaaaaaacaacaagtatctatttaaatgtgataagaaaattgtttataagacgttaacaggttcataatttaaaaattattcctgttttttaaaatgaaaataatttttaaaaattaataagagttgtttggcaaatttttttaaaaattaaattttaaaaaattaaaaaatagaaaatattttcaatttttaaaaataatttttttgtctaacatattatattttacattattcctcacatatttggatcctagacttggaaccaaacccgaagccaaatccagatgggttgatgtcatagtatggtgttaaaatattaatttttgtagtaagaaaaaatttaaaatagttttaaaaaatttgtgtcatacaccattaaatttttaaaatgacaaaaaattattttttattctcacttttaaaaatacaatttttaatactgaaaattgaaaacacatcaaacaagctctaaggtgtctagcatctctatgacaagacccacataaagacgagatcagtactcttaaaaaaaattagaaaaatatatatatacaggtccggtcctgggcataggcgggctaggcgggctaggcctgtgcctagggcccacccagcccaggggcccaaattttttttttctcttttaaaattatacattttttttaccgattttgaaaaatactacattttttctaacataagggctcaaatttttttttttccctatgacccactttgtttcagggccggccctgtatatatattgattagttacaacatatatttataattaaatgtgatcaatataaatataataataactttggcatgctatcacatatgttataaaggtgaaggattcaaacatattttaattttgatatttagtttacttttttgcttcactttgttctaagtaggccactcatgatatgtggtaaattttttatattaaattataccaataataataataattgggcatgtgataaattcccaaggccggaagatccccaagaaaaaagggaagttggactcgtcaaagccaatcatttcaaaataagccataataagcatcgaaggttgagctgctcttgttattattgccattgtttataatactctctctctctctctcatagtaataatataaggactcctctttctagacgtttaccgttttttcttgttatctgcttctaataatttcatcatggtcatcttctagtttgattgtctgtctgatccctttcaaaaaagaaacaaagaaacaaaagcaaactacacagaaccaaagaccaagatccactttattaacattctcatctcttctctctctctctctctctctctcctatatatatataatacctgactgacagtactctccatatccctatctttcttattcttcttattctgtttcattcattccctaatcatcatttgtatttgatccaatggaggtacatattaattattatatctctttctttgtttatctatttatacatataaattattgtgttgaattttgacttactgtaatatgtaatgatggtattttgtagagtgtggagttgaaggttgagatggttggtatacatgagaagagactcaggaagtgcctttccaaattaaaaggtaatataattaagaaacccaaaaacaactaaccttattcatcaattcaattttacatatatgtataccatatatcagtttttctatatctttatttaaattattaatataatatttatagctcaataaataatatttgttaagagtaatatttttcatcaattattacctcttagttaaattatttagctattttaactactctaatgtgagtgctgttcaatttttaagtagcatcaagtaattgtaaaagcctaaattaagaaattataattaagtttgattaattaatttaaatgagaatgcaggaatagagaaagtagaagtggacacaaatagtcagaaggtggtagtgacagggtacacacacaagaacaaagtattgaaagcagtgagaagagggggtttgaaagctgatttctggtctgcccaaaatgaacttcttcaagcttatgctggaggtggagttgcctattcaactttcagattctccacctttaatttcttttaattatatatttatatgtattattccttttcttcttcttcttcttttcttttttacagagggacttcaacatatgtaacatgataattttatttaatttatacaatgagagagagagaatgaaccccccccaaaaaaaagtgaagaatcctaagttttggctgatatttttctagctttcttttcttttaccttcttttaatcatttctatacaataatcatagcgtaacatataatagactaataggtatatatataaagtgcaccgtgtttagtaattttttataagacaccataattggttagcaatattatattatgttatatgagactcgatacttaattacactaaaaataatattacaccaagaatgatactagaccttttagcatttctcatattagaggtgttcgcggtgtgacttgtgacctatttttcaaaccaaacagcgtacgcaatttttgtaatttctcaattgcaattgcaacgcgagatcttaaaattgtaaaagtcacaatgcaaaaatgcagtgtggcttggtgtggtttgagcgaattatattattataattatcaattattataataaaaattcaaaaatcaatcttataaagttttaacgccattatatgtatactaatcgtcaactcattatattgaattgtctttaaaaaattatgtaatatattacatatatttgatcatacatttaaaaaataaaaaattatattgtaaaaaatagtaattttgtaatatatggtgaggtacggttttaaccgcaaaccaaactaaagtttaatcaaaatacaaaccacaatcacaccgcaaagaatttcgatgtagtgcggtgcagacagtttgtgcagtgtgggcaatttgatgaacatgtcagtctgatggtttttgtctcattttattatttttttttctaagaaaaatatagagattatttcaaaaatacacaaacaacaaaaaaattacaaaaatacaattgtatgaaatttgaaatatttttacaatttttaagattttatttatataaaatacggtcttttaatatatttttatgttgtatttttgttatttatatattgtttggatgttattttcttgttatttttatgtgattatcgtattacttttatgttatttttataataattgtaaaaatataagaataattatttaaacgtaaaataataatttttttttatcaaaactagtaatttatgtaaatttcttaaaaatataagtaatcacgtgtcataagtccaattatatctttctttaataataataataaaattgttttagaaccaaatcataataataaaagaactaattcaagcccttgaggagtctgacatagggaaagtgcattcctctactcctttcttagtttgaaaatgggtaagttgaaaaatacctcttttattaatcaattaaccaaatttgtctctaattttatatttatttgaaacgtacct

SEQ ID NO: 114348 - DNA, 2212 bp, Cannabis sativa
  modified_base (2167)..(2171): a, c, t, g, unknown or other
tatgtagggccgagtacatttgaaagttcaagcatgggtgtctaattttgagtaaatgactacaaaaccccaaaagtttcacctacttaccaattaaacatccaaaacctatttttttacaataaaatcagcagtacacataaataaatatttactaaaattaatttaacattatgtataaatcaaaaaacataataataattttcttttttttctttcttttctcctattttttttttccaaatttcttcttcttcttcttttttcttcttcaaactatcaccatcaacaactactgaaaccaccacctaccacaacccaccaccactaaaacctcttttcaaacacaaataaacaaatcgacacacatgtggatggatcatccacagataagttgtttgatggagggattgctcttatcacacttaggggcagcctttgcacgaagcaatcaagtttggattcataacatccaataatgaagcagaatatgaagcacttatcgcgagactaaagcttgctcgagaggtacgttatgaatatttagagatctacagtaactcttaattggttgtaaatcatattcttagagaatagagggctcggggagaaaaaatgatagcatatatgagtaaaatccaagacttcctcacacaatttaaaggatataccaataagaaaattcccaaagaagagaatgttactgccgatgcacttacacgctggcaagtaacacaatcaccaataaagcaaacttggtcccaatttaattcctgaaagaacccaacatcacctgcacggaagaaattaaaatgttggataacacacccagctggatgactccaatagtagcctatcttaacactggtaaacttctaaaaaacataaatgaagcttggaaaatgatggaaaaggttgcgcggtatttaatagtggacgatgtgatgaacaatgaggttttctccatgcctttgctaagatgtgttacaaagaaagaagctgaatgattcctatctaaagtccatgaaagattatgtgataatcatgacgggggcaaaatttatctaagaaaatacaaaggcagtgttatttttggccaacaatgattgaagattcaaaggcctatgtgaagaagtgtgacaaatgccaaaagttttttaaagtcccccgagcaccgcccaatgagttgatacaaatgtgcaaagtccatgaccctttgctatatggggaatagacctgatcggacagctacccaaaagaaagggtggagtgcaatatgcattctggttggtgattattttacaaagtggacggaagtcgaaccacttgcaactatcatatccaagaaagttttggattttgtggtaaaaaacattatatagcggtacggacttccccaaaaaattgtttctagaaaatgggaaataatttgacaaccaaatgttcactgacttctgcatgacacgtcacacgtgagaatttaaaaggggcaagtgttatcccaaatctccgcacagggtgatgtggcatccagttgagtgacatctgaagaatatttcgtgatttggatgggtcgtacgctccatgacgcatcgtcctaagtaatgtgtcattcgtagacaattgatttaaagaagaagctggaatacccgtccaaccaacctccatatcacgatcagtacgcatacaccaactagagtaaatgtggctagaatatcttcagagatattttccctaaatgttcaagcagtcacattcctaattttgtgggatagaattgcacggcagggaaaaagataaaaatatcttagttttctcttttatttctctcgatttaggaaagtaattgaatttgcttatttatttcttatttgtttgggaagccaatatgatgtttataatagagtcgtttcactatttagggattcaaaatattttattcaaaaaagtgttcaagctgctataaattctttgtaaagtgttagataaagatcaagaacttctcgcttcttttctcacaaattaatgtaaataaaagataagtagactattaccattatcacaagactgatgaacttctataataaaatcatattcttattacttaattatttttattaattgtttctaatcgctttaattaatttattagggaaatttgattttnnnnncttacatatatttaatatttttttaaaaacacataacattt

SEQ ID NO: 114349 - DNA, 3375 bp, Cannabis sativa
cgtgtccctgtctgattggtccacgtatattgggcaaaattaggggcaacaacagtatttgcacttcttttgcagagttacatgcttctcttttacctgcccctacgccgatcctgcgagagacctggactcctcctccctaggattggataaaagtaaattgcgatgttagagtgggtttagagagtatgtgctcagctgttgtagctacaactcatctgggtaaggtgatttggattcacacatctcggttggatttctcggatgttttacgcggagaagctgaggcttgttgtctggctatctcattggctgcagatttagggtataagtatgttattgtggagagtgattcgagactggtgatcaatgctctcaataggaaagtgttccattgggcccttgataactatgtctccttttgtattaaatcttctccctcttttgttagtagtaacttctctaatgttagcaggaattgtaattttgtagcccacaatgtggcaaagtgggcgtttacccaccaattgtacggttccattttgattttctctgtaccggaggaactactttgttatgaccgagaggtctaacaatttgcttagttaattcacgaatacgcttattttcccaaaaaaaaagaaaaaaaaaactaaactatgtaaatattaaaaacaaaatagtcaacacggttaagacaaaataatctgaattcttgataagaataaataggagagaatattttggagtttaatagaatgctatcatctaaaacccttcgttttttcttggcctcactcttgatttcgataaccatttctgagatcgcgttcgctatggcggatcaatcttctgccagcactgctactgctgaacctgaatcagcggttcatattgtatacaccgaacagccccaaaacaacgaggaacctgaggcttatcatattcgaaccctagcttctgttcttggcaggttggtattgcctttctttctgtttgattcttgggaaaatttttgtttcgatgtgttcttattagataatggagttcccaatttcaatatgtacagtgaggaggcggcgaaggaggctctgttatacagttacaagactgctgctagtggattctctgctaagcttactccagaccaggtcgcccagatttcaagtaagtcacttttcccatttgtagacactattttttccttgatcaattgatagaaagaaaagaaaaaccaaattgagtttatgtgtgcacctcctttaccttatttcaatattttggtatactttgtaataggtgatcttatgcttaattttctatgtatttttatcatctacctaatcatttatgatcttggatagtgtggaaacttttgacctttaagggtaatttaacttcttgacctggaaattccattcaaagacagggtttctgtcttgtttccagttttagtgaagaagaggaaggtgatttcattgtgttcctggggcgtttcagtatgcactgagtctgtctcaatatttctacacatgaatgaaaggattttgatttagtgtggattggttataatttgaattcgacagctcattttcaataaaaaaagaccagatttatgcatctgttttagtattgttattatctggattctggagtggttttacgacggagttttattaggaaaaattagcattaataataaaatttaacaatttagacaaatgtgaaaatagaaaacgggagaaaaggagagaaaggctagagttatggtgggtaaatagagaatttaacagtggaatgataagtaaatttgtttatcatacctaataaatttgcgagtaggtcggtcatgaacatatcgcatttgtctctttttgaaaaagtcaatttgattataatcaattttcttcttcatcccactgtaaaatttgtaaagtgctttttctgagaaaatattcagtacagaatactggtattattaaacttttgccactcgtaactattgataaagtagacctgagtgtagatattatagacaactgaatagttttccttataagattatggggacagagtgaagctttccttcaactctcacacagggcggatttgatgaaatgaatgaattactattaacgaattactatttgctagtcttctagacttctcttctttcctcaccagtctctatgtattttccctcatttgaactgttctttctagcacacaatttggtagaagaggttcctgtagggtttattttggtgaggcggtccctttaggttgcgtctagttgggcttttttgtatttggttaccgctttatctctttagaagtacatgtgaggggctgtgttctattcattgtgcagtatcaataattttttaagttggttttgtggttggatagaaacagtaggaaattcagttgataatttattaagatgatttagtctttttcttttttctttttgataaatttaattatgttcatattaaaaatagcaggagaagcattttatttatgagtaataataatgaagatagtgaagattggttggtagttataatttagttatattttctttttggcagagcaaccaggtgtgcttcaagttgtcccaaacaggaaaatggaactgcattcaggtaaagggatgttgcactgaaaaaagaacttccatggtgtaagaaagcaagttatatatatgaggctcctagtataatgagtttaatcttcacttttaatgggggctgtaatttaaatatattactatgtgtatgtgtatgtgtggattcgattaattatggcatttaatcttacatcttgaataataattaaatgagttgttcagccaaggttcttttggttacttgagcagtctcaactggtattgtacatttgggttgtgcctttcggcacagcacgaaaccggtattagttcaagagttgtatgacacgacataaaaaaaatatataggttttgggtctaatacgatacaaagaaatattttggttacgacacgagaaatatgagtttaactattatacgagacggtaattgtgaatgtactacacaaaatcataaatatgtatacacaaaattattaacataaaattatcacatacgaatttaatttataaatatatattttaaaatttatatagttaaaagtattgacctcgcttttagccaacaacaatgaatctatttataagcgataagtgatttatagtaacaaatatatgataaaacaatataaagacacatgaattttatagaggttcagttcggtaatagcctaatcctcgcttaagatcatgaaagtaaatcattactatgactttgagaccagttgttggaaatattttacc

SEQ ID NO: 114350 - DNA, 3330 bp, Cannabis sativa
acatatttatatgacttggcataatgtacatcaaaatataaaactttcaaccgtgtgagttgtatttccttttcctacaacttaaatttttagtgtcacatcattatataatgattttagagaccatccatgcatttatatgtcaaaatacaaaacttctcttactctctcactctctcatcatccattaaaatgatagagagtggttagttattcattcatgatgaagtgatagagaagagcatgatttctttttaagtgggctcatagccaccaaatcaaaaaaagaaagtaaccctttttcttcttcttctttttttccccttcctagtttgaagtactccttttttctctttatggcttctatagcaagacaaatcaaataagtactcacaacctttgcttataccccaaagcaccccctccaaccataacacttaattacatctatacacataaaaatgaaaaaggaaaagaaagtttctcttatatacatatttttttccaatgtagaaagttttctaatgcttcttaaacaagaataatggaatgagaacacactacacttccaactgaaattcaatcatgatgtcattaccttttctatctattcttatactcactgtctcttcttaacaacatcattcattcataaaatccaaaaaaataactgacatttttcttagtaaactttttggtttcataggaaaattcaaaacaaaaatggtatcttcttctacctcttctaagatacttattggcatttctttggacccaaatgagagcaaagatttgctatcatgggcaatcgcaattcttgctcatccaaatgatgatattgttgctgttcatattcttggttagtatctcaattgcatgagtttgttttttttaagaatgtcttgttacttatttttttgttaaactattttagttggcaaagataaaaaaaagtatgaagtgtcaagagagtttcaatcgcggcttcgtcgagctaaagcgtttgttatatctgttttgggagaatttgccaagacctgccaattcaaacaggtaaattttctcaacttaatggaaaaatgttacaaattttcaagtaatagtttcattattgactttgacatttttttcaggttaatttggaggctagagttggatttagctccaaaataggaagaggtttaatcaaggaagcaaattctgtttcagcagattatcttattattggaggctcaagaaacagatcaaataggtgagaaaatcagcaatgtcatgtcttttttctttctttctttttttcattggtaatattaattggttacaaattagtgacatttttgtgtttgttgaatatctagacctacaagcattgcaagatattgtcttagaaattcacctaatggatgcacacttgttgtatttgggaaatgtatgccgccaccacaacaaagttcggattcggattctgctcactctaaaggtaaccaattctatttcaagtaaattaggtccggtcttaaaggtatgtggagcctaaggcaaaattaaattttggggtacctatacaaattgtttaatcgttatcaaaattataatataatgttaattgtagaacttttaatactggaaatcattttcgtaacttgctcgtcttaccttagggccggccttaaagaaaatcccacttaagacatgactttctttataagttcttgtaactaataactgtttttaatagcagaaattgtaagatcaagttcaaggtggaacaaaagtaacaaagctatctccccagccgaaaaatcagaatcaaagagcaaaaacagctcgccgagaactgttttagatgaaatcgaagttgagtatcaaagcacagaagatgagacactaagttgtggagattcaagcataacatactcaacttctgtgacaccaaactttactaagaaatccaaacaaagaaaacaaagtttctcgccatgcagacttgtgttttctttccttggctcgccgtttaggagaagaagaaacaacacgaaagaaatcaagaagcctttgttaaagtgttttagctatgaggaaatcatgaaagccacaaacaacttcaatccaggtaagaggtttctctacactaaaactcgacgatgattcacaactcaaaataatctaatgggcatttttcgattactatttcgggtttcagataacatagtagggagaggagggtactctgaggtttatagaggtgatgtttgtgatggagaaaccattgctgtgaagagattagctaaggacaacaaagatgctaagaaggagaaagagtttttaatggaattaggcataattggtcatgtttgtcatcctaatacagctagtttagttggatactgcattgagaatggtcttcatctcattttcagtttttcacagaatggaactttggcttctgcattgtatggtaagacaataatacaattaaatattaggaaatatatggataagactcattaactacatgttttacaaaagaaagaacaaaaaagtgttaagacttagattttggtcaaatatgttgaatttaaggtactatttataaagagaagggttaaagagtactattggtgcgttaacattgtgtaacgcaattagtgcaaatgtttatcgggtcctacatatttgagtttatatactaaaatatgtagacattgctattaattgcactaataacgatatattatgtccttagatgttgatacactgaagctcaaactaaagaaaactataaggtcccattcaatgttttacttttatgggttttttaataaagtttataaatataattatttttttcaaaaatttattttgtgagaaaaattcaaaaaatgatggaaaaaatagtttagagtaactagttaagcatggtgtaaccagttacctccttatagggtaacaaattaccttataatgttatttccatatttttcgaaaaagaaaaacataccataaaataactatattaaaaaaagtaatatttttacacaaattgtataaaaaatccgtcaaaatgtgtaattttcacttttttttttaatattaggattttggtatttttgtatgaaaatggcattcttcaaaatcataattcaaaaaataaaccatattatttccattgtgacaacttaaacaaagtgtgtccatcattacacttagcaactatcaagctataaagctatgatagaattttagtaatttaataaatattatatttagtgtgattttattaaagaaaaagtgcaacaaatttagctttttttttttttgagtgtagcg

SEQ ID NO: 114351 - DNA, 2788 bp, Cannabis sativa
  modified_base (104)..(125): a, c, t, g, unknown or other
aaaaaaaaaaaaaaaaaagacaacgatgtatattgaatttgtatagaactaaatataaattaaataactaactaatccctctttcaataataataataataatnnnnnnnnnnnnnnnnnnnnnnataataataataataataatcgatacacacaacatttcatgttttaatttcctctatatataaaattaattttgattaagaaaaagtgttataatttgattataaagtttctctatatgcaccataaattttattttaacatcatttattaatataaattaaacatatatagcaaggttttgggggtaaaatatttacatgtatgcgtgctaagtgctctggaatagaaaattaaaaggccatcatgcttcacgtacatatccctattccctcaccagaagtataagagaataattcttttatatattctcgaatattattatatttttggagcataaactttgtactataaataaaatatgatggtatgtctacttttatattatatttatcacttaactaattatatataatgatcgacttgactaaacacattgctaatgcatagcactggtgtagtttttagtttttgctcatcaccgcttatttaaattatgtgttcatataacacatatatactatgttgattgtatatacataatgattcgatcctcttcatctaattgctcaatttgagaaatcttgattattaatgcataaattaataccaaaattaaaaaagaatttaacattttgacattctctcaaaaatgtccacatttttgcttaatcctaaaataccccctcataatcatatactatctcttctcttttcctcttctcaaatcttaccaatttttctcttcaccatacccaaaaacttttccatttgagtactttttggagtcattcttagtgaaagatgaacacatttctataaattaagagccttaccataagtctattgtaaaaataggaggcaaatgtcaacattttcaaggttttaaacatggccggtatgtgattttatattaaatctgttgttaatgttattggagtatattgttattttgttccttgtatatacatttagttatgtgttttgtcgatgtgttggttaaaaaataaaatctgagcttttaggggttctctcattttttttttcgtaaaattcgatgaatttgatacgtgttcgatgcttactcgattattagtattttcagaagttagtaatgatatttcaatagtatttgatagtttctcatcatagattagttatactacttgttttgttagacgatgcatattcgatacagggtaagttgtgtggtttgttcgagtgcttcatgatgcatgttcgatggtactcaatatgtgttcaatgatctgtgtttagtttatatattttgtagatatttttttttgtggtatttattttattttgttttaaattgatagggtcaactctatttggctatttgatgtacgatggtgtttgaaagtgcaagggtaaagattggatattcttggtgcagaaagtaaaatattcaagttggagtcagacataagtgttatgatcttgaagctaaatagattgtacaggggattcaagaaggattttgtggagaccaaggtccgagcctctttaagaaagtcttaagacaaggttacttctaacctactatgaagaaagattgcataggctacgtccttacctatcccaaaggtttgcgcacatcttaagggccccaccaaatgaaatcacgttaatgacaagccattgacccttcatagtatgaggcattgaccttataggatctctcccaattggaaaaggtggagtcaaatatgtgatagttactgtggattatttcacgaagtggatagaagaagagccaatgaaatctataatggccaaaaaagccttagatttcgtaattaaaagcattgtgtgctggtacgaactacctcataagatagtctcggccaacggcatgcagtttgattgtgatgaattcacagagttttgagagaattatggagtcatcaagagtttatacgtagttgcaatatctcaatcgaatggccaagcagaagtcgtacgttaataaaatattaaaggtcaccctaaagaaaaaacttttagcttgtaaaaataactagctagaggagtttccatgcatgttatatgggcatacaagaccactacaagaacaaccaccggacattcccattttcaatggtatacaaatgtgaagtgatggtccctatagaaagtataatcacctcccatagaagaactacatatgatctagccacgaatcaagtcctgctgcaggaggcactggatctcgtagaagagcactgggaggagtcacaaatacgcatggcaacataccagaaaaaagtggcaaaatatttcaactcaaaattcaaagattagaaatttgcaattgggaatctgctcttaagcaaagtatttcctgcttctatagaactgggagtggggtactagagacatatatacaaagacaagcaaaaatagtaaagtacggttaagtatatatacttataaacgcttaaaaagcatgtctaaaaaagaaaaaacactacaacaattatgattattagaggcggaccactccgctggtaataatctccttttccgccgctaaagagtaataccgacggggtgcgccggtaataatctgctggtaatacccggtcgctaataactattattagtggtggactgacatacccgccgctaataatagtatcag

SEQ ID NO: 114352 - DNA, 3940 bp, Cannabis sativa
  modified_base (402)..(402): a, c, t, g, unknown or other
tcatagcacttttagatcggattataatttaactttattttgaccaaaaaatcaattcagagtcctatttgtattatatacggtaataaaaatagaaacacatatatattttactttatcatttcgatattgtaaattattaaaaaaaatatatttaatatatttattacaactgtaacatactaatttagattttattttttatacaataaattatttagacttttttttaaaaaaaaaaatggacagaacaaaaaaaaaaacactcatttagtaagggcaaaagtgaaattcctatctaagaaatttccaataaatacatgggaagttatatttccaccacataaaattataaatacaccccattattaaaaaacatataaacttaaataatttttaaanattactcttaatatttttttaaaattttttcctcacattgttttatgttaatttcaatacttattttgattttatttttataatttttttctaactcatgtatatattcttttttttttttgaagaaaatttcatataattttttatttttaatttttttgtcataatttttaaaatgtaatttaattttgtttgataggtatattttgtaagaatataaattgaaaaaaaaaaaagttaaaaatacttagtaaaattaaaaataaaaattttatataaaataaaaattgtgtacttaaaaatttttggggtgtaaataaaatttccctaaatacatacaagggggtgtggatttatgttaattacaattgtgtccttgcatcatgaatatttattagactttaatcaattcatttcctatgtacgtagtttgtttttgtttaattaagaagtatattaaattgtgtattttaagtttttattataagttagttagtggttacattacatgttctattttgtacttgatattgttttaaaaatgagaacataaagaatgtatttggatcttagatttgtttttaattaaggatggtgtgtattcacatggtatataagtatgaggacttgattttgggattcacatttacattaattttttataatgttcacactcttatttaagttggtgcattgactttttaatttctatttaatgtcaatactctttaaaatctcaaccactaaacactaaaagtgataaatacttaaaaaatatacatgaaagaatttattcaaaaataacatcagctattaaaagatcattgatacaaataagatttcctgaccaccaaattacacaactactagcaaaataagtaaattcagtatatgagatatacaatggccttagcttaccttcatgtttatggccttagcttgtttgatttcgggcattatgattctttaatagaaaattcttacaaaaactatctccctaaaaaaaatcgctagatcttctatctattttgatattcaagaggcctatttagtttattttttctctttatgatcgtgtatgttatagttatttaagatcacttgtaaatttttaaaaaatcatgaacaaattacagtgttgaaaataaagttcaaagctcaaacaattacttaccactcgtataagagaaaacacaacaaattatttgaactttatttttgatactgtaaattatttaattttttttaaaaatttataaatgtcctgaataactacatcgcacacgatcatataaaaaattagattaaaaaacccaaaataaataaggagtatgccgaaacactattttagatagtatatttatagacttttctaattatttgtattattattagtatgaacattattataaggcacacttcttgttataagacacagtagtgtctaacaccacctgcagatgatattttataattagttagcgatattttatgataattattgaattaaattatgttagcgatatgacacatttgcaaggtgctagaccactgatgtcttttagcatatatattagagaattgctaaaatgtattactggtaaatagcattatcttcggtgttatactactattggtgtaattaaatatcgggtcccatatacttaagaaaataacttttaggtaatatcgctaaccaatcatggagcaccacttatagaatgtgctaggcaccactaatgcctaatagcaatgctcttcatataattattaaagaattgttaaaaggcactatcggtgcttaacatcctcctgagtgatatattgctattggtataacttaagaaaataatttctaacaaatattagtgactaattgtaaggtggtatctatggaatgtgctaacactaatgtgcctagtgcccaatagaaatgctcttgttattggtatgtgtgtaatttgaagggtataattgtaatattgatataaaattaaggatgtaaatgtaattggattaatttgattatatttaattggtggttagaatctcgagagagaaagagaaagtaagaatgtgtgattgtgataaagtggacaacagagaaggtggtgggtatgagtgagtgagtattagacttgtaatagtgagatttgatttgtggttgaaaatgtatggaacacaacaaaattatacaaccatacattcattatgttatgttagtgttgtttgttgaaagtattcaacatctttcctatacgacaccgttttttgtctcatgtaaaactaattccattcaacatatataatatcaaatctcattatcattaacttaaccgacatcctcaactaattatatgtatgaaatttcttatagctcatatttttcattcttttcttataattccatttcttttttctactgagtaatgaaaatacatgaagtatttattttttagtcttttatgatgaaaattataataaattattttctaaggaaaaaaatatatgataaatattattttaaatcttgtgttttgcaaaaattattaattttggacaatttgttttttaaataataaattgaaccctgtattttgtaaaatggttcaaaatagtaccttgaactgatttttttatcaaaataaaaattaataataagtcgttctagaatttttatgacacaattgcgtattttttatattctgtatatgttagtactataaattattttcaagtttgttgtattagaaaaatattatcgaaaattaagctcagagtacattattttgtactattttagaaaatataggatccagtttattattttacaaaatagatagtctagttgataatttttgcaaaacacagggtccgtaaaaggggtgattgtgacaggcaggtcaagcacgcttaactgtggaattctttcgtgatgggctaccgaaaaacaagatgcatcttgttgatataggtagtaccaatcaattcatttaagccttcttcaactgtgtagtctcatacttatactgtctcagaatcatcccacttgaccttcctcaggcaatgtgagattgcacagcttacccgatattttctcttacggatcacgagactactgactgttacaattatagtttattttaacttcttgaagctagcaaaaatcaaatataaaatgacaataaacatacaaaatattagctttaaaaatacaaatttaatccaaaaatttgtcattactatctaagtataaagtttcgcatagattcttaaattgcattaaattagtcactgatcaatattacattaacaaattatttataataatagtaaaccaaatagaatgaagtacatttataattatgatctatataattttaagggttaaagggtaaaaatttaaagtttcattacttaaagtaaaaacattatctttgagagtgtttgtaagtgtcatgttttgtgtggcaaattagatattgcttttgttcagtatttgttgtctctaacatctgttctgtagttagttgcatct

SEQ ID NO: 114353 - DNA, 2146 bp, Cannabis sativa
  modified_base (41)..(54): a, c, t, g, unknown or other
  modified_base (137)..(143): a, c, t, g, unknown or other
  modified_base (243)..(245): a, c, t, g, unknown or other
  modified_base (309)..(330): a, c, t, g, unknown or other
atactggtaaactttgacaatgccatggaaaggacataacnnnnnnnnnnnnnntaagtataccttatcaccgattatcatgtcagtctaaagacagtgaactaacaaatcacgagaattaaacttttgaacatatnnnnnnnattatattccactgtactgacgacactataatcatcaatatgtatttatatatattctggacttaatagaatttttacattaagtataatcatgaaatannncatgtgaaccatgcaacatagaacgatttttgatattttataaattagtaaatctgattatatnnnnnnnnnnnnnnnnnnnnnnacaaaacccaacaatagcatacaacgagaatacaattaggggttgatcctcatgcagttattgttatttacgatacaaaaaagcttttggagttttgttttagatgtggtgttattggtcatgaggtgagtatgtgtaagaagcctccaggggctttcgtggaggggcgtgagaacctactgtataagaattggatgaaggctttgggttccattaatttgttcaataataatccccgtggggttggtaaggtcgacggggaggtgcatggtttgtttggctacggtggtccgtctagttatagaagtctgatcggttcaaattctagtgctggtcggggaggggatgtgagagttaatgtgccagctgttttgccaaagtctaaggaggttttttaggtaaagaagttcttacgggtaacaagattggtgggatttatggtattttggaatttttttcctattaattcaaaattcaaaatttcttttccaaaaggtaagtcaatctttgatgaggtggagtgtgatgtggtgcgtgggactattcacatgactactaataaagtagtatgtagaatagggaagcacaaaagtttatagataaacgaaatgaggaggtttgtttagtgcacagtacgttatttttggccaaaatgacttcttcttcagttggcgttatgtccatgggcgaacgatgactctatgggggtggataatggtttggtaacagggaagatgataaaggttgacacatcgtataacataaggatttgagggtgatggtgactcctgtaatgggatgcttggaccgatcaaggtgttctctattagttcttcgaatggcgatcttggcaaagtttgaaaatggatgtcccaagctcgtgacaagagcggtgtctcagtaggggagtttattggtgatgattcaaaatagagagatggcaagccagttgagatgacaaaagatttgaaactacgtaaaattttgggtgatgatgagtgcatggtcccatcggcgaaggttgcagagcaacctcgctgctccccataaaagtcttagcttggaacacctagggcttgggaaatcttggtgtgttaaataatttatgggggctcattgcgagctctcaccccactgtggtgtttttaatggagactcaagtttttggtacttaggcgacttgtattcgacatcgagtgagtttttctaatggggttcatgtggatagttgtcgtcgtagaggtggcctaatgttatggtgggactgttgggatttaatgccctaaataaaactcatttcaatataatctaatttgttatcaacaaaatattagaagtcatttaagttaacatgattattttcataattatggtttaatatacaatttttaataaattcggaacatatagttattcacaattacagttatatcatcacagtggagggtaattgtgattatatgctttgaagtttaagtctcatggttcatcagggcataggatttttattgacgtgataataagcgataaagtttacttacaccttggataagtattatgtcctttctagggcataggtaaagtatgctagtatcggatgtatgaagtatacattggattggactgatattgaagttggataagatattataaacttactattgcttctttctaactcaatatcactttgttgatcttagatcaaaagatcttaatcctaagatggttaggttctagcgtatgtgtgttatttgtgttctttgagttgttcgttaaagttgaccaattggatcagcccaatacttacatcttggaa

SEQ ID NO: 114354 - DNA, 1464 bp, Cannabis sativa
ccaatttcattcaattttactaatcctgtgattgtccatgtactaaatcatactccctatactttgatatctaccaaaccatgtccctcgaactttgacatgtactaaatcaagccccctaaacattcagccatgttagactttccttacaaaaattagaaaaaaaatccttaaatcctacaatctcaatagttcagggaaaatttttaacggctaaaaaagctcaggaggcatgatttggtacatgtcaaagttcagggggtaaaaatcttaattagtaattttgaattttgaattttataaaagttatcgattggattccttttttttttttgttacatgataaaaaggatcttacatttttttaaataatacacataggattttaagctcaatttttaataatttttttaatataaccaacttaaagataatttttagcaagtacaaatatagaaaatataacaaattttgtcataacacctctatattgaattattattaagttttattttaataaaaaatcaattcatgatactatttagtactattttaaaaaatataagatccaatttgttattttataaaatataaagtccaattagtaaattttacaaaatacagaattcaaaatagtattaattgttctaatataaatgcataagataaaataaagaagtgagattttagtaaaatattttaaagaataaaataaaaaaaaaataacgtgatatttacgtatatttgtaaaattatagatacatgcatataaaaatattttataaattatatcaataatagaaacaaaaaaagaaaacactagtaaggacatttttgtgtttatcaatattaacttagactaaaaatagacattactttactactactattgaagaaaactcacttgattgaggggcttagtggtaatttccaaaaaaggaattaaatgaatataatagtagcttctcatgaaatgacaaaagtgaggttgatatgaaataataataaaaagtcaaaactatttccacaaaccacaccacaaggcaatgacgcggaatgacctttgaatattctttgcaaatattaaaaaattacacataaaaaataatagaaatactatctgacacctttttaagtgtgatatcgttgttggtataattaaatatcaaatctcatataatttaatattataatttttaaaaaataaagccatgtgccaatcccgcaacatcgaaacctttctcttgaaccactggtcgtttcatacccacatacacttgcaaaggcaggcgcatccctggtttcgtacagatagatatgtgttttttaatctttaaactcccgctctctataaagtgtcgcatttagaaggtgttgagtattactggtgcttaataataaggagttttttcattttcacacttcaaaataatttttttggcatatttacggaattctacatag

SEQ ID NO: 114355 - DNA, 2396 bp, Cannabis sativa
tgatgttaaaattttaattagattggatgagttattgaatatcaatcttaaaatctaattaaaaacagatacaattcaattataattttatatattaaaagaattatttatataataaaaaatattaaaaaaaaatatataagaatacactatataattatatttttagagggagttttttttttaaaatttattttgtgtatttatttccaggatattttattctatttaatttcattacttcaaaattttattgttttagttattttaagtcttttgttgctttatacttgtaactatatattttttttatggagtattaaacttaactaaatgataatatatagattttatgtatttttcttatttttctaagttaaccaattcaattggatcggtattatggtgtttttttttattttaaattgaattcttattaacaagaatcaaagtttaatacagcaataggaaatgacagaaaaaaaattcaatccaagcttgtttaccatccacattaaatggatacacaactaattcataagtaaagacatgaactaggaatacctcagaaaaattgaaaagtaatattataaaaacatctaattcattaccaaaagtgaaaagctttaaagaagctaagatcaaggctaaataatcacactctataaaatgaataagaagccccaacatgagagagcaatttagtagtagcactcccatccaaacatctgcatgttcttgattgactggaaaattccctacaataataacaaaatacaaagaatgagttcaagaaattaaccaatcatataataaaagaaaaaaaaaaccttatctcatgtaaatgactccaaaagtgatgtaaaaatcttccataaatagtcatccaataaaattaacaaaataaaacaaaaagtatcataccataccacatagtataacataacatatacaccttaagggttaagagtttgggataaagagttattgcttaaggagtagatgaagagtaggaactggtaataatatcatctgcaaatctaacccttggatctcagggcacacttgctttaaaccttttttatttaaaggttctatatcaagtttggtagttgctaatttaataaaccatagtaggcaattggatttggtggtcttacaatcaaatttttgtcaaattgatgttgacagaatttttagcatcccactgaatatttctctatcagaagatacaatgatatgacacaattcgttcacaggatgctacattgtaaaattgggctatcactttgcagtaagtcttgctgaacaggaggatacatgtagctctacctcaacagaacattggtggataactttttgaaagttgaatcttccatcaaagattcgtatttttgtatggaaaatttttcacatggcactaccaattgatgttgagctacatcgaagacatattgctgctgactctctatgtcatctctgcaaatctcatactaaataattaatcatgtattatgtttctgcaaaagagcaaaggaagtgtggcgtctcttgaacttacaaattgattttaaacttgtttgaccacttgtgaagatttccttctacatctgatctcagcaagcctttcaactacacattttaatcaatttattgtcctttaatggtgcatttggtatgaaagaaatattgaattccatggaaaaatgcaaaaaaagctgatgtagttttactatttgcgacatcatatctgcatgaatatcaagctgcttgtgctactactcaaaggcctgagacacatccaccaataacaacgcttcaagtgctccttctcgtcctacttcaaagcccaaatagttagctccaccttccaaaagactcaaacttaacacagatgttgctattgacaaatctaaaagtgttgttggtgttggtggactcttaagagaatcttctaattctattgttgcaactttatctaagcctcttcaggattgttttaaatttgaagaaatagaagcagtagccttgtctttaagtctgcaatggctcctatcactcaatttgttagcagattatattgaaactaattcactcctggtgatttaaggattgcaatcttttcatgtggcctattttccacgagcacaaatcactcgtgtttttatatttgttaatacttatgcccaatttggctaaatttgctcttacggtagatattgattgttattggttggagtaatttctatctccacttatcactatatatgtaattttatctaaattaatataattgtctttctctaaacaaaaaaaaaaaaataacctatatactgttgcccctgattttgccctatatatgtggaccaaccagacaaggacgcgtggatcaaaca

SEQ ID NO: 114356 - DNA, 2744 bp, Cannabis sativa
  modified_base (2705)..(2711): a, c, t, g, unknown or other
aaattaacgtggggtagtggtacttcttgtacggatcattatcctcgtaaccaacaacaacaactacaaagtagtagtagtttaccgaaaggaattaatggtggaaacttgacgttcttatcgccaaataattcgatgtcgttttcttcggcatctaagagtagtacaactgctactactgcttctgcatctccgcatagcgatcatcacaccacagaccagaccagttaattcattcattactataaattacttcatttttaattgtctattaaacatattcggtgaatagtctgttcttttttttctttttttttttaatgtttggctttttcttcttccatttttgtctttatattaaggaattagttcattcgacagctagaaaagaaaaactagctatataggaaaaatattattaaactagtttacgacttccccatttttttatatgtataggtacaatgtatgcatgatatgcatgtatttatatgaatacgtagtattatattcaggatgcacatgtttatataattattattttttgttttcatgaatggaaaagaaaattgtattgctcaacttcaaatctgtacaactttggcaccataggtcaatccctttacatcaatgacaaatttaattaattctttacagactatccacccattcactatctttctttgtaatttttttttttggcaaaataaaattaagtctatgctttacatcagacttaattcttttttacaatggactatattgtataggtgctatgattccaatgaactcgttcctgttatgccaaatctgataaattaatcaatgctgcagcaacagccgcatatttcttgaacttgctgtttgcctttgagttatcctccgtaatagctgaccaatgtctctcctgtcaactttcatgccatccatttctttatttccaaaaagcattgcttgctcaaatgacagttaaaaacaaattatccaaagtttcatatgagtatatcaagctaaaatagaggaaaataggcactcataatactttttatattagtgtaataatttttcactgcacaaattgtaattaatgaatgattctttttatgtacacaaggcatgtactagaagctatcaccctattggttgatacaataataaaaatatattctttatggcccacgcaatgatatgataaatgagtgaatcattttcccaattgtaatgataagaatcaagcctagtcagcgtcattattctcttgctccaatttggccgactttgggcctttcattttaatatgccccctcaagttgtgctgtggtgaataacaaacagtaagcttgtgtttaagataatgaaaggttgagatagatagagatttggttagtatgtctgctatttgttcttctaatggtatgtatctaacttttactgatttgctcagcactttgtcacgtataaagtgaacatcgatctcaatatgtttggttctcgagtgaaatacaggattgggggcaagttgacgggctcctgaattaccacaccagattaccgtcgtgcgattatgttttattccaatttcagcgaaaagggactacaaccaagttacttcggtataggcttgagccaatgatctatattcagcttcgatgctcgatcgagcaacacatttttgttttcttaagctccagctgatcaggtttccaccaaaataaacacatatttctgatgtggattttcggtcatcaagtgagctaacccagtccaaatcacataagctttcaatgataagatcagtagcttttgtaaattgaatgccttcaccaatgcttcctgcaatatatctcagtatgtgtttgcaagcaagctagtgattttgtgttggaggttgaagaaattggctcaatgtgttgactaaaaaggcaatatcaggtctgcttaaggtgaggtattgtaatgcaccaatgacactcttatattgagtgatatcttcaaaaggtgggttgtctcgtagatgtaatttgttgctttgaatcattggtgtgggatagggtttggcttccaacatttgagttcttttgaggaggtcaagagagtacttggtttgagataagtgaagaccatcttgccccctacttgtctcaaaaccaagaaagtaagtgatggatccgagagtcttgagaaagaagtgagtattcagctgagaaatgatgtaaatgactcgagtggagctgttacccgtgagtaaaatatcatcgacataaacgacgacataaagtctagcatcaccttcagcaagaaagaacatagtggtgtccgagatagagttttgcagacgaaggcataatagagtcgtgcgaagagtatcgaactaagcccgtggggcttgtttaagttcgtaaattgcacgattgagtttgcacacagcagtagggaattcgggatcaacatagccaactggttgggacatatagacctcttcctccaaggttccatggagaaaagcattgtttatatcgatgtgtagacatcccatcgtgtgtgacagcaagagaaaggatgactcaaatggtggacagcttaagaatgggactgaaggtatcaaaaaattccacaccaggttgctgttgtgatattttgcacacgcaagtgtacgtatcattacaagtagtaaactcaccaggagtgaggtcgatcccacaggnnnnnnngttaagtacgttgaaattaaacttttacttcta

SEQ ID NO: 114357 - DNA, 6965 bp, Cannabis sativa
  modified_base (57)..(74): a, c, t, g, unknown or other
gtaaaaaaacaaaaaaatccataatcacttaactttatttatttatgccataaaaannnnnnnnnnnnnnnnnntctcatattttgggtaatttttactattatataatgtaaaaattattgggatccatcaaattgaaaagaaaagaaataaaaggcagtttgcaatttaagtgattcacgcagagaatgtgccaacttctgtgaaagctgaaatggaggaagagtgtcccattccaatgaaattgttatctctcaagaattgtcccactctaatgagcttgcaattcagtaatgttctgtaatttgtggggtagtgtcttctctttctctctctctctcgatctctctgctcatcactttttcttttattacaaatgagtgcttcagcaatacctatcaagttttgtcacttttgcaacccccatatgacactagagttaagaagactgtctcctttgtatttaagaaccgagtaactctttggccctttctttttgtttcactctttcctttttatatttttctccccaaattgtgaatattttacttagagcattgttatcgggcactagtagtgtctaacacctttagacatgtcgttttgcattaaactatatgagacccgatacttagttggaccaatagcgatattaacacataagagggtactactagacatcaccagtgccttttaacatttctcttttacttaacatccccttagtttacaaaaatactataaaatgaaaaaaaataaatacaaaaatactgtgacacataattttttacatttttattataccaattttacaaaaatactgtgcataaagttttaaaattacaaaaaaaaaaaaaaacagtttcaataaaataaaaaaaaaaaaaaactcaaaaataactctagaacaacttaacaaacaatatgaaaataattataaaacaacaaaaaaatataactacaaagcaacagaaaaataacaaaatattgacctaattgcaataagcaaaataatatgaagtcctcaatatgtttttgtattatgattttttttacttggttttgacaacttgatttatcttttagtactgttacattaattttttttcatggaatttgttgttacaattttattctttcaacttttttcctttttaagttagtgatagttaaaaaacaacataaaaataagaaaataaatgcacatatatacaataaaaatattgtctgtaataaactaaaaatatacacgataaaaaaatacacataaattaaacaacaactgtacaaacaaacacaaaaaaataattataaaacaaccatagaacacctaaacaacaacataaaaataactaataactataaaataacaaaaagacaactataaatcaacaaaaaaataacaagacatcaatatttttaaaatatgcaaatcatttataaattaactctgaataaactacgaaacctaaaaaaatatattacttttattactcatgcaaaagatagaaaaatgtaagaggagtactcttaatttttttgtaagagagagaaagagtattaaaaaaacgagacataaaaatatatacttattatatatatgaaaaaaattcttaggtgagagcaatacttttgctcaatgagagtattttttgtgaggttcatcttatttacataaaaaaatggataatgtttcatttatatacaagtaaatgtacaatattacaaaaaatgtgcaaaaaaatataattacataattctatataattttatgaatatttacaaataaacatatatatttacaattttaacttgttgattactttcaattgattttctaaaaaatatgcataaagctaaatatgtaaatataaaagttaatatttatattttgatatattactaaaataatatgtttattaaaatttaatataaaattaaaaaaaaaaatatacaaacacattaataaattttatttatattttataaacaaagcaaatatgtatgtttattaaacatttaattagtattattaatatttataatgctattattattatgataataaatataatttattttttaaaatatcataataattttaaaaatagaacacttaagtttatttatttatttgaataaatactttaaataacacttatgtttattagttattgaaaaatgtgttaaaaaaaataaaagaaattgtaattaaatgtgactttatgtataaatactattttatattattattgataatgtttattaattattaatctaatatatttgttatgataatatttgtgatgatatatttttttgaccaagtgtgtgatgatatgttgatataatgtgtttattaaaatttaaatacaaatttataaataaaacatgtatgtttattatttatttttactatatatagtttgtatataaaaattaaaaatatatttcttataattaataaaatgtataataaattataaataatttttatgcacgtaattaagtattataatgtacataaaattataaattctccaaaaaaaaaaaaatcatgtatataatttttttttgtacgttaaggtttttcccacgtattaaaaaaacaaactctcaattttttccattaagaaaataaatatttttattgaattgaaagagacataaaaaaggtcaacaggtcatacaagtgattaaacaaaaagaagtgcactaaatttgtgcacccgaatacagtcccagaaaaaagaaaataattaaaaaagaaatcaaactagaccaatctaagaaaagaagaacaaattcttagcggttttgagtttgcttgttatacacaaatacatatttaaattaattttttgatctttattttagcaatattgtataaactttgttttactcattttgttgtttgagataaaaaatagtgaagaaaatatagggacacgattttgtcccataatgataaataaagatatacaattcgtgattgtattgtagccataggatagggaagctgcatgatgagagggctggggttaatataggggtagttaggctttaaaaacttggtaaccgtttggtattgtattaaaatatcaatatttttaaaaagttgatattgattgatgtactgacagtttctcttttccaaccacatttctctttccttctccttcgtgagtttagtttcatagtcgtgttggttcatttcttgttagggcaagtgacggtttttcttctttagggcatagaatcattttcaaattagagggaggaaactgaagtagtaaatgactatctggtgtacttcgtcttttgtgtctccagctccgtctctgaccgtcacgttggatttgtacaagtaagtgtctccgaccgtcacaatttatattttcttcttcttttgcatgttattcgttcttcactctgggtatgtgaaaatttgtctaacattgttaaaaaaaaaagtaaaactttggtaaagaaaaagtgatgttcttcaatctgtgtatgcgcattacttttttttttttgtctgttccaatttttagtttattgagtagttttaatcctttttacaggccttaaatcttcttcgtcatcaagttttgattcacagattgctctaaatcaaaggtacgtttaatgttctccatttctatatacaaagtactagaaaatagttgtttataaatatcacttttacttgatattttgtgtgaagagcctcattcgatccatgtgtttaccctttttgtgtgttttttttattgtcaaagtgttttggatcgaaagtatttttttattgtcaaagtaaagtgtttttttcatttctatatacagagtacgttcggatggactatatacgtccagttagtaggaaggtaacacctccaccctttcttgagttcccagatgaaacgaccgtatccttcaccttgaatttggttaggatagaaatgatgttgcacctcgggctccgaggaaggggtatgttcgccacttacttcccgattgtcaaagctagaatttgaaagatcgtcactggataaagatgggctagcatcgagacgaggatgatcctcgtatagaagctaaagcaaatcctggtccatatgatgtttgattctgaaaaactcaccagtgttcatctactaaaggtaggagacaagaaagtgagagttggttggagcaacgaatgaaaaataggttgaatataccgaccaagttcgattgaggaatcaaaagtagaactttcaccaagaaatagaattttcaaccgtagaatttcaaaacttcaagttggaatctgattttcacttaaacgctaatggacgaatgaaagtggatattgtaaggttaaaatttgaagcccagttagataatcagacgtgtggttaaatataatcaagatttctaagccttaaacttaggtattctatggtaaacctaaaatggttcaagaataggcgagatgcatagtaagaaatccaaaaattaagcatgcatttcattgcaaataagcaaaagaaaagaattgaagaacttactcattggtttgaagcttcttgttttgctcagatgatgtcgtcaagagttttcttgtgtatccttcgaagaatttaagagaagactcgtctggaaattttttgctctggttcttcaagagttagaatgactaaaaggatcatcaaaggttcctagtcctatttataagcaatttaagaagggaattaatcattttaaaatttcaaatttctcgaattccccctaaaagtgtacgttatgtactcattatagggagtgtaaccgccaaacacgcgcaagcattgaaccgtgagttgaggcagaattatcaattagcattaaatgggcagaaattgaagagacctctagtcagggtcacgtcgattcgtcattcgacacctaggacacgcgtcacccatccagacaagactccaggctgaggaagtccacgtgtgaccaggaaggtcccacgtagacttggggggcaaatgttatcctattttatccaccatgacgtggcaatggaattgaatgacacgtgtcccatatttctaatacccgggcagagaaagatatccctagcagcctataaatgactaaccaacatctataatagttaggtatccgagcacgattgtggagaagatgtccgaccaagtatggacatgtttatgccgagcgatgtacaagagatggaaaatttagagattaatctcgttgtgaccagacgcgaagataatcccagcaattatgggattgagttagaaaaaaacggcaacctattctagtttcctatttcatacattgtaattatagaataattgtagttttctattttattcattgtaagcaaaagggaaatcatccctcatgtatgaagtctctataaatagtgacctagcctcattgtgaaagggatagagagaattgctgcagaaatatactctaaagagaaaagagtgatctaagagagaaagttactcagagatccattataagagctttcaagaggaagaacacttcattccttctctcaagttaatacaaatacaaggggagtaggctattaccatacttacggggctgaacctctttaaaatctggtgttcactttattttactattttttctttcttttaattatattacttaatcactttatttttgactcattgtcgttggctagaagcaaggtcaacagggacgctctaatactaattgctaaaaatatagctcccaatcacattttaaggagaaaataatgcttgcggcttcaagcattgcacctttgtgatggtggattgtcccgcggcttataacgccatactaggacgacaaatcctggtggattttggagcagtaacttctataagacacttatgggttgaaggcctcggaagaaacattagagagatagtttgaatcaccttagtccaatccgacatggggacaaccattaggcctctgaggatgatagtcctgtggtagatcatggtccatgtggttgcttaccccaatgttatccatttgggtatcggaaggcacaggttcaggctccaccacgttatccctctcccccgcattaaaggagggagaggaaggtgaaggcatgtttttgagagaagacttcaagggattatcaagaataagtgggttggaaacttccagataggttgtgtggtgcctctctttgaacccgtcaaatgcccatttcgttcaatcaaggaaacttttaggcttcgagggtggtggaggcatcacaccctgttcttgggtgtcaaaggtgagaccctttttcttcttcccctttgcatgagaatcatggctcaaactaggatcaggaattgtgccctcaagaataacagataaaacatcacccggggtgaccctttcctgttgctcattctctcccccttcagggttagagggcagagcataggaaggatcttggccatcctcagtcggggcatccaagattggtcggggcatccaagatcggtcgatgcaagggccaaagtcagaagcaaagtgttagttagacaagagtccttaaaattcgaaggagtaaatagatgcttggcagccctttttgtgctagaaagattttagaacttatataaggctcagcgagagtcaacgctgagattgggaacactcttggtcagtgaaataaagaatcaagcataagtttgcggcaagtagaacaaagtgtggcaaaaataaagaaaatgaaacacaagtttacctgagaacctgaactcgaagataacattaggtggcatgccctctatcatgaagaacctagaggtcttgatggatattttggaaggcatccctgacaatcactcaacattcttggcgctaactgtaaagaccgcctagtttaatttgaaaaattagcagttaattaagatttaattatggaaattatt

SEQ ID NO: 114358 - DNA, 2383 bp, Cannabis sativa
tccaacaatctcaatagttaaaggacatttttaataaccttaaaaattcaggagacatgacttggtacatgtgaaagtttagggaataaaaatcctaattagcctataattaaatatccttgtgactaaaaagatctttttaagtgaatattgtgatgctttctacctttggtcatcaatttcttatgcccttcatgttgttgtagtctccattatttgtaattactttcctttttcctatcgttgtctaattagattattacagtgttgaccattaatttgttgaacacgcgtgttttattaggtttaatttgttgttgaagtttgaatgagtccatatttttctcaaaatgataataataataattaatactaatatatatatattataatttctaatgaaataataataatatattcgtcatattgtactcgagttattttattctcagtcagattatacaaattgatgattaagaaaaagaaaataaattaacattattaattctctatttatccttaattaatgttttaaataaagctattttctactatacatcagtaactagagcgacaaaaggtcttcacgtaaaatatatctagaaattaatttaaaagttcgtttggtaagctaaattatatcatattatataaaaaaattatacatatggcttgtatatatggcttgtatgagtagtttttcttaatcactctattctctttttctctcttaattgatcctttataattgtaagtaataataaaaaataatattaacttttttttagcaaaacaataatatgtattataataacaatgaaaatatattcacatttatttattataataaatattgtgtagcaaaatgttataaccaaaaaattatttgtattcattgtgtaacttttgaaattattaatcattaaaactatatttttattcttctattaaaaaaagaaaaaaaaaactatatgtattctttgcataacttatatgtatatataggtttcaaggttttattatattttttttttcttttaatttttgatgttctattttcatatatttacttgacattgactagctattattcatttttaaagatttttttttgttttttttgttttttttttcttctaattttttatgttctatatttttcagattaacaatgactattggatgacatgtgctccaattgatattttgcattaaaattattatgtaacgtacttttttcttgctttgaaaaattctcactaaaactatctttataatgtatatttatttaattaaattcaatttcattttattatatatgtttcatttatatattttatttccatcatatacttttgtgctaatcttttttcctctctatcactataagcttgattatatatcaggagtttgaattttctactttgatcatctgatttattttaacttaatctttcaattgagtatatacatacacatacacatatacattatatatagcacatgtatattatgttttagtgaatatttctcatgtgttgatcttaactatttttcatgtgtgtttgactctataacatgtttcttttgtgttataatttataactccatttatatatattctattattgttgataaccttcatcacgagagtctcaaatatgtggaggtgacattcttaacaatagtacaaaaatactttcagctggccaaataaacaaatatacagcctaaataaaaaaaattacacaaataccacctacacaccagttcaacccaggatccatgcttctcgggcaactatcgcgcaactacgcagcaacccaatgcaacgaaaacgaaacttcaatcagaaagagaaccactattaatttcggtgacttcacttgagaagacgaccagaatcaatcaaaataggggctgcttcgaattcataaaaaatgtgtagaaaaactactatgaaacaaaaattcaactagaaatccagttgaatttgcataaaactaatgacctgacttcaatttttagatccattaaaggcagatctcataaaattgagctggagttcccaaaaaatccaactgaagtataatccaaaaaaattacatcaatactataacaaaatgtttattctgttatatttttgttgttttccaaatttctaatggtgaatttattcatattaaatcattaagagacatgtagatagaaatacgtacgtggaaacactgttttgattttgaatgcttcacaacagttgcataacattttgctaacagttatttcgtctgatgcaaccttcagccaacccgtagcaactacccagaaattttcgtctgattgaaaccttcgtctgatacaaccttcggccaaccacctagca

SEQ ID NO: 114359 - DNA, 3354 bp, Cannabis sativa
  modified_base (1263)..(1276): a, c, t, g, unknown or other
  modified_base (2915)..(2922): a, c, t, g, unknown or other
aaaaaaaaaaaaaaaaagacataaaattaatataaaggtaaaattgtggagagaataaaactagtactttcaccatcaccatcgatcaataacagaactagcataggggttatatatgggagctgtagccccactggaaaaaaaaatcagataaaaattaaatatttttattaatttaataattatatactaaatttataaaatagtccccacaaataattttttataacaattaaaccctttaaaattaaataaacttattagaaataatagctttttttttaagcacaaatatactttataataattaataagcctaaatttctaggtcctgccatcgatcttttgataaaattagtctcatacttaattttcagttctacttttgtatatattatttggtagaggtgacttaatttagagtacaactttatatttctttacttgtaattactcaacacaacatcgatgtgtgactttacaatccgttagcacacaatttttatattatttattaaattaaaatatgtggaatttgatattagaatgcaacaataacgatttactacctcttgtgttcttgataatttaaggtaccggcatttctctaaagtatggtggcgttgggttggaggtattgaaataaaatggaatagaaaagaaaaacaaatcatttcattcatttctttggttgcattttaaagtattggaatatgattctattggaaaagtatttttaccattttagtggaatgaatattctattttgaagtaaaaagaaaggtcattcactacaaaaaagcataatttagtaacaataaaatttgtgataaaaaataaaaaagtagtattactaattataaatcatcattcttatgttgtgactaaaaagtccctgacaaaatatatttttcacaaaaatcacaatttattatgactaaaagtaacaaattaatgacaacttgtatctaaatactatgttttaatcacaagtaatcttttatcacatcacaaaaaatttatgttgtgactaaaaggttgtcaacttgtcactaaaggtagttatttttgttgtgattccaatgcaagataagaaaaaattaaataatttttttatcaatctttttttgtacatttttaaatttgattccatttctattgtcatatgttttcattcttccccaccaaacaccactaaggtggcgtttggttgaaggtaataatgaaatggaatggattggaaaagaaataattttcattccnnnnnnnnnnnnnnttgcattttaaagtattagaatatcattttaatgaaatgtcttttccaccattttggtggaatgactattccattttaaaatagaacgaaaaaccattctaatgtaacatcggaaaaaattaacatttttttatcaatattttttatgcattttaaattttattccatttctatttctattcctattcctcccaaccaaacgccaccaaactatctaagtgttgttgatttgacttactttagtagaataaatgatcctatatatataaatataatataatggagggtgttgatgatgtgattctgaagatgatgatcataattgtgatcacaattatgttaactatattctataataccactactgcctcttattctcattcttcatcttgtggaaatatccataatataaccaatcctttccacgagggattgggtagggtttctctagtttgcatgaacaacactaccctcctcctcacatcagatcagtatccttacaatttaacagttgtgggaatcaattacaacaactacacaattagagttgtgtactcaaatctccacaacaacaagttcaaggatgattgctcctccatccctagccgacgcgactgcttggattatatgctctggtactatggtttggaaatagtaaccaggattggagaggatgggttatttgggtggagaaaatttaaaacttacccaatttcggagtacatactattcataagatgtcaaaacaaggtctacaataatcctctttacatagacccatctccttgcataaatagctctacttttgggatcgggtctgggtctgggtttgtgtacgtggtgtacgcttctgggttcaagtattctgatttgggtaactcttgtcggatactccagtcggccatcgtaccggtgaggacagatgaggagaagaagaagaagcttaatacatcctacaaagacatccaccataaactcaccactggatttcagctttcatggctccaatatgcatcttctaatgcagagtcctgctacatcgataaaaagtccaacaataaggttgcatgtgttgatgatgattgcatcgataggagagggatactactaattttgtgtagtaaggactattaattaatttctaataattattaaacatatagataataataaactgatctgatatgtatgcatatttatacagggctcaggtattaccatattcgagattttctgaggaaaatacatcaagtctatggtgagtgataattaagttttattatcttttacgatctgcatatctaaatatatttctaccatcttattttcctaattataatataattttaattggtctcttctttttccttggttagttgacccagatgaaccatattattatacaactctagagcgatttctcgtaattgctcctcgtaagtaatatctctatttttaatttttatagcataatgacttatataataatattttaattatatttgtatatttactataaaaaattcttacttttagttacaataaaatttattaaatgtaaaaaagttgtcactaattaattaaaaattatcattccttatgactaaaaggttaatagctaaaagtattagtcacaaannnnnnnntttgttgtgactaaatgtattttaagtcacaatacttacgttaataaaactaaattaatcacaacttgtatctaaacactatgttttagtcacaagtaatttttttttgtgactaaaatttacatttagtctcaaaaaatttatattatgagtaaaaaattatcaataaaatataactattttttaccgtgattattcatgtttattaatttagtatatatacaattacaacaaatagttgcttaaagtttgaaaaaggtcacatataattgtgccaatgaataatgatatgtccaaagcttctataaaaattaaaatatttagaattctataaaatttcattttgattcatccaaatcttgtataccaaagttgtcacgacccgagccctaggctgtggcagatgtgtaatatccataacttgggtggtca

SEQ ID NO: 114360 - DNA, 4196 bp, Cannabis sativa
tctcaaatttggaacatctttcaagaaatgggttagtttgggttatatagagttaaaatgtgtccaacccataaccaacccataattataaggcctattatttttcaacccaatgagtcatggcctactcttagcataaccctttactacaaaaaaatgagttgggttaaccaggttgaatggtttgacatatattttgtgcactcctagttggactaatacttatgttatgttatatctaagtttcataaaagattgagtattttagaaagaaggagaatgctgatcacaaccttaatgtaacagaatctaaataattatctagtgcatataaattgtctagtcccaaatatatgagttgtcttaccatatatagtttttaacagtaaaatagatgtacttttggtgtggcaagtgagataatgaagaacaaaagcatcattccgggcaaatgtgacaacttttatataattttttttttttaaatggtaaatatgtgtgttttggttaaatgcatatcctaagctatattaaatttactaattattcctttcaaaaaaaaaaaaatttactaattatttttttttttccaaatttactgattactttagtataatgggaaatacaagtcgatccaatgaatactattattcacgagttataaataaaaattttaaaaatgatttttctcgatttaaatgcaaagaacataaactaaaagaacaatgtagcaaattaaatattggtattaacaatgataaaaaggagttaggaactaattagctaccattaaacaatcatatcaccaattaacaatatttatactcttcattccatattaaactaacaatagtagataaaacaaaaggagcatttatttcaatttctcacattttaattaatcaaaagaaaatgttattgactaactctttttaccaaacaatccaaggaaaaatatttaaaatttaattcagcaaaatcattaaaattaatagagatagattatgctaaccaataaattggcaagcgtaatctacatgcttcatcacaattaaaaactacttttacattatcaataatttagaactttaaactattaagtgaatagcaattttaaaataacaatcaatttcataattccatcgtattcaatgaccatttaaataagaagaaggcaataatcataaacaatcaatttaaatgcatatgaacaatttaattaattggaatgaacaattcaaaatattattaattaatgataatcatgcatttaaataacccttaatttaagagaaactactccataaaagtaatcattataatcattgacataattataatcataataaaaatttaaagagtttaatgagaaaaataaactatattggtaattttgatgatgcaattctctttttttttccagaattcattctcaatttttatcttctaaaacataaaataaacccgaattatttttttttaaataaaactcttttatagtcacacttaaattgtaactaaaaactaaacaaaattctgaaattagcaccgcaagccacgacctggaaaactgtgtgtcactgcctaaattgtgtttcagccaaatcaggcgccgtgggccgcgacccaacctcatttttaagcacacgagcagtggccaagaaaacttaggccgcgacccatgcaaaaatgtgtaagcatttggatagtaaatcgatcgtaacttctttagtacagttcgaaatttgacgattcaagatgttctgaaaaattaaaaaggaaatctaaaacttttatgttcagctccaatttttttaaggttatcaaaattcacaattacattcaaatttgtcaaactgagctctccgacttttactatttttcaccaaaatgtgttaaaactcttttaaatgactccaaatgcctaattagccttccaaaagatcttgttctggtgtgaaaaagatttttcaaaatgagatcgtgttatattggctaaataaatatatagtttctttatttaaattattatgattaactttttatatttaaggcaagtaattatatttattatttttttttaaaaaaaaatattttctagttaagaagcgtgtatagctgtgtctttaatgtatattttgttttcttatttatataaggaaactttcctaaaaatctgtctatgtacagtgaatctgtttaaacgaattggcagattgtttgaacagattttgatttttcttttagcgaataattttcatttattgtctgattgttttcttacttgaaaagtattacctgtggtgtattaattgagaatatattgttactcaagttgtagttttatatggaaagaataaaatattttattatgtaataaatattatatctatagatggtatttatttgtaattaatttattttatttatttttatgataagatttcattaatctctctagttagtttgtgtgatgtccaagaaaaatttcttaataatgaacttagttttgatggtgtctaaattcacaacgctgactagactattcagaattttatctgcacactttctttatttgttcagacaaatttttgtcatttaataaatttttttaagtaaactaataatattttctctttgtattcatacctttagaactcaattttaggtgtcatttatccctataaatatcacttaaaccaagaataaaagatcaaactcttccactttttaatttcttatatttttttagaaaatagtgtttctttttgtaaatgatagttgttctgatattcctatgtgagttttgtgtgtctttgtgattatttttatgtgaagtaaattctaaagtgaagaagatgaagaacaaccttctaaagaaggttcatccaagtcttgctttgtgaggaagcaagtattgctatctttcagagaagatttctacaagttttcatcgggaggaaggcaaacactgctatctttgggagaagatttctacaagtcttgcatcgaaaggaaacaagcattcatcaaataatttgaagggagttcaaaccttagtatcttaaggagattcattcaacaaatatgagtatatcaagcttacgacaaaatcattaaagggagtctatgttttgtttaagttaattactttgtactggttgaaaattgactaatgaatcttatctttggacgtgatcccgtgaactagtagcaatttgtaaggaatgctgataccacataaaatattgtgtcaatttgatttctacaattttactttctacagtttaattttgatctatcaggtttgttttcttataaaataaatttcgattatattcaaataatattacaacacgttcgcattaaaaattgtttgttaatttcacctgataattataaaaatagaatctcaagaatattgactcatagaattagccatatttataaaataaatttagacttgtggcaacaattatgtaaatatttcgagtatattttttaagaattaggtttagtactaataatagttgaaaaatgctaaaggcaaccgagtgtttacctaatataatgtgctaaaatgatatctttaaaaatgatataaacttgtattttttataatattaaatataatttaaagtaataaaaataataataaaaagtctagtttcaatagttaagatactaaacacaaatgttattgctattgtttctctaaatattttatatcgtttgttaaggtttttagttcctaaattcttagttgtcgaaggttgtcttcttttttttacggtcaatcctccctgagcttaggtatagcttggtctgtgactaaatgagttgttaatggtgtagtttcgtacattgcacaacagttaaacactcaagttaagtggttgaatgaacctacaactgtttttactattgtattttttaagtggttgaaaaaattgaattaactgttgtaatctttttcatttaactttatgattaattcatttttctgaatctaatcttggctatgttttgagcgggggacatgtccgttctgtcttgctgctcctgagacgactctggatgtgctggtgcgatgcccttttgctcaaagttgctggagcaaggttccaattactgctgtggcgcctgatgcaatgttgttctcgagttggttcgaagcgggtttggtatcgtggaac

SEQ ID NO: 114361 - DNA, 4863 bp, Cannabis sativa
caaaagtaatgaaattgggcttgggcagtacaaaagttgtttttgccgtgtcccagtataaatgtaaagttttggtcaaaaagcagtatttttgtaaaattccctatatatattaagctattaaacaatactacatatacaaacaaaaatagaatatcctacaagattttgtaatcaatttaataagaactgtagtccatgcatgtgcaataatttattatgggactttagtacacaagactatagatgaatgaaagactgcgacccaattttttttcctttgtatttatcttttctaattattatttgtcgtttattttttgttgctaaattcacagtggcagctataaagacgaaagaaaatccattcacaccaaaaaaagaaaaaccaaagatgaaagacgacaataagatcatagaaaggagctcgaaaggctcgtaagtaatataatgagattttgagatcaaaactagttgagtttgaagtttcattcgaaacggttgttccaagtgctcttttatttttctatttctcgtatacatgttattaggaggactgaaaaataaatatgaaagaatatagtagttagaatttaaaaggttgataagccacggaggctaactcaattgtgaggaaggagtaggaaaaggggagagactatgaatcggaacccaaaatccttatattattggagtgacaccactccactacactaaaaaaaaaattaaaaggttaataataaggacacgctaggaaagtgattgtagaccacatctttaaagaattgcttctaatttttagataatgctattctggtggtgtggtgggtgcccaaatgcaaaggttataataggtagggtgtacagttagcttcacaatcttatcaaactcaaatgccaaattatctctaattaatatttttgctcaatatgctatgttgcttcgatataaatatatatatatattatcacgaaagagaaacatcacattaaaatgaaaactctcccacagaatgccgtgatccaaatccaatcccacaaaaatcagttccatcatatcatatcccacattttctacaaccagaaaaataaaaaatatgtaaagaaaaagaaaagggtctactgtgcaagatactcctttcccattataaatagcaacctctaatctaatccacacaggaaaacatatagcaagtcctcacagcatacctaccctacccaacacccctctccacctaattatcttaaatataaatataatttaataattttttttttctcatcctattatattatttacagcacacacacaaaaagaagagagaccaaaacaaagggagagagaactaaaagatacgtacggacatgggtaacaacaatatcttggaggcattgaacgttcgggtcgtcgggtcgggtaccagaaacctagtgctggcacatgggtttggaacggaccaatcggcttggcaacgcattcttccctacttcaccccaaattaccgtgtcatactctacgacctcgtctgcgccggaagcgtcaacccggctcacttcgatttccggcgatacaccactctcgatgccttcgtcgacgatttgctcaatattctcgacgccctaaatctcgatcgctgcgcttatgtcggccactccgtttctgccatgatcggaattctcgctgctattcgccgccccgacctcttttccaagctcatcctagtcggagcttcacctaggtaaaataatatatgatagtggtaaaaatattctaacaaaaaaaaccctaatccccaaaaattcagttttgatttcttgagatttgaaaatttgaaaagactatgaaaaaaaacaccaaaaacaatttgggggtaattgctttacagattcttaaatgacaaagattaccacggtggattcgaggaaggcgagatagagaaggtgttcaaggcaatggaagctaattacgaagcgtgggtaagcgggttcgctccgctagcagtcggggcggatgtaccggaggcagtcagggaattcagtcgaacccttttcaatatgcgacccgatatcactctatttgtgtcacgaaccgtttttaacagtgatctgagaggggttttgggcttagtcaaggtgccctgttgtataatgcagaccgataaggacgtctcggttccggcttcagtggccgactacttgagagaccatttgggtggccgtaacacaatcgaaatgcttgaaacggagggtcatttaccacatttgagtgctccgtggctttttgctcaaaagctccggcgagccctaactcggtgagtttgcctcctctgctttggcgtcagccctaaaatattaaaataataattgtatgattgttatggttattaaaaacaaaaggagatgttgacacttggcgaataatatgtggatgatagtttctggactttcgattatctggttcttaaatccggtgaaggataagaatctccacgtgataatcacgtggttttctatcatcttcgtattttttttttttaaacatcatctttgtatttttattttcagttttttaatgtgcttgtaaaaattggattgcccatgttttagctttttctgggcaaacaaaactaaactaggtgaactcatcaacaaaaaaaatataataataataaaaaaaataatctaggtggaaaataatttttaatttgtattttataatttagggtgctggttattttttttccgatgtttaaagagtttttttttttttggtatgtagtttgatgtttaaagagttataattgtagttttattatataatagtatatatggtacttatttatgatattttataaaaaaaattatagggtattattttatatattattcttttatttttttgttaaattatggtttagatttttaaagtggttgtaataggagtttctatgtagaattttataaaaatacaacaaaaaatgtattaaagtgtaaaagtaaaaaagtcctaaatttataatataacatactgtttaaattttattttttatatattaaattttttttaattataaaatattttaaataaatacatcatattatataaaaaatattaattaaaactatgtagatgtaataaatataagaggatgtatccgttgctataactcgtgtactccaatttctaacttatccgttcatccaaaaaaaaatgttctaacttatccaaaaggattagagacgagttctcacttttctgttttttataagccaatttagacttttataccatacgctcaaagttcacacgctatataaatttaaataattaataaatatttatacaatatatagattttttttttttgagtcatacaatatatagattttaatataatttatagttatattttaataatttgtctttgtgcaaactattccacaatggggtgacccacctcctgatgtactttcggctagaatgattctcaattgacgttgttctttctttcaaaaaaaatttgaggtttttttttttttagaggaaagtgatccagcagtacgaaaaaaatatgaatagtaacactatttattgcacgtaatcaaataatattcacacaaataatatcgattttataaagaaataaaccgaataccactaaattagatttatatttctatttggtaaataataattttgataacaataaaaataaaaaatacaataaactaaaattaagctataaatgtgtttaaggatgagaaattaggaaaaagaatcatgttgatttaattacttaattgttaatgataattactattctctttcttaaagtgaatgacagataatttacccaactcttttcaaatcttttaggtcttaaatcacatgttatctaatcatttctgaaatagactaacatataatcagcattaaacaataatctcaatgccactaagactatgcaaatattttcgtttcacatcaaaacctagttcatccaattttagcattcccaaaactcacttttcagattttgaattcggatcattaagcatgcctaaggtgatcaatctcaaacatggaattaaacacaaatatagataaattcacaatcaagaaaagagaaataacaattatcattaacttaagaaataatatcaatcaacattcatcatctccccaaataggagtttagttcataatttccacaatcaaatttaaaacagaaattaacatagaaatcaagagttaagaaagaactagttggtgatcttgcttcagatcgctgcaagtgcttcctctgcctccttgttcagttttaggttacaatttctgagtatccttcttctaaaacacgagccccttaaatagaaattaggattgctatctctgaatggaaaaattccaaaactgtccaaaattcccgtgtttagcccatagtcgcgactacttaaagcctagtcgcaaccataggcaaaacttaaaaatcaagctttctgcctatgcctcatagtcgcgaccatgaaaaaggttcgtgaccatggaaaatggtggtcacgactactgaagcatacttatcagcttcagtagatttttctacaatttgccccgtcttttcaacaattgatagaatttgaactctaatacctcggggatctaaaacaaaagaaatcaagcgtaaaactattccaaaagataacattaacaaagaaaacaactgtaaaattgacccaaacgttaggctaaaactagcctaactaaattctcccaaactagattcttactcgccctcgagtaagactaacactaaaactcgattaactaagctatcaaacaattataatactactggctcatgt

SEQ ID NO: 114362 - DNA, 3556 bp, Cannabis sativa
aagaaaacttttttttgtcatgaagggggtcatatgagaggcatggtccctacccagccataagctgcctgattaagatttcaacagtcagagctggagttggaaagtccttatccgtacaaacgtcagcacagtgacttgaagggaaaatgttatcccattattgcccacatgacgtggtatgtccacataggcaggattgatgccacgtggatagatagcatgtcaacaaatgagtagagtcaccatgcacaacttataaattggcaaagagtccaaatgctcatgtaggatgaggttacaatgaaatggccaaccatgaaggtctggctagaccacccctggtcggccaaagaatggcatgtgctagccagccctagacaaagggtaagtcggccagcacctataaaaattgctagaaagaagcaagttcaattggtgtacctgcagccttcactttggacgaaccacaactctttttagctacgaaaccacttcatcaacccacgaaaatagggattcaaccccaaatatctaactattctttatgagcaatgaattaggtattttttgtatatttaaatatacgataaaagatgagtattgatatctcccccttttagggatattaacctattttaaatctagatcttttgtaagctctaacatatataaaaagtattaggctagaccaaaaacctaagttctaatttctaatcttgaaaccctagctctctctctctctctctctcactcactcactcgagtgcccaaagcattgacactaagtttgtctccttatctcacttgttcgagatctgccttacattgttctcactattgtaacattcatagagagccatactagaaattacaaggtaaaagtttataatctatgtggtattatctcttgaatcaatacaacaaaaaggagagtaagtcattacccactaatcaagggggtcgaacctctataaatcgatgtgttattttctttacttttattatttacacgtggtgatttcgatcataaataagtgttgtcagttgaccaaatctaaggtcaacaaaagtatatgagaatgtcaagatatgatttctagtccttattaaaagtaaataaggttacaatgaaatagagttttacttagggtataaattctcaacaattacccacactgccaagattaactccacccatgattaataaaaagttttatagatcgttgaagtctccttcagacccgacattacctccatgctattcatgttggttgagaagaatattcaaatctcccataagagcccaatgatcctcgatagtagcctcatagatcctccaaaaagacccttcactcactcctaataggaggggcacaaacataaaaactagtccatttatcacatctcataatattgaagaatttggccacaatcattgactgttgcactcgaataatttcaatattaaccatggccttccaaagagacataaacctctcgctgcacccacagagtccacaacaacaacaatgaaaaaaaaatcctaatcttctccaaattccccctatcttagaaattgtaactttgattttcataagaaataaaaacatcaagtttttccctccccaccaaaccccgaagggcattaactgctcgagcttgccccaatccttaacagttccaatacaaagccttcatgatgatttgtggggcatgagaaggcccgcctcactaaccatatgaaaattatcatttttaataactgaatcatgagtagttctgcctcttccaatgatggcatcaaacaaaagagacatagaacccaaaatttctaatagatattcactagttgggtagcctaaatctaatttggcctgggcattttcaaagatctccactattttctcgaacgaaccatcatccttatctaaattgatcaatcttttgtgtttatcctaattttccctcaactgtctttgaaggcaaatcttttagaattgcagttcctcagtcatcactccttggtgcacacagatagtaaccccacttttcgagggcagaagtcattctttcacttcttattcgcctctctcgaccgaatcaccactgtttcttctagagaaataaccaccatcttcctcagagcctgggaccagattaagattatccccttgaaaaacactacaaacgtttcaacaactggtcttctctttctttgaacttgagccccttctggattgttcaatccaccaaatatgggttttttcgggattcttcttggacccgtaaatctagttaagctaattcttttcattttatatcaaagttttacattgtacaatccatcaacttctttattcatttccttatattctatcttttaatatattttattcattttaaatatattaaattaatataaacacatgtacttgcatataaaaaataatttataacttaaaaacccaataaaataagtttagagcaatgaatagtgcatttccaacactattcattgctctaaaattttatataaaatagagcatctattgtacgccatatttttgataaatttgtatcttctcttatctattttagagaaaggccaagtttagagcatctatttagagtgctcctattattacattagttagtgtcttcacctttctcttatcctttcttttttttttctttttttttatataaaaaaaattactcaaatttgaatattgttacttatcatatccttatataattacataatctcatcatattctctaattggagataagtcattttagtgttattactgtaattaaatagaggtttgtagtcacttgtcttattatgtaattaagtttacaaacaatttataatacaaattactaatttctcttttcaaaatatgttagattttagactctagtttatttatttttttcttaaataacattattgtacctaaatttaaaaattcaaaaaaattcaacaaaaaagactctgaccaagtgacaaaagacaaaactaaggcaaagctcaaacacaacgatacatgataccttattcgggtgccacgtggcatggtaacatgaagtacacaaatagagtacaagaaacccttgttcatggaaacctagggtttcacttcccaacacctcgaacagagtcaagtcaattccctcatttgagccaacatttgggaaattaaccctaacatcatgaaattaaggccacgaacagagtaacaagcattaccttgttcgtgtgacttggttcaaagtaccaaggaagaattcaaataaggtaacaagaattattttcatcttactagaggagttgtttgtagctagttggaagaggcatagttgatgaaagagagaagcatcagtccttccctggcttctctttccatgaaaaatcagtatttttgttgaagaaaacttattgacattataaaagttattgggtgattctccaatgcacccccttaaaagggatgtactgatacacccttgacttgtttcggcattcagaagaattttttagtctaatt

SEQ ID NO: 114363 - DNA, 2796 bp, Cannabis sativa
  modified_base (2764)..(2768): a, c, t, g, unknown or other
aatttatacatcccaagtgtagaaacctgaaatcatagaaaacaagcgtaattctattccaaaaacaataataaggaagaaaaacaactatcaaatgtgacccaaaacttcggctaaaaatagcttaacaagtgtatatagtgaaggaaattaaaatgtatgattcaataaagattgtacaatattaaaggaaaaaagatgaggtcctatgaacaaaatctagtttctcgaattttaattgagtgataagaggtgccgtttttgtggctgttgtgttagcctttgtttgattgtttgtttgtaatcttctcagttaattaatgcaattcttttttttttcttgatttaaaaaaaaatgaaaagaaaaaaccgctaaacaacatcttcagggatggcaaaattgtaaaacaggttacacaatacactaccaattctgaacaagatttggaacaaagatagcttgattactttctttttgaataatcatctttattttactaataagatatgttgaaagttttaatctttattcatctattatttgtggaaggaagaaattgcttcatttcttcctcaattgtgaaatctcaacattgggtagattagtaacaataacaaatgccatatagtatgaagatgataggtatttactgacaaatggggtagtacagagcaaacatagaataaatggaagtaaaaagtcagaatccctatattgaaattactcaggattttgattctcccatccaaaatgtttacaaccgtaccaatttctttttcgttacatttagttcctttttggtatttattctacccactaagaagtaagcagtgcaccaagtgctccctgcacctcaggactacaataccaaacccatacacaagtgacaatttccccaagctttacaactaattattctctactggtcccttccataagccttccaaagtgtaaaaatgtaggtgcgtgggggtctgtcaatcaacaccccttaattcaaagtctcaccttttactcaaggtggaaataataaaactgccatggatagtgctgaaatcctcacaagtggctttgaatgttggtaggcttgtacactgtatgagagcttgtggcggcattttgtatacctgagcgaatgtccaacacctctcttgcttccattgttagttttttattatgattaaactggtgcagtagaagtgtgatggtatcacatacactaaaagttattcaaagaaaaattatattctagcaactaacatgaattaatgtataaatatatatatataaataccttttatggtgcaaaattttaacatagattactctacatctaaattgacacagcttcctatgcgtgtagggatattttctgaaaataaaaagagatcacatggtataaatctcttttccacttttaagttaacttttcaaagagctaaacataatctctcttaatgagaagttgttgtaaaattcgaacaattaatccacgcaagcaaggatgccaataaaagcttctctactattacaccacacaacacatggtgtaatagtagatttttctatgcatgtagggtgttaatgttctttaatcatttctcttctaagctatgtcttgcatatacaaggatgacccatctcttttttcaataataaatatcaatacatactttgatatcttaacacttaagtatatttttttatcgatagaaaatgacgaacacttaagttgtatttcagctagaggcaacgacatagagcgagagggcaggaaaattttgtttttttaaaggataaattgcagcaaaatccctaaaattttcatttaatttttgaaatttaaattttggcgataaaactcctaatatttgtgttctgttagcaatttaatatttccattcattttagttgttaagttccatattgaactgtacacgtatacatctatgtagacatagtgtacacatgacacaattttattggtccatgttaaaaattatttaaaaaattaaaataaaattaatttaaaaataaaaaattgtaaaaaaaaaatcaatttttttctttttaggtttttttcttataaaaaattaaaataaaaatctgaaaaaaaaaatatattttttctttttctttcttttcttttctttttcttttttctttttttgtcttttctttttcctttcttgcttgttcatctggtcatatcttctttttttcctttgctttattcttcttcattcctttcttctcttttttttttcatattttttttctcttcttctacatttatcactacaccaccatccaccaccacccaccaccactgctgccacacccatcacccaccaccaccgcaataatcactattgacacagaaaaaaaatcgaaccaaatgtaaaactcatttggcctctgctccaccacgaaaaacccagatctagtcttctctccacccactgtctctctccttctccacaatgaaaacccgttgaactatgctcctccccgtgaaaatcatcttctgcatttctctactcacgatctctcaaacaaatgtgattgtgccttctccggccacaagacggtgcaacaaacgccaccatcaaactccagacctctcgaaacccccaaactaaaaatttcgtccacatttcgctgctgtaagtttttcatcagaatctctctctttcagtcacaattttctccctctcagtcttttagaaatagattttaggtttgttgggttttgtgccctannnnnaactctatttcaatgtaatcttttctat

SEQ ID NO: 114364 - DNA, 1634 bp, Cannabis sativa
tgattagcaacgagctggacagtatgtttaaaaatcacgtaatacgtctatgctagttaggctgttacatgtcaaaagctataagactatagatatgagttcataagtaacttcaggattaagatcaagtctcatatgatcatcatgtgatgaatgatgaatttttgtacattaacaaagattattagaagctctagtctttcattgtgtccctagtcctatacgatcatgtattgtatacgacaccactatcctattgtgccaactacacttaaaaccctaaatagattgttttgtccaagatagcagatacgtccaagaagtcacttattaaactaacagtctttgttttacttttagaatgtccaatcttctttttggtgaaaagtgctcgcctaattcatgtaggcattactcggtgaagtgaaattggtgcccaagttgcaacgtcaacctaggcgcccatagtttgagataggctctttcgggatgtaattgatgaaaactcatgtcctaacattgttccatgttggatttaaggaatcaaggtctaaagaagttcccaaaaacctaaatttcagccattgtgttgcccatgtcagttatatgtcaagatgggagcccagtagggtctcagagatcccgtgtgaagtttcttctagagttatctccacagtctaaaacttggatgagagatgtctcttatgtatcctagtacaatggctaagaaaattgtaagtaggaagttattaggatccgaaactgatgcgagtcggcacacaaggtgtcaacctgggcacccagtacttatataggacccatgttaagccctaggatgtctagctcacatccctagtctcacggttcattgttttagggtaattgccacttttttgcttgaacttgtcaaaggataacacctagaaatgactttgatggaaattagtgcctacctgggcaccccttaattaatgttaacgcactggaatagttcctagtacataagttgaccaccttaatctcgagaggtaggggcccagagttgtttttcttcttgccacatgtcaaaaataatgcacaaatcatcaggtcaaattttggggtaaacaaaccaacttgtagacaatttttagcaggaatagatacagaaaatgtaaccagtcttgtcataacatctctagatcaagttgttagtattaaattttattctgatgaaaaatcattttgcgtactattttgtgtcattttagaaaatacaggttcaatttgttatttaataaaataaaaagtccaataattaattttatgaaatatagagttcaaaatagtattcaccctgattatatctattatctaaatttatataatctctatatatgtattttatctcattttatcatagttttttttttttgaaagtattatcatagttttttcgtgtttctacatctgtagcaagacgcaacactatttttctttgggagcatgataaacttaaaatatatactctttctttcttttcggagaataaagtaataattaggtgatatttggtaacactttattttttaaattttttaatcactaaaattaaagtaaattttttgtttttaaaattttatttttgaaaaata

SEQ ID NO: 114365 - DNA, 1679 bp, Cannabis sativa
  modified_base (1642)..(1652): a, c, t, g, unknown or other
atatgattgtgaaccaagccttttttattttattttttaattatttatttcaataaaatttatgaaccacttattattttaacccaaaaagtgccctctcgacgtaccataacgccaattatatctttatactttagagtaattaattaattccaatcctaatttttagttggctttggtaagcactcactcaaattgatcctcacacttatatattccctatcaaacttaataatctattataaatataacacaccaacaataaaaagtactataattaacatttattataggtaaacaatatcaactagtaattatattcattatatatataagtttttgtttttgtttcaatttgttgagcaaaattatgtagattcgattctgtttggtcccccacaattggatattaatatggctcttggaaaagtgtcattatttttatttgaaagagaaaataaagtgaaagaaatatgtatatataaagactaagcaatatatatatgtttggtttattattatggatgagatcaaataatctactacgtgtattttacttattataataattaattaattgattgatgagaaaaattgaggttttggttattaatccgtagaatataatgatgaaagagtcaatatggaagaagtggccaatgttattaattagcttataataattaactatatattgattatttcttacttttatatatgtacatagtctctaaagcaaagtaattaaaaatctatttttgattttattattagggaaatttttatttttatagtttttaccgtataaatttataaaactataattttttctcaaaaaattattcatagaaaaaagtttaaaaaatatgagaaaaagggcataaggtactgattatctctttatggtaactgattatcataagggtacttaatttttccatattttttaattttttttttaattttctcataaactaatatttttgaaaaaaaatttacatttttacacaaaaagtataaaaatttataaaatttataactttctattattatatatttatatttatttacaaatttgtatttaagttaaagagggagagagaaagaatgataattcaatttagtacactttcacaaaagaagcttccctctcttccccttcccttcacgcaaagaacacaaaataattaacacatgaaaagtcccaactacattattattgtttcttcttttacattctaaataatattttactttaattactttttttgaattggaggtattacttttgctccactcctactttgtaattgttattctgtttttgatactaacaaaaattatattccaatttttttttacagtgtatatttataattatagtaagcttgcatgcatgatgcatccgagatgtttttaattttttttgaataattcatgatatcaaaattcaaaataatagattacacacataaattatttataatttacttctataattacttgaatcattttttcagcacattaaattatttagaatttttggaatatctacaaccaataactataatgtaattcattatatgaaaaaaaaaattctccataagaattttttaacgtgccgtttggtaacacttttgtnnnnnnnnnnnttaatcacaaaatgaaagtaaattttt

SEQ ID NO: 114366 - DNA, 1608 bp, Cannabis sativa
caaccacctactgcccctatacaaatgttttccattctctacacaaatctaaaaaggataggtcctcaaaatgtttagttctaaagacccaagtagctgtccaaaatttaacttgctcccacacatataagttctgatatatacattgtctgagattaaaaaatggtgcatattgcaggttatagaattgggtggaacacccaccattggggattgtgccatgatcttgcgtgcagccataaaggctcctatgccttcagctttcttgacgattttgcagacaacacacagtctaggctatgtatttggggggtaaggctgccttttaattgtatttcaaatgtatcaaacttggatgcatattgtagcaatttcattcctcgtagatttctatgttatccaacacaattctcaccatggattgatatattgaagatattctactctcattttctgcagtcccctgtacgatgaaatcatttgcctctgtgttgatcttggagagctggatgcagccattgctatagttgcagatttggagactactggaataacagtaccagatgagaccttggacagggtgatttctgcaagacagaacgaaaattcttctaataatgattcaccctcaagttgatttggtttttcctttgtcttcgtttttttgcttggttagtctgattccaaagtcaaatatgtattttcctttcgaaattttctgtagtgcaggtgtaaattatcaggaaatagcaatataaacttattattactatagaagcctgtaaaagccaaagaggaagagcacatcactttttgttagtattggttacttggttccatttaatttgaaatgggttctagaaaaaaagtactcttcaattcttcatttattattattattatttgcaaagtacagtgttgcccaatcctgtttgtgagatttaaagccttgaaaatgaatgaactggcattctaaagcaccttaatgaatggacatccaaaattttacgtcaaaagttacatgagaataacaagtaaatttgataaaaatgcctcatatcatgaattatatgagataccattagatgccttacaaaaacaaagaaaaaaagaaagaaagaaagaactactgcaggggaaaacattagttatgagttgccgagaagtaatcaaaataattgattacgtgtcatttgtcatctctactactcctctcattatattatatcattttcaacaaaatttctggacattattacagaaaaataaataaggcataaatgaataacgtgccaccaaacacacgagacttggatattgtaatttttattagttggtgctggaacttagtagatgcgtgagaccgaagaaaaacaatatataatggattgaaagtcattatagttgcagcgaaaacaagcaacacaataacatacatctttattaatggaaagttcgcattccactagaagggatgtataaatgaactttcaatttgtttccacatctaaaaaaatttatatttttgtagattaaaatcctatatggacacatatgtataatgtatatgctattataaagtgtgatacaaaattaagtgaccaatta

SEQ ID NO: 114367 - DNA, 5618 bp, Cannabis sativa
aaaaaaaaaaaaccattattttgaatgaggttgacattgacaattaacatatattagccatagaagagaatgagacaaataatagttgctcttgtttaaagagccggattgaaaacgccacgtggcccaatcagaaaaggttgagtacgtcaatttacccaatcacggcgtgaccggagaaaaaatcacaaagtccactctctgaccactctctattctttttcactgtttcactaattaatttgtttcctttaaattatataattaatctgaaatatcaatatcttgattcatatttcttgtaaattaatcgattaattaattacttcctgtattaaaaaatatagattaaaaaaaacccacaaaaataaaataaagacaaagaaagaaaaatctttctcaagatccagcaggaagaagagagctctctcgagactctggggtttctctcaccgacacctgataatcggacgccatggaatcctctggatctcgaatctttctagctccgacgttcttagcgattcttctgcttctgatcactggcgcatgttcgttctatctccctggtgtggctcctgaagactttagacaggtcagctctcgatcgatcgcttgttttgtttgaattttgttttctgcctgatatgattttgttttttttgttcgatctatagttgatttgattggttttaagttttatatcggtttgttgtcgagaaagtaaaggaaatggattggaaatttggcattagagaagattcagctgattagatttaggaggcttttttttaaatttactttgagatttttggattgatgattgctttgaatgttattttgttctcttttacaagtacttaaagctactttctgtggattttagttaggaattgaagcttctgatcattctctgatgatttttcgtgttttgaatggataccattattcgcattaaactttgggtttgagacaaagaaatggaaataaatctgaaaaaaacgaagcacttgatttcaggttggcaaagttcgcctgaaattccaggacataaatacattagtttctggtttgacagagttaaattatagaaaaaatagatacaattatcataacatatggaattttgtgtcagcagtagtgtatcttgcagtttttctgcctcagtttactaatggtaaaatcatttgatgccatcatatcatatgcatcaattttttttatagttctttatgatttaatttttctgtttaagttcatcgtgcttcattttcgattcactctaaagatgaaaattatgcttcctggaagcttcgccttctactatattgggttaagcatcgaatttcatgcatattggcatgcaattgtgatagccacaccccgtacaaagaattgatttttccaaaagttgggtcacttttttaatatctttctaacaccattatccgttacctgttagaaaattgcttctttgcgctttcctaattccaaataaactaattaatggggaagggaagcagggacatacgctggaagtcttatctcattgcgaatttttgtggtttgttaaataatttggattttcttcggaatatgtttgatgcagggagatgaattgaaagtgaaagttaacaaattaacgtctacaaagactcaacttccttacacctactattctctgcccttttgccgtccagagaaaatcgtagacagcactgagaatctcggggaagtacttcgtggggatcgcattgaaaacgctccttatgtggttagtttttatataactcataaactcaataacttcaggtctgcattattatacttttgttctaataataattgtgtgtatataaaccgtgtgcagtttaaaatgcgggagacccgaatgtgcaacattgcttgtcggctgacacttgatgccaagactacaaaacagttcaaggagaagataaatgatgaataccgggtcaacatgtaaggccacattataagaattttgctactaatacaaaatctacattgcttagtgtgttttgattaacattgcctcgaatgtcaggatccttgataacctgcctctagtgtttcccgcacgaaggttggatcaggaatctcctccaatttatcagcttggctattacgttggcgtgaaaggacaatctgcggtatttgttatatcatcaaagaacttcatcatgttttttgtatgtgaaaagttggcgatttacttgttttacttcttatgtggttagggcaaggacgaaagatattatatctacaaccatttgtcattcactgtcaagtatcataaagatgtacaaaccgacacagcaagaattgttggatttgaggttaggccatacaggtcagttcttctgctgtctctctctctctctctctctccttttttttttttaatatttaaagaattccttttcacttgttttcgtttcaagagtaaagtatgtgttgtcagtttcgtttaattttatggggtatctatagtgtgaaacatgaatacgaagggaaatggaacgagggaaacactcgtttgagtacatgtgatcctcataccaagcaaacggtggttaactccaattctcctcaagaagttgaagagggcaaagaaattattttcacatatgatgttgatttcaaggttagcttctctaatttgaaacactgaagttatatatttaccattttgttgcctatctttgaaaaatcaagaatcatttttttggtttatattatctccattccatatcttggtctgagttactattctgatgtggcttggcttttgtcatgtctgattgtaggagagtgatgtgaagtgggcttctagatgggatgcttatctcttaatgaacgatgatcaaattcactggttttccattgtgaattctttgatgattgtcctctttctctcgggtatggtcgccatgataatgctccggacactttaccgtgatatttccaagtacaatgagcttgaaacccaggaagaagcccaagaagagacaggatggaagcttgttcacggggatgttttcaggcccccacagaattctgatctcctctgtgtgtacgtgggaactggagttcaatttttcggaatgatacttgtgaccatgatctttgctgttctcggattcctatccccatccaaccgaggtggtctcatgacagccctgctcttgctgtgggttttcatgggccttttcgctggttactccgcttcccgcatatacaaaatgtttaaaggaacagaatggaagaggatcgctttcagaactgctgtcatgttcccagctattgtgtcctcaattttctttgtcttaaacgcactcatatggggccagaaatcatccggggctgtgccatttgggaccatgtttgcacttatctttttatggttcggaatctcagtcccactcgtgtttgtaggcagctatgttgggttcaagaagccagccattgaagaccctgtaaaaaccaacaaaattccaaggcagattcctgaacaggcctggtacatgaacccaatcttctcgattctcattggaggaatcttaccctttggagccgttttcattgaactcttcttcatcctcacctcaatctggcttaaccaattctactatatcttcggtttcctcttcttggtcttcgtgattctcatcatcacttgcgctgagataaccattgtgctctgctacttccagttgtgcagtgaggattatctgtggtggtggaggtcatacctaacttcaggctcttctgctttatacctcttcctctacgctactttctacttcttcacaaagcttgaaatcacaaagcttgtgtctggcctcttgtacttcggttacatgttgattgcttcgtacgcattttttgtgctcactggcaccattgggttctatgcttgcttctggttcacaaggctcatttactcatcggtgaaaattgattagagtttgtgtgtgcctgccaatctcatctcatataactacaacgtcgactatattctagtgtaagatttgaaattaaggtatggattttgtactcaattttgaacattgactagctcatgactcgtagttctgttataatatttgtctatttttcaaatttatatatattaaaaaaatgcaaaaacataagattagtcctctgttttcatatatgtttaactgaatatatgtgccccgttgttgaaccgtaaattaacgttagtgtggtggatatgtgatataggaatgatcatccttaaatggtctttgagtttgatgttttccatgtaatttagatgttaggcatgttaagagttgcagacttgatcacacactgcaatatacagaaataagtactttctattctattagggcttgtagataaacagaagggtatatttaatttatgttgaaccaccataacttttacaacaaaaaaagttatctctagtcaacataagaaagagcaacgacaacagctcttatcttagcataaaaagaacataagccactaccctacttccttgggcgagtgtcctcagactcggccatgccggcagcgaccttggctatatctttggcagtggcatcaggctttttggtagtgtatagtgtgaaatatccaatggtagcgatgatgagtaagccaccaatggccatgatggctgggctgtagggaagcttccttctctgatggaggacacccccaggattgtggcctggtggcctctgagacccttctactccagctgcttttatttcctcttgactcattttgtgggtgtctgccattttcctccactcttcgttcttttccattttcctttcctagatctgtttttgagattttcgttgccatctattttaagttgagaaaaaacagagacctgccaacgtcgtgtcgtgtgtgcagaggagcaattatgccacgtttggaggatggcaactaaaaaaatcacttcgttagacacgttgttgtttgcatgcagaggattgtttgtatgacaagtgtcattgcaattagtcaggaaatattttgggccttaccccattaattaactcgttgctcatcaccgactacatgattagtatgtgcttttttgtctagttggtttgatatttgcattaggaggaatttgggatttttacactagtctaaaattacaataaacatttgtcttaaataacaattttttcaaaaataatgtaaaagaagtcgtacttttctaatttttttgtcaaaatattccaataaacattttttacaaactatattgcttatgcttcaactacctttttaattggactttctttttcttttctttttttttaaaaaattttttttgctggaatttttaattagatttgagcatgatgatcttactgatgactacataattccatctaaatatcacggcggtgcatcttattgcaatgaataccattaaattaaatatgcataatgtaaaagcaacttagaaatgacacagccgcagttttccaagacaagtttgtttatgacactaaggaggcgtttggttcggaggaataaaaatataggaatatgaacgggaataggaataggaatggaat

SEQ ID NO: 114368 - DNA, 3436 bp, Cannabis sativa
ttaccagcgcagtagcgaattgtgctggtaaaagtgacatttcttgtagtgaatctcccgtgaactattgagattgttgactttaaggacttctaatcttagtaagaaaagtctaatatggatgaaaattcaggggactcgatttgatatatgtcaaagtttgagcaacatgattttgtagatattaaagtctatggagcatgatttagtacacgaaaaatcacagacttagtaaaattgaatgaaattggaaaaatatttttaaatctaacaatctcgataattcagggaaaatttttaacggagaaaaaattttaaaggcataatatggtacgtaattatccttatttagtaattatatatactactaaataaggataaagttaattactttccaaattccatcctaagttttgaaattataatttaaaatttaaatatttcacatatgattaattaattccttaattaatttttgtttatttatttattattattttgtttttttttgtttttttagatggtcacaaatagctgctcgtttaccaggaagaacagacaatgaaataaagaatttttggaattcaacactcaaaaaaaagttgaataaattgggagtcaacaacaacaacaacactacttccacaacaacaacaacaacaacaacatcctcatcttccccaaacgacagcaattcatcagatcaagatattattaataatcaaacattaataaacacaaacaacaacaacaacattgtgatgcaacaacaacaggttcccatgcacttggactactcatcttccccatcatcatctaatttctacatgcatcatcatcatgatcatcatactcctaatcttgatcatgatttattattagtcaataatgataataatgcaataatacccaattgcttatttggctataataataataataatagtcatgatcatgatcatgatattattaatagtactactcttggagattatggagttttggactatgatgatcatgatcataagtacttatttgatgttcctaatgacctaattcatcatcacaatatgggggcttcattggttactactagtaataatagtagtagtagtaatagtacttgttttaatatgggagacaattttaaaggagaaggtactatgatcttgggtggagggcaaaatggtaatattaacaacaataatattattaatggagaaaacttcaaaatgggagaatgggattttgagggtttgatccaagatatttcttccttccctttccttgatttccaagtctaaaattgcattttggaaattggacccccccaatattaaaaaacctacctttcttcttttcttttgtcaaaaataccatttttttccaataataccctttttggaattttgatccattattcctattcacaaaaacataaaaaaaaaaaaaccctttttcttcttttcccattttctttgaaattgtcttcttttaaagttgtccatatagataatttagaatatcactaagtgaaagagagaaaaagagagagcttttgttgtatgttttcaggcaaaatttggacaatgtttgagaaagagagaattgtgattatatatatatgtatagaagttgttgtatactagagatatacatatagagagagaataaaggattattaataaatatttgttggtgatcaatgatcatgcatattgtttttatgtgtaaaaaaagaataataatatcactaggaaagaagttgttatattaaaagtagtggtcgaagatgtaatatatacaattcatatatttttttatattattgtaaagattaattactttaataagaagcaaaaataagttcattttctttgatctcttgtctaataaatacagaattgtagttttgactggctataaaactcaagtgttgtccactttcaatagggatagtttaaaaaacaagcaacttgttagttatatcactcaaatatttaactatatatatttatttatttatttattcacatgaaaaattggttaataaaaataaaataaataaaaaataaacgtcgcctgagagattcgaactctcgcggggaaaccccatgtacttagcaggcacacgccttaaccactcggccaaagcgactttttgttaggatgtctaatcatttaatatatacttattgtattaagagaaagcccatgaataagcccaagcccaagcccagtttcagacccagcccagttatgatctgtactgtctctagatatcctacaatttttataatgttggatgaagtgatctttataatttaaaacactagcaaattataaattttatatactttccttaataaaatatggttttgttttttaaaagagttaatttatgagaaaaaattagaaaaatatgggaaaatcaagtacctttagggtaactagttaccttatactattttctccttttttttttaaaaaaaaacttttttctaaattttccccttaaatatattttttttttttgaaaaaaactatttttacaactcataccttaaaatccataaaagtcaaaatttccatatattatttcattctatatgcatgtatttagaaaatttatctataactaaaaaggttgacatttttattcttgtaagttgttatatttgattcaattatgtatatataaattaaaaatattgaattatatttcaataaagaaaacatttaattacgtatattttaaggtagaatattgagtgttatctagtattattaaggagaattttttaagttttatttacaatttttcggcttaaagtttttatttataaaaatattatttctaaatttttaaaattataaaaatacaccttgttaaaaaaaaagtaagaaaacaacgagaaatcaatcttacgatacttataaataaactataaaataaccaaaaacaaccaaaagaacaacctcatgacaactataatataactattaaacaaccgaaaaaatagtttattatttttgctgaaagagtaaaaatatatttttttttccgtattaatgtattttgtaatttttctttttaattttttagtgtaaatttttttatttttagtattaagaataatggttaggatatccggaaaaaatactcatttttttagtccttttgcataataataatttcatttcatttccataattctttaagaaatgacttcctagatattcattccaatctaaaattattattacaaaattactattagaaacgaaaaaaataagttaatttgcaaaatgacataagaaaataatttatgttcaccaattatttacaagaataatgatatgtacaatagcggcggatcctgtttttggccgctaatactagtaatagcggccaagcaatagcggcggaccaata

SEQ ID NO: 114369 - DNA, 2602 bp, Cannabis sativa
cggatactaaaacagatagagatgtatcggtgtatctcttttaaaggggtgcattatagaattttcctatattgtaatttaaaaaaataataacaaaaagataaattattgaaatcaacacaataaagtatatttagagtaaaaaataaaatgaatagacattttagtattcaaattatttgtataattcataaaaaaatgaattatttatttattatatgtttaatgacagtgcaagaacaacggaagaaatatgtttttacgaatccaaatatatattttgatgacatttctggaaaggatgagttcgatgaaaatgcaaattcagaattacctcgttttgacttgaataccatagctacagccactaacaatttttccataagtaacaaacttggagaaggtggttttggtcctgtttataaggtacttatatataatgatggtaatgttatttttacttaacatatacattcacgtataaaatacaactaataaattatttcagggtatgctttatgatggaaaggaaattgcagtgaaaagattatcaaagaactctggccaaggaattgccaagtttaagaatgaagtattggtaattgcaaaacttcaacatagaaatcttgtgaggattctaggttgttgcgttgaaggagtagaaaagatgttaatctatgagtatttaccaaacaaaagcttggacgtcttcatatttggtatgtttgtttagtgtaaaaatttaagatcgtttgtagataattaaattatgacatcatatttacaagtagcaatttttcgcgctacgagatactgtgttgtataggtttacttatttgatgctctaagtacaattctagctttatattattcccagcaagccttgttctttttatacctaattattcttttaagaatattatttaaccatatatataagaggttgtttgtttaaagattgtgaatcacaatgttgagtcttttgtatgtttgcttcaaaatttaaggtgagaatattttgctacttttgtggtacccacatgctctttagtctctacaactttgtagacttaatttcaaatataggggaatattctactggggttcacatttcactcacactcaaatagactcaaaatacacgcccccagtgaagaaataagtttaatgagtttttaaactaatattgtttactattggccatataccgagaaaaggaaattgttagattggagaagacgctttgatatcatttctagtgttgctcgagggttgatgtatcttcatcatgattcaagattgagaatcatccatagagatctaaaaaccaacaatgttcttctagatgctaatttgaatcccaaaatttcagattttggtatggctagaatatttggaggagatgaaattgaagtaaacaaaaatcgagtagttggaacatagtaagtgtatattttttaattaagaattattttatctctctaattttatataattatttacatatacatatttacattataataatcttacgtacacaagtattgttatagtggttatatgtctccagagtatgcaatggaaggacgattttcaataaagtcagatgtatatagtttcggagttatgatacttgagattattactggcaaaaagaatactagctattatcataacaatttgcactccaatttggttgcgcatgtaagtggccattaagtagttaattatttatgaaagtttccaataatatttacatccatatagttcctgctaagtattctcacatatttaagatctaaacattataggtgtgggatttatggaaagaaggtagagcattagaaatgatggactcatccatagatgaagcattcagtggcccagtcttgagatgcattacagatgggtttttgtgtgtacaaaagtatgctattgatcgaccaaccatgtctgaagttgttttgatgttgagtaatgaagcaaatctccctaatccaaaacaacctgcatttgtattaaagagaaattctagtttaaacgtaggtctatcaactagtgatggacttaactcaataaatgatgtgacatgtacggtggtagaagctcgttaaatttataagatatgaaaattaccaatttattaatagattattcaattgttttatgattatacgtgcaataatagaaaataagatttattatttgaaattaatatttgaggaataatttcttaattacggagattttattgaattataaatatattttacataatatttatgaattttgttattttcatgttttatgtccggtgtagtggaattcgacgatttgattatatgtatcactatatgctatgatattttagaattagcggggcaagattgtgaatagttagaaatatcggggttatacgaggtataattgaatatgaccattttatccctagggtaagaggttgcttagaaaataagtaaggacatttttgaaacttttccacttgagtttatttagttatgattgagctgaattattattgattacgttaattttatattaagtttttttttttaaaaaaaaaaaaattagattaagggaa

SEQ ID NO: 114370 - DNA, 2590 bp, Cannabis sativa
  modified_base (2554)..(2564): a, c, t, g, unknown or other
atcactgaaacattaaaattgaataaaattagacaaaagtccttaagtttaacaatctcaatagttcgggggaatttttaacagctaaaaaagttcagagggcacgatttagtgcatgtgggaaaaattactaattagcctttaatagaattaaaactttggaaacgacaacgtttgatagattggtatagagcgattgaaatcaaatctgtaaataagttgatacataactcggctgtgaatagtaaaagactcaacaagaactttcggctgagcagaacagagcaagtacaaccctttgttctctctccggccggcgatcgggaaagaagaaaggcaattcaataatgggtgcagctttcgtggttggcgtctttggagttctaattcttgcacatgccacttattcaacgatccactgtaagctctgaatttcataaattcacatatacatctataagtatttggatccagtgagtattaaaaaagaaaattagggtttctttttgctatgtaatacttcctttacattaactgacaattgggttgcttttgattacttcttaaattggttatagatcgagagttgttgaagatcatggaggaagaattttcaggacctccaatcaacgtaagtttatttatttagaattgcggcggggagggagtggggagaagtggtttgatttaataattttaataaaaatatatgatattcatatatacaaatctgagaattttggggatgcaggtcttgtttgaattgcttctagggtttgtcttgtgtttatgggcagcgcttgctgtgcctgggaagttcctctcaatactccctcactctgaagaaaataggtaaaacatctttgtctcttaaattcttatagattagcgttatgtccacacgaatgaaatttagttggaatgaaatgaaatgaattattgaccactttcataagaatcaagaatgtcaaaaactttgttttagacactagtttagttgcaatattagagactgtaaattagctgaaagggatatgtatctccataattgtatttcttctataaattaaggctatgctctgcaaatctgtgacaaattgaagtgaaatgagacacgctaaggtaatttatacccagtactggactttggaataatctgaaagtagattgatgacttaaagtgtatgtgttatgtatttaattgtttatttattttttgtgattttgttttgaatcatcattctatataagtttaaaatataatgtttaatagtgaagttctccgaaagaaaaaaaaaaaaaattagggaattttcctacataccatgactctataatgcttgaattggatattcaactcattctagtgaattctaacatcgttgaccttcccataaccattatttttctgaaggctctaagccagcattatgttgcacttaatttcatgttccatgttgcttcagaaagattaacttaatgttccatgttattgaaaaattataataaaatgaactgtaaaaaacaagttagtttatatgctagggttcaattgctcaagtctgcttgttactttcctttgacttaagcattaataattaagcccgcagattgtgatatatttattgcattgtctttcgagtattttagattgataatgatgcaagtcattttcataccttctgcaaaggttgttgttttagaattcttctttaattgtatatgcgtttatctctttccaaagactcaactaaagtaaatcatcttgtttagatttgaataagctgaatgatctggccatactgcatattccaaaattgagttttcggagcagaacttttataaaataatagctgctttgaaaacaattagtcaccgtctccatcttgtataggagctaagttcaattctgttaaacagtagcaattatgccatatcttctacttctttatttctttctttccttcattttttatttgtcaacagctcaagtatgtaaataacctgttttgtggattctgtaatgcaggatagtttctctaccagaaaatctcgactttatgatcttcaaccaccgtggcaaagtgtttcctacagtaacagatttgaagctgaagcattgagtttgttcaaagaataccttcttggaggtggaagcacgacacagataaattaggtttattcagcaagtcattaatgttgtcttctgtcatattgttgagtaatttttgggttaactcaatgtgttttcaactttatctcatgttttttttctttcttgtaatgcaacttagattttgttggggaactggtaaaactacgaataggatacaatgatattatcaattttttagctataccataatcttgtttgtaatttgaaccaaccaaacactatgaaagtagaaaacactttatgtcttaccatattactttgttaaatcaattacattcaactagtacaacaagttatcccattgtgaaagaagattgaatgttggtaccttgtggaccaatgtacacactccatcaggcgtttggttgggaggaatgnnnnnnnnnnnataggaatgagaatgggaatgggaat

SEQ ID NO: 114371 - DNA, 1562 bp, Cannabis sativa
  modified_base (1505)..(1516): a, c, t, g, unknown or other
tatgcattttaaattttattcaatttcattcctattctcattctcattcctattcctatatttttgttcctcccaaccaaacgctaccttagtgttcttggcatttacggcaagagaaaatgagaaatataaccccaacagttattatactcaatccccattatcaaatctgattataccacccataaaaaattattattataaaaaaatcaaatttttataaaactaattttagtgaaatggaagccctaaaattaaatgaagaaacttttgataccaattattaattttttaactaaataagtattatagaaacataatgcattctaacaataataattataatactcatcaaacaacttaaaattaaatcattttatttaattgaataataatgaacatccctctgtcatcttgatcatcttctttgatcaaacctatccaagaaacacaacacacaacaagaaataaaatgcaaaagagaaactaatggagagcatactcttaccattaccattaggagtattcatcctatctaatctgtactattttactcgtagtgcattcgatctgcactaagtgtgaattttatattttagatccaatctaatccgcttagtaactcaaatccgatctgcaaaactgcagattagatcagttattttagattaattactttttaatattaaattatttaataattattaaaatatatattttttcacataactaacaacaaaacaacaaagtaaaataaattattattgttttatgtctccaacaataaatattaactaaataaaactaaaaataacaaatttaaaacaaaatgaaaaattgtatgtataaagttgtttaaattatattttttcttataaataagaatgaattatacatttgagttttgaaatatatttatattatatacattaaatatttaaattactattgtttacattaaaatactaatcatataaaataatttttaaaatatatataaatatgtatgaattagattggattggatcagttacttttacgtgtcaatcaacattcaatctgcataagtgcggatttttaattttctaatccaatcttatatgcacaagtgctgatatatccgcactttacagattggattggattagttattttatgaacatccctaattaccatcataattctcattcttattttttttatcccatcatatatatacataaatactctactttaacgagtaaaagaagtgggctattggagctacatcattgttgctggtgaactatagtttaataagtcaacatatagtcattagggtattaccatgtacctcaaatgtagttaataaagttgatcattctattatgatcctaattacataatcggtattgtaccttgcatataatgataatttatgtaattatcattatatattaatatcgacacggagagcaatacttaattatgttaatttatataaaatattgggtaaataccatttnnnnnnnnnnnntttgcaaaagttacagattggactctgtgttttgttaaatgacaaa

SEQ ID NO: 114372 - DNA, 924 bp, Cannabis sativa
gagtaggatccgaacgagagtgtcgttgaactgatccagaactaatctccaaatcgattgcccctcgtgcttctccaactcattccagccatgaatcttcctccgctcctcaatctcctcggttttcaatcccgatctcacactcacccgaaaccgctcctcgcattccccaatgtctttggcccaagccgggtatacattcttatcagacactctaaaattcgacgaggacgagctctccttggccgcgtaatcttcacctcccttccccattttcgttacagcaaacgaaaccctagctagcagcaggggatcgtatacgaagactaaaaatccaaaatgattggaaatgtcaggggaagaaggatgaggaatcggagtaatatataagagaataaagaaagagactcttgagtcttcttcttcaaagttcaaaggagtgattaaatattttccgtttggttctcgagaaaatttaaagctaataagagagaaaaacaaggagattcaacagttgttgtctctgtcccacatcgagattgagttaggacttaggagtggcttctccgtctctcactactttttaaaattattaattaagttcaacttaattatttaagattcaagaaaaattaataattcataatatattaatccgaaaataataatttgtaatcagattttgatagagatttgattcgagggattaaataattattttcgaaactgccttgtaccatcgtacgcatactgtacgtcagaataacagttggcgcatcaactatgtcatttggctcatctggcacccttttattggttgatgctcatagtttctttcctatgaattccacttaggggtgttcattggatcacatccaatatttttaggcctatccagatccgatccaatcatatattggatgt

SEQ ID NO: 114373 - DNA, 3079 bp, Cannabis sativa
ggggggggggtgaatatcaagcctttaccaaacttttacaagaacatggcattactcataaggtttcgtgtcctcatactcatgagcaaaatggtgttgctgaacgcaagcaccgacacattgttgaatcgggtttaacattgttagctcaggcctctttaccattaaaatactgggatgaagcctatagggttgctgtgtttttaatcaatagaatgccaaatcctagactaaaatacagtactcctttagagattttattcaacactaaacctgagtatacttctctaagagtttttggctgcctatgctatcccaaccttagaccctacaacagaaataaactccaatttaggtctctaccttgtgtatttcttgggtatagcttgtcacacaaaggctataaatgtctttctaaagatgggaggctttacatctgcagcaaacaaaaccagtaatcagttggttaagtcattccctctacccactgctcttcctcaagttgctgcatctccaggttttaattcttccataaatactcctagtcactcacatgaatctctcagtcatatccctgtgtctcctcccatctctgacactacttccacacaacaaaacccgattctgcaacatcctgagcaaccaaactcggacactgaacagccaaccattccacaaaatccaccttccctgcccatttccaatactcaaacagatccattatcaatagagcaacctgacatcatcactgctcctcccatttctaatgtgtcttctacaggtatcaacacacatcctatgaagacaagagcaaaatctggaataagaaaaccaaaagtgctaatggcttcacttcaaccaacaacagtaaagcaagctcttaaagatccaagatggtttcaagcaatggaaacagaaaaacatgcattggtgaagaacaaaacttggaaggtagtcaagttaccacctggcagagttcccattggttgcaaatgggtatatcgtatcaaagaaaatgttgatgggtcacttgatcgatttaaagcatgacttgttgccaaggggtatcatcaacaagctggctttgattacaattaaacatttagtccggttgttaagcatgtgaccataagaattgtgctttcgattgctgtctctcaaagttggtcaatcaaacaattggatatcaataatgcatttctcaatggagatttgcaagaggagatatacatggttcaaccccctggatttgttgatccagaacatccagattatgtgtgcaagcttcaaaaggctctttatggtctcaaacaggtacctcgggcctggtttgacaaattgtcatctgttgtgattgctttggggttcaactatgctaaaacagatcattccctatttgttaaacattgtcctcaacacacactttatgtcttagtgtatgtggatgacattgttattacagggagtgattcttctcaagtgtcagctctagttactgctctaagcaccaaattctctcttaaagatcttggtgatcttcattatttcttgggaattcaggttcttcgaacatcagatgggttgctgctctctcagcaaaaatacttgcaagatctcctctataaaactgagatgcagggagtcaaaacccaaaactctcccatgaatgctgggcttcgactctctcaatttggatctgatcctgttgaaaatccatctcattaccggtccattgtaggagctcttcagtatgcaacaatcacaagaccagacattgcttacagtgtcaataaagtatgccaattcatgcataatccgttgcaatctcactggatggcagtcaagagaattcttagatatttggctggcactttagactttggacttcatatttcagcaactcaatcaactcaccttcaagccttttgtgatgctgattgggctgccgatcccgatgatagaagatctaccactggtttctgtgtattccttggtgacaatctcgtaacttggcaatcgaggaaacaaacaacaatctctcgatcctctacagaagcagagtttcgaagtctcgctgttgttgtttctgagctcacttggattaagtctttgctctctgaacttcagtacaagtctattcctactcccaccatctggtgtgacaatgttagttcagtcatgcttgctgccaatcccattctacatgctcgaacgaaacatattgagatagacttgtactttgttcgagacaaagtactgaacaaagaaattgatgtcaaccatgttccaacagctcatcaattagctgacagtctcactaaaccagtctccagcaaccagttcactaatttcaggaccaaactcagagtgttatgctcttccaccctgagtttgaaaggggctgttaaggataagagttagttatggttgttaagtttgttattctctgttatttagttttgctgagctgtaataacaacttcctcttcttgctttgctgttctaactgtgtatataaactcactgttgtactcagttcattctaatggttgaataacagaatttgttccttgagtttctttctctttctctctgttattttaccttgtcagctataactgtcggggtatcaatctaagtctcacattaaaaaaataaacaagagttgcttacaatttaagtgtcctacctacttcattagtatgaggtctttttaaaaaagtgtttaaaaataaaattgtgagctggtggccaacaaagtagaagaatagggccgaacatagcacgagcttggagcccaagtacttttatttgttgctaactgtgatctcttcccttgaataatacaaaatgattcctttttctttcccatactcaaaacttgtagcttgttctttgtaagcatcccattgaggggcttaaacatggttaatgtaataataatgacttgtagactaaaactagttaatgctctaaaaatttaggtgtttaacttcttttaaactttcttaaatacttagagcatgtttagtattgttttttggtttttattttcaaaaaattgtttttagaaatgaga

SEQ ID NO: 114374 - DNA, 3465 bp, Cannabis sativa
  modified_base (727)..(729): a, c, t, g, unknown or other
  modified_base (773)..(795): a, c, t, g, unknown or other
  modified_base (1943)..(1961): a, c, t, g, unknown or other
ttttttttttttttgtgagttattttacccttttcattaccactgtaactgtaagtgttgctgtttcatgtttgtggccacatgggtcttcttccactcttccctattgcttctatttgggctttttgggtatcttttattgggcccacatggggcccatctttaatgacctatgtttataaatgaatagtttcactaaagaatgtgatgataagttcaacctttatttatttatttatttgacttattgataacttccaacttttgatttttggcttccttttaaaatgtagttttatttgcacttcgtgaatatatcttattttataatatagttttaatttatattaatttttctttcttattacattctaaataaacataaatataagtctatttaaataaaaattaaaagaatatatatatatatatatgaaataagcaaaaaataaaaatgtagacattatttaaaaaaaatatgaagacaggatgaaagagttataaaataaaactaaaaaacaaaaagaaaaaaaatttaagagtcaattttaaaaattaatttaatataagttaaggtttgtatacaatgcctcactttttaaactttctctagtttttacagaattagttttaaacttattacattttaaataggaataattacataaagcactattttttgtaaaataattatatttttaagttcaaagaatatttttttacattnnnacggtttttcaaaaaataacacgaaaacaacataaaagtaacannnnnnnnnnnnnnnnnnnnnnnatacaaataacaaaaaataaacaacaaattaacaagattacaacataacaaatcgtattttctgtaaataaaataaaaaaaattgtaaaaatatttaaaatttcgtgaaaccgtatttttgtaatttttttgttgattttatgtttttgtgaaataatcccttttaaataactaaacttatagcttcgatggtacaaaaaaatgtaaccaagctttagtgttgaataataattatatttggtttagaaaaaattctctcggccattttgaatttataatagtagtatattttctataaaaaaaaaatgtgtaaaattgttttatacttttgaaatattattattatttagacattagggaatttattactatttatttacaagtaacatatactttttaaacaagaaaaataaaataatgatatgcatgtaattgtgatttatttttttacccagacaagtcttcttcatgtacaatattataagataatagagtgttttggactttataaaaaattagcagtggtctatttttctagaaaaaagaaaagaaaaaagaaaaaggattagctgagatgtctattttactatttaataagaatttaattccttttttaaaatgaatttaaatggtatttctttttgtttcataacatgttattcatatatctatacgtataaacatcaattatatatatatatatatatatatatatttattgttattgttatataatgttgaaaaaagtaaatttatcatcttttgtgattaattttctaataaatttattatatttgaaattaaaacatacaaattttaagggaattattttatatattattttttattttttaaaaaaatttactgtttgagttgctctgataatttttatgtaggttgttatgtgaattttaattgcgatttaagtatctctattagttactatatgcgtttttatgtgaattttcgtaaaaaaaaaaaattgttttaaaagtgtaaaattaaaaaaactctaatttttattacatgatttatttatatttaaaattttaatttatttaattttttaatagttaatttatttaaaattaaactttcaattttcaattttttttaatgaggtgcataatataataataataataatnnnnnnnnnnnnnnnnnnnattattattattattatttctttgtaaaaggtgtgtagaacgttatataaaatacatgaagtgtatttaatttcattttgaatttatggaataactaaggtgcatttaatatgagatgtgaataatataacccactttctctcatttatagttaataatgatatttttgtttactttatatatttatacgaataatatatagagaaataaagtgtcataaagtaagtttggtacatactcaattataacttgtattgtaataattataattataatttttaattctcaaaagtatggtattatacgatgtaacttggtttatcatatagtctaccaacttaaacaaaacatgtgaatcttttatttttattttttattttttatttttttcctccaccataaattagaatcctggctatttcttttcaagatttcctcttatttttatttaataaaaataaactttttctgcatttaatttattttaatgtgtttataaaacattataattagaattaattgtggagatatctttaagatttctcttcctatattaaataaaaaattatacatttttacagcatttttaattatctaatatcatgcacatggtttcatgttacaaaaagatttaaatgtttaatttgcagcataatatatattttgctttttgttgcttataattagtgatttagtagctgtaagaataaaacattgatcattaagtttgtaaatcttagcacatgctatgcccctttaattgcttctcatttactccaactattttttatacatgatccaaatctaatacataaaaatatatagttttggtttttattatattttatgtaaaaaagaatgtatataaatattatgtacttagattaagatttaatgtattatgtaccttagagttggtgtgtaaaactaattattagatttctaatgattaaatattttgtggttgaaattaaatccacatcatatgtgcatttaacattataactcaaggtggaatatatcttgttgtgttcaataatttttgttttatatatttatattaaaattaagagttttaatattttaaaacaggaccgaccttgagattgtatgggcttaagaaaagagaaaattattggactttttatttaaaaaatatatagtacttttaaaaattattaaaaaatatatatattattaaaaggaaaatatattttgtagcccttaagttgagtggaccctgagcacaattttagtcactgatttagtctaagtgcgaccctagattaacactggtattgggcaccactataaagtagtacctcgcgaacgaataatgattttttataataattattaaattaaaatatgtgaaatatgatatttagttggggggttctttttgcatcttaaaaaaaatgataagtacacctaaatatttaagaaaaaataaatttaaaataatttttaaaaattattcttaatattttacaaaaaaaaaaaa

SEQ ID NO: 114375 - DNA, 2368 bp, Cannabis sativa
atttttcacgtcttatctaacgaccaaagttatcgaaatcatgatgtggcaaaattgttagatatttcgccgtgaactgtctgttgtgccgtacatgtcagacaattttaacgcttcttatttttctattgctgaaatggtttagggatcattaaataaataaacaaatcaaaaagtaatttttttttttttttcctgtttctgaagagttgatatttcaaacgtgtcgtttaataaccttttccctggaagttaaaaaaaaaaagataaactagacatatatacatgggctatgctaagtctccattaaactctttattataaattttcattattgttgatttaaaaccactaccagacaaaactaaaatcatttcatacagacccagattctgcttaaatagtggtctgagtctctctactctcctctccactccattttcatcttcctcttctatctctctctctcttactattttaataaacccaaaaaagtttctccatgtggacattcacggcgagctggttgacacccagctcactcttcctcttcctcaacctcatgatcggaaccttatttctcatgtctcgttttgggacccggaaaactcctacccacgaccaactccgaccacacggctcgccccaacttgttcgatcaggctcactattggaacgtgtcaaatccttcaacctctccctctacaaattcgagtcatcgcctgccgtcgaaaccgtgtatcaccaccatcctacagacccagataattacccgacccacccgactcaactgggccgctctccttcgtttttggagcgcttgagatccgtcgatttgtcttacgtctacaaattcgaccatcaacaaacccaccctgaacccgaacctgaaacagttcggcatgaagagaaaactccggttcagaatcacatggagcaggatcattacccggttcggtttcagaacccgatccagccgcctcaacttgtccgtactccttcgtttttagagcgtctgagatctatcgacttatcttacgcctacagattcgaccatcaacaaaccaatccggcaccggaatcaaagactgctcgggatccgaacccgctcgaggaccactctcacgaacccgcacacgtgacgagaagcaagtcggagtcggagtctcacggcgcccacgccgagaagaagagccagacagaaatgatgacgaaatcggccagcgaaaaaatggggcaaggtgtcagaaacagttctaataaagacaaaaaagacaacgacgaagaagaagaggaggaggtcgtcgaggcagttgagcggcggaggccggcgacaacgagggtggagagaaggagttgtaataatggtggcgaaacgacgtcggttaatgaatttgatgacggagttgacgctaaggctgacgactttatcaatagatttaaacagcaactgaagttgcagagactcgaatcgtttaaacggttcagtgaaatgttatcagggaagtagctagtttacaatggagaatctatcatttaaagctttttgcattttttattttctttttattacttttttatccagttttaggctgttaaatctatagaatgggttatatgggtaatttggtaattttccctagtcgatgaggttgacttgactgtgttgaatactgctatgggttaattcatggtgactgatgagtagtgataaaagcatagtggagtatagggaagaaaggaggatcgaatatcgaggtgaggatttgtgttgggtcagataccgaagaagaggatgaaaaagtgtaacagctacactgtgaaatgaccgttatggtgttaacggcttttgttaaataatattgaactccattctgtccttttctttgttaaaactcgttgtttgctgtgattgtattgtaaccttatgctttaatttttgaaattttatctttataatgattttagaatgtaatcacctccacaccctgagtaaatattagagttggattaatagatcttgtaccatgcagattttattttacgaaaataatttaaaataagaatatttctgtatatatatatacacaattcatattcctaatactatttccaaaataaatcaaaacttataacaccatataagtatattatgatttagcactatctatatagttttgtagtttggatcattcatctaattgtaaaaactaaaatggtccaatcaacccaatatatataaattaattaagatttttgtccaaaaatctttatgtactcccagcttctattaataaaattagacaaaaattattaattccaataattttaaaagttaagtcagtaacgctagttttttttttttttt

SEQ ID NO: 114376 - DNA, 3975 bp, Cannabis sativa
agtagtaaccactcttaatagtgtaataacccgatttttctttgtaccagtaccacctatcttgatttacctcagaactcaggggtatgctccaaaccaacgcttgatctctctcatttaatacatcctccagaatctccctatcccattctctcatcccaactctcataagagagttgacagtaatgttagtaagaccagggtatatggaagagatgtacgagttgctgtcatggataagccaagggccttgaagcacatttacatttaaacctgacccaactcttcttcggattcccttcctaatcaaatcttgagaggcaaagacactcctccaaataaagcttggattcgctcccaattcagcattaagaaaatttcctaaaggaaaataccttgctttgaaaattcttcccaccaaactatcttcattagtgagaaatctctatccatgcttacccaataaagcgagattaaagtcacgaagatccctaaaccccattcctccaactcctttatgcttactcaagtttttccaactcaaccaatgaatgccatttttctgagccgacttagagtgccaccaaaaattgcacatgttttgttcgatatccttacacacctcttgagaaagttgaaaaacattcatagcataggatggcaaagcttataccacaactttaataaggatttcttttccagcacgagataacaatttcacatcccaactctgaatcttttttcgaactctatccttcaaatatccaaacacaactattttgtttcttgaaagtgtagatgataggcccagatacttgctgtcttctgctgcttccataatacccaacatctgacaaatacggtttctagattgggctgatgtattggtactaaaaaaagctgaagacttggtaaaattaactttttggcccgatgcaagttcaaataactccaagagttgttgtatacggtgaacatcatcctcattagccttacaataaatgtaactatcatccgcaaagagcatatgagacacaaccggacctctgttcgccacccgacacccatgaatccatttcctttcctcaaacttacgaatcaaagctgagaacccttctgcgcatatcagaaaaagataaggagagatcggatccccctgtctaagtccccgagaaggaacaatcggaccaatcgcatgatcaccacttactaccgtatactcaactgatgataggcaattaaaaataatgcgaatccatttcttagcaaaccccatcttttaaagcatatcacaaatgtatgaccattcgaccctgtcatatgccttgctcatgtctaatttgagtgccatgtatccatccttgcctctttgttttcttttcaagtagtggagcacttcaaatgataccattatattatcggtaattaatctagccgggataaaagcgctttggttaaccgatattatgtcatccaaaagtaccttcatacgattagccaacaccttagtaattatcttcgcaagcacattacaaagtgagattggtcgaagttcactcatcatatcaagacactttttcttggggatcaatacaacatttgttttgttcataacagattgcatagattccgaagtgaagaactctcagacagtaagagttacatcccctccaacaatgtgccaatacttctggtaaaatactggattcattccatcaagtcctggagacttatcaggatgcatttgaaaaaccgccgctttaacctcctcctcaagaattggtttaagtaaatttatattatgtccctctattatcgttgtaggaacacatgataaaatttccctccaatccaccacagttgccttaaacaagtcatggaaataatcaaaaatcaccttatccaacccattatcccaatcaaccaagacacctctatcatttttcaaatgaacaatttgattatttttacgtctggcattagctcgagcatgaaaaaacttactattttgatctccatctcgcagccaatgttgcttggaccgttgctttcaataaatctccttttgatgaagtatctcgaaaagttgttttttagtctcactatactgcttcatcccttcttcatcacgtctccctttcagctttttaagagatctattacagcccttaatttattgagaaaaattgccattgaaacctttaccccactcggccagagcttcccaacacttactaattttgaattgaagtgagccccccacattagtcgcccaacagctttgaatgactgcctcacagccagggtcactaatccaccaattctcaaatttaaactttctaataccagtgccatgattccaaaaatgagtttccaacaccaatggagtgtggtcagaaggagagacatcatgattaaataatcttgcaaatttgaaaagttgcaaccaatccccattaaccatcactctgtctaaccgagcttcaatccattgactagtgtttctaccattctcccatgtaaattgatggccatacaattctaagtcttgcaaccgacaaacccccacgacttccctaaagccattgataagccaattcggataccgattccctcccttcttttcactttgatccagcacattattaaagtcaccaattaaacaccacgacaaagtactctcatctttaagtgttcttatcattctccaagtatttgcacgcaagcttctattcggttctccataaatcccagttagccgaaactgatgttgaccatcccaattaaccgaagtatcaatatgattcttcgagtaactgttgatacaaacctcctcttgattcttccataataaagcaatgcccccacttctgccatcaacttcaaccacaaagcatccctcaaaaccaatagcattacctagcctttccaacttttctttaccacatagagtttcacttagaaaaataacattgggccgcttttgaactacaagttcttgaatgaactgaaaagcccgcgggttcccaagcccacgacagttccatcctattacactcataatgttgggcgagccccataagcaaggcccgccaaatctgagtcttttgaaagcccattagcttccccctccagtcccacaaattttttctctaaggtctctgttgacttctttcttttattatccaatattaaaatactaccttttgaaattagctgactatgtcccacttctttaatattattaatcccaggagagatattgtttccttcttgagaagacttggcagcttgcatatcaagtgaatcatttgtaattgctctatttcctttaatgtaggcaccatttactctttgagtcatgcccatctctactccttgattggcactttccatattggtatcttcttcttgcaaatctgatccaccactgctgctaccgccggtatgcgttccaggaacccagcctcttgtcctcagccattttgctccgatattctgcttacagttttggagctttgctcgcataaactcctcatatggtttagcaatttagtcaatcggtttttcaaaaagcttagcacaaaacttttcaaaatgcccaataataccacatatgaagcagaaagttggtgctctttcgtatttgaaggttgcccaaaatgttatcccatctgttttcgtcaaacgcagccttctccgtagcggtttgttaatatcaagagttacctaaactctgaagtagtctctccaaacccacacaaagttcttttgatccgactccacaaatgaccccatcacattagcaacattttgaaggacacttttagacatacaacctggttgcagatcataaaccttgttatcccaaatttggcactctacttagagcatctgttcggatcaacatgccgagcaggatgcctcgctggcatatccaaaatggaatactcaacgagtcgtgcagaatgagca

SEQ ID NO: 114377 - DNA, 3287 bp, Cannabis sativa
tatacacaaatagggaaaccatattaaacactccagccgaaatatacattaaataataaaatatttttgtcaattaaatatgccaaaaatgaaattaacaatgttaaccaagcgaaatataatttttgaactttattgatttaaaataataataaattgaaattaggctttatttatagcataaaaattctagacctaaaccgatggcttcactatgatcagtgacagggacaacatgtccaatggcattcaagagatcgacaatggctttaatttttaaaatatattcattaatggaaagagaattctttttcgtattgtttagttttaaattgacttattatctttgaacttgtttgagcagtgaagaattcttaaagagctgcccaagcttccgctaaagtttcatggccaatcatatgagtgttcattgatcattcatggagtacatcatccatgtaaaaagtaattgagcttgagcttcctaggtaagcttcaaaaatgatattgttgatgcgatttgtttttgtgtcaaacgtgaatcagaatgtagttcgaacttgaacaatagtgaggatttgttgtttccatgagaaaaaaattatactttcatcaagcttggaagacaacgaatgcttgaaggagattggttcaaacttgtatttttcggaggtggacgattgatcgaccatggaagctgatgaaaaaaaaaatacaaagagaaagaaaagattgaatgaggaagacagaatttttggaatcaaagctctgataccatgttaagattcaagaactgaaattatattctctgcattgatttgaaagagtgattacaaacttatgtatagtgtttaggtagttacaagaaatgtaacaaaaaaataactaactaattctgttactaacactaactgcttagttaaattaaggcttgtaataactataactaatttctctcaacaaattaatctaaaatcatattttttgtatcgtgctgtactcatgtctccaaatttgctaaaaaattcaatctaaatataactaataatgtgtatcatgcatattaatagtaatcgttttaaaaaacacttagtcatataatatatatgctgctatagtgatgtactaaataaatagctcacttattatatgattattattatttattattatataatgtgatataaatagtttgttaaaatttatatatatcgcacgataataatagatcttagacattaattattgttaaaattagatcttacccactaaatcgacaccacaatatttcattcgatctaacattgtcatatacctaccaatattaccaaatcatgccccatatctaaagaccacaaaaataaaacaaaatccatttgaaatctaaaatttgaaattctatatatgattaatgaagattaataatttacaagagcagccctcaaaatatatattaaaagaagaagaaaaaaaaaaataataaaagaaaaatttgtttatcatattctaattaagaaaattgttacaagaaaattaattaagaccccaataattttatatataattaattaacaaaagtaattaaaatatataatggtgatcaataattaattctagtgatggtaataaggagatgtggcttgagctctgtgcttgcgtttttggagaaatctttggagtgatctcttcattgaaagagccgccgttgggctgtaaatcggtgactgaatgctcggtgagcacggctctgacaccggtgttgtctctattgctgccgccgccgccccccttggtgtctttaatctctcctccatttctctacttgcaagaagaataatggctctagcctgaaaattaataaaaaaagacttaattaatttctttcaaaaaattataaaagtaacagattaactatgataacaaagaaagtctaggtttttatgtgtaattttactaattatttcgcgaaatttcttatttataaaattagaaagcttatgtctaatagacttttgcaagattgttaatcagtttaacaatcttacaaaaagtctgttatttaacagtctcacgaaatttatcgtgagactgtttcaagcacaataattaacacaattttcttttttattattattattaaaatgacaaactcaaacccagaattccctcaaatcaatttcattttttatgatctcaagaaataataataataataataataaaaatgaagtacctgaaactcagttacatcacaaacacaaatctttccattgtagaagattgtaagtggctgattttgatttgtagtactacttctgttgttcatcatcatattactatttttattcgaatacccatcatcatcatcttcaattttcctacataataataacaacaacacaacatgttatatataattcattattaactttatatatatatatatacatacatatacatacataaaatatatagagagagaaattaagcttacatggaattgtgaatagggtagttagaattaagatcagcaactgaaaaagcagctgggacaagttgaagctccaaattgcaattcctcctcatatttcagcaactattatttcttacaaatatacttaatataatttagaataaagagagaaaaaaagaaaatatgaagaagaagaagaagatgtttttgagtttgataataaaaatggtgtttggtttgatttatatttatacatagaatccaacaaaagtttgtgagttgtaagaaagtggggcccactaaaacaaagcagtgatatgtatagactttcgaacacgtaaagcacaaacctttaactctctaaacaaacagctaataatataatattatacatatacaacaaaaaaaaaaaaaaaacacaatttcatcacatgcatcacgttttttatttatttcttcttttaattgtcaccattgttttttttttcttattataaatatatatacatgtgatagactgtacactattaatattattaaattattatagtcataattacaagtataataatatttccacaaaaactgccaactctatataactactattcttcctctaccattctacttattttctttttgatattatttatttatattataataaataaatggtaagataagtgtatgcatcacttagggcttgtttgcactaacaaagggggtaagttgaaaaataccacttttattaagcaattaatcaaatttacctctaattttatatttatttgaaacatacttctttttatatgta

SEQ ID NO: 114378 - DNA, 4554 bp, Cannabis sativa
  modified_base (1245)..(1245): a, c, t, g, unknown or other
  modified_base (4519)..(4529): a, c, t, g, unknown or other
atctagatcttggtaaaatattcccaacatctggtctcagagccatggtaatgatttactttcatgtaatctggatttaaaacgatgaatgttgtttattgtgttgctttggatgtgttcatattggtttatgtgttacttgatgaatgcatgtgatttacaaaaattttccgcgaaaataatttatttggatttcttgtgaataattaagcaacttttgtttttacgtaacttaattccaataaaaagggagagagatatggtggtttgaagtttcgggtccattgggtgcatcaatgtcgagcaccatgtgcgcatagcactcgaacaaggtgatccgcgcgcgcatgtgcttcaaacaattccttgtctgaactcgctccacgcactcgtgaccctgctcctctcccgtgtccaatgctgcaggtgccgagaattctcggcgtgacaccctacaggtgcccttccacgcacgcatgaaggctgcgtgcagcctgttgcacgcccatgggtgatttttcacccaaaatttgattttttgggattttttcacccaatttcgaatttttcaattttcaaccctaatttttaaataaaatattacttttaccatttaaacttaaatatcaaattttaaattaataatatttaatttttaaaataaattattattaatttttgatattttgaggtttaaatttaaaaattgattatcatcaaattttaaaattttgttaatttttttaatatttatatattatttaattataagatgcgatattttaatattggtatatttttaaattaaaagatagcattatctttttaatttaaaatattatattaaaattatcttgtagcataaattaaataattaataaatttgaaattaacctagatatttttatagacattctaaccataatattttcagattcaaaattggttatttagttaaatattttattgtttataattataagttagaaaaatgatatcattttacttattagacatttataaattttataaattatattttatattttaaatattctaaatattcaaaaatattcaaattattcaaataacctagatatttttgtagaaatttaaaaaaaaaatgtttaatttgagacatattgacatataattcgaataattgttatttgtttattattttattcttaaaacaataatttcttagccataactgttttaaaattgatttattttattattttnattttattaaattataagatgagaaaataatattaataacatctatttgtttattttcaaatcatttatcttaacaaggtcaacaaactctattaaataaaactgaacttaattaaataaaagcatcgccaaataaccatctatattggtaagaaaaaatatgaaactaggcatgagaacgttgagaagctaaaagcctcaaaaatagatatcctaaatcttgtttggaattagattcagaagcagacgtgcatctatggtacaggtggttcttgctcccctcaatttcctaaaactaatgtatagatatacttttgtatcatttctacaattagtatacacatatagtatacatgataaatttaattacagattaattttattacacaatatatgatttcctcctatagtaaaacaaataatattatatataattttttgaaaaagaaaaattagttgaaaagtcaaaatataaaaaaaaatatatatatatatagatattattttttaattctcccactattttctctaacttctcacttcccattatcattgccactctccactcttttcacataacgtaaaaaaaaattgagaagagaaagaaaaaaggggtatcgacactttacaaaaaagaaaaaaaaaaagagaaagaatgaaaagaaaaatcactattattgttcttcttcaaattgttcaaagtcttcaagggtaagtatctatgcaatacattcattcttctctctattttactttgtactcattctcttctttttcttttctattcatctatagaatgccctcattttataaataaaaaagaatgacatcattccaccaatcaaaagatgccctattccatggagtgctctgattccaaaaaatataaatttatggaatgctctcgttgttagggtttatgctctgaaaagcctataaagacattttttattattaataagagttgaatattttgatatatgcatgaatgttaaattattactatttaatattgaataatttatctatatataaatattaaaaatgaaagaaattgattttgtgtcattctcattatcaatcagagtcatatatacaatatacaagcataatattatgcatgaattagccaactaattgctaaaaatatggaacaaatattgaccaattcaaattatgatatatacagaaataagagaatatatatcttaatttgaattggtcattatttgttccatatttttaacaattagttagctattttatagcataatattatacttgtatattgtatatatgagtctgattgataatacaatggcacggaatcaatttccttcatggtatcagctaccaatttgatcctctctgttgaaccatagtagttcaccttcttcttcttcttctcactctcaaaaatggcaaaaagtacggccaaattccatcttgccctcaccatcaccaatggaaatctcttgtttctatcacgttagataacgagcaggctctgtatcactcatgggctcccttgttgaccaaccttactcgggttcatgatctctacaatcatattgttccacccacagaggaacttgacagagtagcataccttgctgcaaaaacagccgaccttgccttatgaaaatgccttgacactgcgattctccagtggatatatggtaccatttcctctgaccttctccttgctatcctacgacgtaatgacatagttgagggagcatgaaaacgacttgaagctttatttcaggacaataaggcttcgcgagcaaacctcctcgaggaagacttcaccactatcgttttcgaggaacaccatacgtaccatcaacaactactacaattaccttcaatctcttgtagattggcttgcggatgtcgatgccccggtgtcaaatgggcagctcatgttacgtctcacaggttctttgccagaggcgtacattggtacaattgatttcatccaaaatcaaaaccccttacctttgttcgaaagctgtcgattaaggttaaaaatggaaaaatgcacaatcaaagcacgtgtcgcacgtgaatccggaacctacaatggcacacccatggttgcagtaaccactaatgactccaatgactcttcctctgctcctaacgcaacaacagtaacaacaacaaaaataaaggtcaaggaaaaggaaaagggtctagtcaacaaggtggggccagtggtggtgcgtttattcaggagccacgtcctcaaattcaatcacaatggccacagtggcagccaaattgagaagggtggaccattcttcattgtcctttccctgcctattcttggcatccacgacccaattacatgacccaaaaatcttttgttgggcctggtgtgcttaagcccaaatctcaagccttcaatgtgatgactccatctattactagttacacgtaaactgatattgaggccactatgcatgctctatctttctctcaacccgatggaaactactacatagataccggtgccacatctaacatgatggcagatgcaggtattctctcgtcttatttcaattcaagcaataaaaatcataacattattgttggtagtggtcatttaattccatttgtcagtcacggtagcactaatttaccccaaccttatcctcttttgttcttcaaagtgtgttacatgctcccaaactccttaaaaatcttatctttgttcttaaatttaccactcacaatatggtttctatgtcttttgacccttttggtttttcaatcaatgatttacagacgaggaccacactagtgagatgtgacagtgttggggacttatatcctctcttctcaaattctcaagccacatcacccacacattcaacttttactactatgagaattagccgataattaaagcttaattctgaaattagatttttaattatgttttataaatttatggagatatattttaattctaggtgtgttatttatgttctataggaaatttcatgtttttcatatttatgcccggcaacattggaacgcgatgtttggccgatagaatcacattttcttatgagtttgtaatttagtaatagcggggcaacttagatagactttgagaatgtcaaaaatatttgaggtattagatttgacaaaaatacccctatgtggctaagagactttttggtgtaagtaggagcaaaatagtctttttgttgggaatattttaccaagatctagattaactaacaagtatgttgattaacannnnnnnnnnnaatatctctaaaataatgaaattaa

SEQ ID NO: 114379 - DNA, 2423 bp, Cannabis sativa
  modified_base (1866)..(1867): a, c, t, g, unknown or other
aaactaagaaaaatggaatgttgattacattaatagtaataaataaaagatttggacatccacataattaatattatttataacaattttaatattatacttaatatatttttttcttccaaataaaataaagtaattgaaaatgaaaaaacataatgaaatattactaaaaaataagggtaaaaaaagaaaagataataaaatcttaaataaaaatacatgaggcacgttcattcattggtcatagatggagcagcatgcctgcttctttagctaaaggcactacaaattttgattatagtattgaacttttatagcctatttggtttagtgtcttaatgtcttaattctataatatttttacacaacatttacattatattaaattttaacttatactaaaaaattatatatttaagtgttcatcaaaattaataccatatataattttacatataaatattatataaaatataattaaacataatactatataatagaatatatgaaattatttttggttttcaagattaggaaaacgaccactctcaccactaaaccaagcccttgtcaaattaacaatatcacgctctccatcaacccaaactaaaccatcattgggtaagtttacggacaatccataatacaaagaacaagctataaagggccctacccaaaaaacccaatgattatcccacaacccacctccaaacaacaatgctgggcccaaacaccttgctgggtttaggcccacacccgcatagccgggctgtccagttacagtaatggacacaaaaacagcaagagccatggacccagccacaatgacacaaaccattgcaagcccaagttcattgcaccgtcttttgtcaaatgcaacagttactccaacgaacaacacaagaaatgtgcaagcaaattccaacaccaaagctgtgtcagcgcttacccctgaagcgccaccgtgaccatttacactgcagcctccaagagagtaatttcttgcttcgttttggttcataacaatcttgattactagaaagcccattatggatccaatgcattgggccaagacgtagattgaggcccgagaaagagttatgagtccctttagagttgctataaatgtgaagattgggctcatgtgtccaccagataatggaactgtcaccattaggaaaagaaatactactatgaatactgcgaatgggactagaagctttggatggacctcacctgagtcaaggcacgatatgatggaacatgttagactgaacattaggcaagctgtggctactaattctgttaatgctgccctccacatctagatcaattaagacaacaaaatatgcatattattttttatatatatatggaaaaacaatattcttttgagctataggcacttagcagcaaaagcggtacgaaattgaagcaaattcataatattaattataaagatttgaccgaagtgtatggacgagatatctagcaacaagaaggaaaaagactcccttggtgaccaaagccttgtgaatgagaatggcgatttttcttatcggataagtttcgattctttttctttttctttttcttatgaaaccttgacacgaaaatcaacaaatatttttttttgtttattgatgaatttattaatatatatattatagagtaatttataatataaatatttaagtttcacttcgattgtaaataaatatttaagtttaatttttaatggcaataatacttaagttatatttttgaaactttttaagtagcaagttgttagatgttaattaaattgtcatacgacgatctccgattgattcagaacatgagtttttactttttttttttaaaaannaaattaatttaaatatattaataaaaaaaatatataaataataatttttttaaaaatataatttaagtattattatatatgattttaaatttaaaacaataagtgtgatatttaaaaatataatttaagtactattataagtgtatggactccattactcatcttcgtattgccaccgcacacataacttcgagagtcatggtgatatttacatttcttggaacaactaggtgtgtaagtgtgtaagaagagaagggttcaaatcacactgtaaagaaaaaagagtatttagttttaaaagctagtttagcattagagatattggcggttaaaccacttgaactttacggtttgtaacacttaaccacaaaaattaaatttttggcggctaaactacctaaaccctggttctgttttgctctgcacacctccgtccaaaaatcacagtttagtaccacgttggactgtctacctgtacacacttgtacacgaggcaaatttttagtagttcacgtaatattagttttaaaaaaataattataaatatttacaaaaa

SEQ ID NO: 114380 - DNA, 4690 bp, Cannabis sativa
tttttaatattggggtgcatttataattttgtgcggtgaaaataaaatttttcataaatataaagcaagttatacaaacataactttataaatatagtttttttaaaaatgtataaaattttcactttcattatatatttttgtatatataaatatatattttaaaaaattataattaattaaataaatatgatattaaatatatatatttaaattatgatttaaaaccgcgcgaagcgcggctttgtttactagtaaaaagataatacaactttaggaatcttacctgataagcatcataaagactaggacgaataagttcagccatgctgccatcaattacaacgaaattttttgttccattagttttaacaccagttacccggttaaccaaacagcaagtgtttgcaatgagcgatctgccgggttcgatgatgagattaagatttcttgagaggaccagttcgcgaacctaaaccaaatcaatatcaacaaaaagaatgagaatatataatggtcatactcaacagagagaaccttactagttctctttatgacaatatccaactaggaggcgaaagaaatgggggcaatcatgaatcaaatgcggaaaaaaactttcatttctgacactagtttaataaagtatgataccagcaataattgaggtgcttatgtacttcaattttcacgcaaaatggaaagcatgactcagaaatgatccttacagtattaattagatctcttggggtaggaagcacagcaccagaatgataataatctatcccaagtccgcctccaatgttcaagtaatcaacttcaaaaccttgagctcgaatttcatcgatatagttaaccataaggacagcagcatccctgaatatgtccacctggaaaaattaaaacaaaatcttacataaaatggaacctccttttcttagtatctctacaagaatcaacaaaattagcattttaaaacttttcgaatatagtgttatttgctcctttcctaatacctagtcaatattgaaggaattgtacattaaacatataagctttacatacttgtaaagaactatctattactgcaactgatacaaactgaaatttaaatacatagatctggggactctggggttttaaataccttagtaatggtagatccgagatgacaatgggccccaacaagtttcagctcttcaggatgtgccttcacagcatcaagaaaccattgcagtttctcatttctaataccaaatttggagttcttattccctgtggcaacatatgcatggacctgagaataagaattgacaggatattactggcagcagatgggaaaacaaattggtgatggttctacttctagttgcagcattacaaaatgaggtacgcgagttacacataataatgaagatataataattattggactgtttctttacaagaaaagttttgaaaattactgatattcttaaaatattgttcttagtaactctacgctgtaggcttataatgtgaatttgctgattattagttcctttcaaagcaaaatttggaattttttctacctatgctttaggatcttcggaataagcagaataacttttttcacaaaggctcacaatgatctccccaaaatttggtatcctgggtttattattttttgcaggaatataaatttgtgtgtgtgataataaccagattacagttccatcttcaagttcatgttctattgctggtaatgtatcagaagtaaaatgagaatcagtgcagaaggagccacttttgcccttcctattaatgggggttatcagcctactgttctgatgatgagtctgatgcagaagtaattggtggataaaaaatcaatgaaacagatgctaatttttccgttccttccctagtgtaagctcgtatcatatcatgtattaagagaaattaatatggctgcttgctgacactttagtcaaatttgcattaggactagataatgacaagaaatggagtgattgatgttaatttatatccaatttctaacatcctgtgtatcataagcatattcttattaatgaagaaagtaaccaaagaacagtgtaaaagggggaatttatatgaaggagatgcatacctgtggatccacatctgggttaatccggagtaggacattaaccttctttccagcaattcttgcagcagctactatattgtccaagtcaaattcactatcaatattaacaaagacaccttcttgcgcagctaaaaccaaatcgtctaacaacttgccattcccattaaagatacatctgctcaacagagtataaagtataaacacaacatcagatgaaattgaatttgacactaaagagaacaagaaatgataggcaatgtggaagctttcacgcaaggaactaaggaaagtacaaaataattatcagcttgcataaacacaaacacatggggagcacattttacctagtaggatcgaacccagctagaagagccaacctcagctcattcccgctgacaagaacagcaccacaaccctgttgccttaaatgctccaaaatcttcaaattattgttggccttaatggcatatccaataatggagttcaagccctctaaagcctctttataggccttaacattcctggtgatttgaggcttactgtaaaggtagaaaggtcttctctcgacagaatccatgacgtcctgaactttgataccctcacagtaaagaaacccatcagaggatttagtgaagcaatggttaaatgaggctgtttcgggctttagaggtgaggttttggtggggttttgggagacggcagctctaacagttagagttttaaaggaagatctttgaggtagaaatgacaagtgagaaagtgggttgtggagatgggagcgagttagagttgtagggaggagttgggggtgagagaggggttgtgtagccgccattgatgagttgaaactgatggtcagctctcgggtctcggatgttaatgtttgatactacttggctatataaagaaagttcttttagacaagttggacccagaatttttcatttatgggagttttttattattgaaaaatatttatataaatattataatcactcttattaaatttatttaatttggtggcgatttttctactattttaatttataattatcaaattaaaaaaaaataatttaactttttaaaaaagaatatttttgttagtggagactatagccccacataaaaacaattggattcgtccctaacaactatgctctagttaactagcaatagacaataatataaaaaacgaagttttcttataaaaataaatgttaatttttgatttttgcctcacaactctaatttttactaaatcatgtcttttaaatttttaatattgttaaaaatttctcatgaattattgaaattattagatttaaatatttttttttctaatttaaataagaaaatttagagaatttgatttagtacatgtcaaagttcgattaattattgtctctcgattaatggcaacctttctgaaaaattcacctctactaggagaatcagacaagaagatcctctgtcccctacctctttctgttagtagttgaagggctctcagctgccatccgtgtcaaagatcaaagtaataatgtttcgggtcttaggatctgtagaagtgctcttataatctctcatttactctttgttgatgataacatcttattcacccctgtcactgagaggtctagtactaccattacaaatattttaaccacttatcactgggctactagtcaatcgatcaatctggctaaatcttttatttttttttctcctaatagcaacaatgaggctaaaaactattttagaaactctttgggcctaggcagtgagtaaataccttggtgttccacattcaattggcagaatgaacagtttggttttccattatctggtacataatgttgcatttaaaatgaatgtttggaatggtaaattcttctctaaagctggaaaagagaccctcattaaggctattttacaggttgtcccatcctatgacatgtcttactttaaactccccaaagccacctataaaactctctaaagacttatatctaagttctggtggggatcacgcaacaataagaacacaaaatccattggaaagattggtctagcctttgtgtttccaaattttatggaggccttggttttcagtccttaaccaatcacaattgagctttacttgccaagcacgcttggaggatctatactaaccctccttcccttcttcttcactccctcctcctcaaagcagctagatattttaaaaataatgattttctcaatgctcccaaaggccatagctcttcgattacttggaaaagccttctatggggaagagacttactgaagaaaggccttgtttgcaaagtaaaaaatggcaggtccatctctttgcttgaccacaactgggttccaggtttgtaatcccttacttttttgcatagctttaatcctgatgatcatcatgtttcctttttcattggcaatgataatgttgtcgagtgaatttcgcaacaccaaattatattatattgttaataacaagaagaagtttatgtgtaaagacaagtgcgagtattcaacctagaatggcgaata

SEQ ID NO: 114381 - DNA, 773 bp, Cannabis sativa
ggaagatcatcaattcaaatgataaattcaaatgatatatatatatatatatatgtaaatataaatattatttgtgtgaaacttttgggtgtaatttcttctttaacggccatgcacatctactaattatgtgtagtaactagtgacgtaactaaattgcatgcacgcagaaattatataacatatatatttctcagcatatcttagtacaatatattaaatttgatttgacaactttttgtgtaatagactaattttactaccacaaaacaaatctttttagtaggttttttttttattgattaataaattaactgacccttttgagtgtaattttattaaatttatcaccttatggtattaattattataaaataactgaattaataagattaatataattttaattagtcatttgtcttccttatttcgtcttctccctaaacaaaacaattagcagtcccttcacaaaactctcgcctaaccactgcctcccatctcctattactctattttcatatgtttttacctaaattttttaaatattgtatttttcatacccaaaaatatattcttgaaatttgatcatcttttgtttgaattttcaaggtaaactaaattcagagatggtagttgtggttgtagctccgaccggcgcttttggtggaaaaattgttaaatctcaacatccattaaagtctaaatctaacatctaatagtttcattaatgtaaattgcttttttttttttttttttttttttatttttgaatt

SEQ ID NO: 114382 - DNA, 5850 bp, Cannabis sativa
  modified_base (3575)..(3583): a, c, t, g, unknown or other
cctaaaaaagacaactttccaaattttaagaagtttccaaacaaaggaaagttcagctgaaaaatgcaactttcctaatgaggaaaagagcaactacaaaccaaataaacaaggtaagaaatcggttatgaatgcacaagaatcttaccataaaagtaaaaaatattttgtcaactaacttaccaaaaaaggactttacaaatatgatatgggaaaacatgtaaaaatataaacaaaacaaaaacttataatccaaatacatcaaaatattatgtcataaaaaagtaaacttttaatttatttttttttcatactgtaaattctatattatactactcacaatactcaatgactgtcatttagagcatctccaatggttatgtcatcctttgttttttaggaaaaaaagttatttttatcaagaaattttataaatttaattttttaaatgtgatatgtgtcactatggtaggtaacttttaaagttgttaattaagtacttttgtaataaaatgtatcaaatcttacagaaaaaaaattaagatgatatgttacttttgtcaactatattctcatttctctcattagagatgctgtgaatattgacttcttcaccatttatatacttggacggaggatagtcatggagtcacgttagttgtgatcattatttctattacaacataatatatgaaataataacagaatttatgcatttaattatcaaccatagatgatatgatagatttcattctgttaactagatctctctttgagtgaaatttaagttcaatattcattattgattttccgataggaaaactgtcaaaaaaaaaggcatttgttttttttttttcatcctaaaacagtacataagaaagaagaaaaaaaaaaaaactattgcataaaagagaattaagaggtgaaagtggtcttccctattgtttttttttttctgttgttcattatatattattataagtagatacttgtacaacaacgttacattaatcattaatatccttccccaccattttccactaacaaatattgtaaaagaaaaagacaatgtagacccctagtcccacagcaggccacaccgtattaaaccagtgtcttcgattaattatgatttttctttttattaaaggattaattatagtccccacatcataccgtctttatgccccgtcacattgtggaccccacgtagcccctgttctccaaccgcaatagttactcaagtagtaaaactctacagctactcaaatcctacacaaagttcgtgcagctcacgcgccgccgcactcctccaaacacgtaggaattagttacccctgccaactttcagaagccgaccacgttatatacacttccgttttcactaactattaccgccgttacaccgcctgatcataacaacttgccttaatcagacggcacacattcaagtgggcagagtccccaagtatttaatgccgaaggatgcaatgagcgcgtggaggctatcctttaaagaacatgaaatggaaggttttttctttttaaataaataaataaacaaaataatggttgaagaaagaaatcaccggcggcgatttgccggcgataaataaacctggctctgaatcaccgttttgccgatcttaaatcccggaacaaccgtgaaattcactctgagctccacttccgggttggcgtcgatttcgccggcagggaatagtacttcttggttcacacaccccatataaacctcagagaatctggagtcttttctaacttgaaaaattgtaacttctccatcttcttggccaaaagaaaaagctaaagagtggagaagccaaactcgctttgacatatcggcgaaagccgagaaaaatggcgtttccgggtacccgcatgacgtcatcatcttcctctggtttaaattcccaaaaaaggaacactccattttagcatgaaccagttggagatacttggtcctcaagaacattccgaaagaggagtttgggttctgggtaaagaggtgtttcgggcttacggattttagcttcttgaatcggtcgaagaaaacaacggagtcagagcaaacaggggaatcgccgccgcggatgttgaaggctgggtcgttgaagccttcaaacatggttttacagacaaacgattcgaaaacgaagcaccggtgactctgttttgagaaggaagcttcgggctcgataaacttgacggcggcctcgagatcccaattcgcggattccatttcccgtaccaagatcttgacgaagctccttactgatctgagagtcaagtcgttgagaaactcaacaaaatgggctgggttcagagcggaaatcaggagggtatcaaagatcgaaagtggcccacttaaattcagctttttctctaaggacttgttcagagaaacagagtcctcaaggtttttcttgaggccagaaagattcaaacatttccggttgacctcggcctcgagctttttaatggttatttggtaagtcttcattaagccctgttgttcttgaatctcagcgagcattatcgttacctgtggcgacagatcaagttctttttttaaaaagcttcgtttgagctctgatatggctctaagctcgttgaccacggccaaatcagccacctgaatggcatcactattataagggttctgagccatttgaagttctgcataagctgctttgatggaggttataccagcaaaaagcttggccaccagagcttccatgattgctctgtttcgagcccttgtaatgtcgtcattggtcttatcaaagtgctttgacttattatcaaaagcaccattaacattgccatcatcatcttcatgttctttaactctacaaccttgaggagtaagcaagcagatgccattgttggaggagattctagtggacgttctaagattgatcactttctgaaaagtccgagctagtttgctcttgttggacacagcagattttggtctcacagtatccatataataaaatggaaataaataaaaatcaaacaaagaatctgagagtaatcagatgtaagacgctaagaagtactcaaggggctagacttgagtggacataaaagcaaaagaaaaaagaatgaaaagaaaaaaaaaataatgggtttagataaagaaaggagtcctgtttcaaaaaaaaaaaaaaaacaaataaagaaaggagtctgatgaagacgaagaagaagttaaaactgaaagtggtttgaaagagagagagtgtggattttaatgagaaaaggcagagcacagaactttgactatatgagactttggcagacaataaaggataaaataaaataaaaataagggtgaggtttttaaagcgcgggaaaaaggaataaaaagaagaaaaaaattattattattattataataaatttttgggtgcttctacaatacaccttattaatgggtgtactgatgcaatttttaacaattttggtatgtataagaattttttagtttaaattttttttatagtcgtgtacgttatagttatttaagacatcctgcaaaattttgagannnnnnnnntaatttacaatatagaaatcaatgtttaaaccgtctatttcacatgcgtataaaataaaaaagtgacaagtgtaacagactctttgaacactgttttcgacatgttaagtttttttgaattttttaaaattttgcaggatgtcttaaataaatataacttacacgattataaaattagactaaaaaattcttatagataccgaaacagttaaaggttgcatcagatcccttttaaggagatgtattgtagaattttcctaaaaatttcttttcttttgtaataatatacttagcttattaaataatattcttttaataatagaaaataaaatttaaaatttaatgctaaaatataacacatggtgttatattatacaactatataatacattatctaaactacttttaatttattttcttcatttcttgtctcgttttccctaagccgccaccacccacacccaccacccaccaaaaccagcccaaccaccacccaccacgacctcagctggacctcaaccacactggaccaccagaagcttcatttttctcaccacaaccttcatttttctcactccaaaagcaatagttaagttttttgcatagaaaatatagttggtttttttattgtattacatggatctacacattattcgttgtattatgttacttttgtgacctgaaatgaaagtagagttcgtacctatacactgtttttttttctgagtttttcaaatttttgcaattttatacgcctttatgcgattttttgtgcgacaacaactgaaatcggatgttaggaatgacttttagtctttttggcaacattaagcgatgtcattgagatttttgtgttattttaattgttttgcgatttgtatatgatatctttatagcgttatgcgatatattttttttattttattattattttcttgttgtattttgttgacggtgagaactcatcaactaactagctggctggaaaattaaactctacttcaaacttagaacaaagatgaaaaaaaagataaaatgtaaactcaagtgactatcttaaggtagggagaaaaaatgaaaattttctattactatccatatggtggttacaagattattttccaactctcgtcacatctgagaggggaattgataggctctaatggcttgaggtacatggtggtcctggggggacaatgtgtcgctttcaagttgcaagttgcaagtgcaggaggtggccttgcaccttgtactcttttctggtaccaggtggccctgtaagggtagtggctgcagtgtacccttaatcgggttttcagaccttgcaggtgtggtgtccccactccttgtacctccttctcttcagaacctgcaaaagtcgtgttagtactcttgtcgcttcactctcttctcacttgggaaggttccaccaagttttaaaatgtcatgaacgagtgactttgtaggttgcttagtcgactgactttgcaggagggctggctgagtgactttgcaggaggcctggccgagtgactttgtaggatgcttgaccgagtgactttccagaaggcctgactgagtgactttccaaaaggcctagtcgagtgattttaggggaggcttgaccgagtgactttgcgggaggtctggacgagtgactttgcaagaggcctggctgagtgactttgcaggaggcatggccgagtgactttgcaggaggcctggccgagtgactatgtagaaggcctggccgagtgactttataggaggcctagctgagtgactttgcaagaggcctagctaagtcactttgtaggaggcctgatcgagtcactttgcagaagggttggtcaagtgactttgcatgaggcctagttgagtcactgtgcgagaggcctagccgagtgactttgcgggaggcctggccgagtaactttgtaggaggtctggcggagtgactttgtaagaggcctagccgagtgactttgcaggaggcctagctaggtcattttgcaagaggcttggctaagtgactttgcaggagggctggttgagtgactttgcaggaaggcttgttgagtgactttgtaggaggcctggccgagtcactttgtcagaggcctggccgagtcactttgcgggaggcctaaccgagtgactttgtgttaggttttaaaacccatttcaatataatcagatttactagttaataaagatcagaaattattttatgttgcatggtacacataatttatttcatgattata

SEQ ID NO: 114383 - DNA, 4032 bp, Cannabis sativa
tatgctctcttttagctttacataagctttatatctctgttgatgatactagagaataggaatgtaatgatgtaaatattacgtgtagcatccttgggttaactcttatctttaacagttactgtctctgtgtttaagataagtaaatgatgctatggggtttctcctaacatggatctctccaacattaaacttccttttgagcttgtaggagcgtcctgataactggagaaataatgcaatccctgctcaacgtgtattcgtcaaggtagcctctgctatctcaaagtttgaaccagtaactgtctgtgcaagtgcttctcaggttagaagatgtgttaaacttggaagttttcatcttacaaatggtaatttaatgaactaactgattagaaactttttatatcatttacatgatcagtggagcaatgcacggaatcagctaccagaacacatcagggttgttgagatgagtatgaatgattcatggtttcgtgatactggaccgactgtgagatcctgtttttcactctttctttgctacactcattgaatagttgtttgtttatttgtttagtttttatttctatgtatttagctatacgagtgttttgttttctggcagtttgttgttagaaaaaacagctccagtacttctgcattggatggaaaagttgctggcattgactggaattttaatagttggggaggtaagctttagagtagctagaacctaatgtaacatttctagcattaagtagattgtgtgcgaactttttttgacagagtttagcatcataaactcaaatatattatacagatacagggaagctttgctgaacttcaaagtgttcaagcaacaactctagattttttctgccaatcattagtatgtgaccttacactctaaaattaaatcacgactatgacagaaaaggtcataaattcgagtttactgctgctataagttccttatgtctgtatttatcaattgtatagaagtactgtataatactagtatccctactcagattgcagaaccagggaaatggctttgtaattacatgatcagggatatggtagaaagtttcttaatattgtttactaataaaaatggaattaaactttgaatttctaggtattgaacatggctgttatcaagattggggccatgaccttcatgtggcacgaaaagtaagtgtgaatgatttattttcttttttcttttttaatgggaagtcacatggacgaaagttttcttattcataattttatattttagattgtctttcagaaacttctcatctgtttcactaacagttattttccattagattctcgaaattgagaagcttccaaggtttccacagtctgtaattcttgaaggtggaagcattcatgtggatggagaaggttgattttttaagttgttatagcagattattcattgctacatatgcctgattatttgttcagtccatttgttgtggcagaagaaccaaaatatatgctacccattgttatcactgtcacattgcctgtatgtatttgtaaaataatttactgtatttctgtttcaacctgtgcatagtttacaactctgttcttgttcatctagtgaatgaaattggactttgagctctaagttatttgttaggacaagggctaatggggaactaatgggaattgatgactcacaggagagagtgtgtgagttagtgttggggctgtttgtaataaaagggagaaagagcagtgtgtaaggtgtgaagaatttggattagcttgtaaccgtttgggagagaacagggctcttttaagtccctgatatcaataccagcatattttcttctatttcctattcccttttcgtgctgtcctggacaatttgataggaaattcctataattatttcagacttttgattctacttggttacagtataacatacataatgatgagtctgccttaaaaactattataaactttagatgaattatcaggagttttttttgtttagaaaaattaaataaattgtccaggatttttcctatagttttcacatcttttctttcttcaggaacttgccttaccactgaggagtgccttttgaataagaacaggaatccacatttgactaaggctcaaatagatgatgtactgaaggcatatcttggaatcaaaaaggttatttggttgcctcgtggactttatggtatataactctaccatagttactctgtgaaattgctttttatgatgtacttgtgatggttctgtggactgctctgagataatgtgatttataaagcttgatttgattcgtacttgacccgaatgatcatttacaatattgtttaacaggtgatgatgacacgaatggtcatattgacaatttgtgctgttttgtgaagcctggagtggtaatgttgtcatggacagacgatgaaacagatcctcagtatgatcgatcagtagaggccttttctgttctctcgaacactaccgatgcccttggcaggagtattcaaataataaaactgcacattccagggccattgtacatgactgatgaagaggctaatggagttttaatggtagagtttaacaagctttgaccttgaaattttcataatactgttccctttaatactttgcctaattgtaagcacagtaaagcctacatttctaataatactgattatgtctttatgcacaattcagtgccagaaaagaagtgcctactttaattaagtaaacattattgtactgtattttccatgtttgtttcataagttttttagtgtactttattttccatgtttgtttgataagtttcttattgtactttatttccttctctggttttaaatgcttgcacaaaaggataatgctaaaccaagacttgctggtacaagacttgctgcttcgtatgcaaacttctacattgttaacggcggaatcattctaccacaattcggggaccagaagtgggatgaagaggcaattcgagttgtatctaaagcctttccaaaccatgaagtaagcaaatgctgcagttaatttgtttaattagatttgcaatttcagtagtttttggatcaatgcactagttaatgcacatacatgtagaaggattgaaaaaacaaaagcaaaaatacctctacgggcaataaaaaactaatgacatagaagagactacttgaaaacaaattctgatttgagaattgtccataagtcaacggtcaacagtgatttgaatcctgtagaacttagaagagcttcttgttgacagttgtctttttaatatttgtattattactacaaacaaaataatttttttgagaagcataatcatgtctcttatgcctgatgtaatccctaatactttaattctaaaacgtgtaatgtacaaacaaataatgtttatcatactaattaacaaaatccatgaagatgtcatctataaagaatttgattgtgctagctttttttgttctttcttaaatttctgcttagtactaaaaccaaaattttatatgttgactaattcaggttgtaggaattaaaggtgcaagggagattgttctagcaggtggaaatatacattgtataacacaacaacagccagcaattccaaaatgatgggcccactgctgcattttcaacccaaaactttgaaatggtgtggtttcattttatatttcatctgtaacttattgcaccaaatacttacccacataaattatttccattgtattgtttcatttatgcactaaacaatttgactagttaagtatcgtcctggccctttagttttctaaaattgatgaaaatggccccctcagcattttttagcaaaatttcttttataaaggagaaaggagaattgtagcgaaagtctatccatttaagtttcttatttatcttgaatacaagcacaattaattcataatcaatatatctttatatattaaaagtgtctatctaacgacatttcttggtttaattaacagaatatacttaaaaata

SEQ ID NO: 114384 - DNA, 4881 bp, Cannabis sativa
  modified_base (3063)..(3066): a, c, t, g, unknown or other
taactaacaaatcaaaaaacatgtataatgctcaaggaatagaagctaacctagagaaaatccaagccctcctggatattaagtcaccaacaaaagtgagagaagtgaaaagcctaaatggtcagatagccgcactaagcagactcatctcaaaattaatggacaagtgtgctcctttcttcaacattctttgatgtaatcagaaatttaaatgggtagagaaatgtgaaattacttttcaagagctaaaaagcaacttgcaaaacctcctatcctcttaaaatctctagacggagaagagataagaatctaccttgcagtcaccaagcatgttgtaagtgtcgtacagataagagaatacaataatgtttaacatccagtttactatataaaaaaagactagttgaggatgagagttggtaccccctgattgaaaaattatcttttggtttgatcctaaatacaagaaatttaaggccttactcccaagctcatcatgttcgggtttacaccgactagccttaacgccaagttttgctaagtccagatccatctggttggctgctcaagtgcgctagtaagttagggcagtatgagataacctatcaaccccacagcagtgaaaggacaagtttgggtagaatttttgactgagtacacaggaaaggaggcagacagctcaaacgacaataccaagctaaaaagagagcaagaaaaagagcccccaccagaagaacgcattgaagataagccaatctagaagttacacgtggacggatcaaccactaaccagttgtccagagctaggattgctctcatcacacctaggggaaacccctacacagggtaatcaagttcaggttcaaagcatccaacaacgaggaagaatatgaagcactcattttcaatttaaaacttgctcgagaagtaagtgctgattatctagaaatttgtagtgactcgtaattggtggtaaaccatgtcgtaagggaatacgcggctcaaggagaaaaaatgatggcgtatctaagtaagatccacgacctgctcacacaatttaatgggtacacccttaagcagattctaagagaagaaaatgaaatagctgatgcactagcacggttggtgagtaatacagtaacaaacaaagtaaacttaatcccaatccaatttctaaaagagcctaacatcaccttcacaaaggaaatcgggatgttgggcaacacaccaaattgaatgactcccatagcagcctatctaaacactggtgaacttccaagaaataggaatgaggctcaaaaaatgatgagaaaggttgctcagtatataatagtggacggtgtaatgtacaaaaaaagcttctccatcccattactgagacgtgtcacaaatgaaaaagctgcacgactcttgtctaaagttcatgaaggcttttatggcagtcatggtgggggcaaagtttatctaagaaaatactgaggcaggattacttctagcagacaatgattgaagatttaaatgcctatgtgaaaaaatgtgataaatacaagaggtttaccaaaatcccccaagcactgcccaacgaattgatgaggtgcaaagaacgtggccctttactatatggggaatatacctgatcggacaattgcccaaagaaaaaggtgaaatacaatacgcagtcgtggctgttgattattttaccaaatgacagaagtcaaaccattggcaactgtaaagtccttagttggcatatttggtaaagatgacaaaattaattatttttggtatttttgaaattatttgtttattgcatttaatcttttttgaaaatactttctcttttcttagtgtgaaatgtctttcaaatcaaattgtggctttgttggtaaataaatatgtgattttcttatttagattatttgatatctattttatatatttaaggaaagtcttaatatttatttcactaattcttatctgaatttctagtcaagaaaacatgtagagttgtgcctttaatgtatattttatttttccttatttatattaggaaactttgccaaaaatctgtctaggtacaatgaatctgtttgaacggatgacagtctatttgaacagattctgactttcctttttgggaatattttctatttattgtttgattgtttcctttcttgtaaagcatgacctgttgtgtatctattgagaatatattgttactcaggttgtgggtttatatggaaaaaataaaatatcttattatgtaataaatactatatctatatatggtatcttattatgtaataaatactatatctatatctataaattctttttctgatgtgatctcattaatctctccagctaggttatgtgatgtccaaagaaaatttcgtggaaatgaacttggctttaacggagtctagattcacaatgctgactagacagatcagaattttatctgctcgctttccatatctattcagacagaatttcatcatttaatgagtttttgtaaggaaactaattaatactttctctttgtattcagacctttggagttcggttttaggggtaatatatcactacaaatatgacttaaaccagcagcaaaaggttgaactcttccacttcttaattacctatatttttagaagagagtgtttcttttgtaaaggataattgttctgctattccttggtgagattgtgtgtgtttgagattacttttatatgaagtaaattctaaagtgaagaacataaagaacaaccttcgggagaaggttcatccaagtcttgtttcgcgaggaagcaagcatcgctatcttcagaaagaagtaagcatagctatcttcaggagaagatttttacaagtcttgcttcgggaggaagaaagcactgctatcttcgggagaagatttctacaagtctcgcattaggaggaagcaagcattcatcaagtaatttgaagggagttcaaaccttggtgtcttaaggagattcgttcagcaaatagggttacatcaagcttgcgacaaaatcattagagggagtctatgttttnnnnaagtcaattactttgtacttgttgaaatttgactaatgaatcttatctctgggcgtggcctagtgtactagtagcaatctgcaatgattgttgataccacatacaaaatattgtgtgtcattttaatttctacaatttaactttctacattataattctgatctatcaggttcggtaactgatagagcagatttcaattctgttcaaacaattttataacggttccgcattaattaaattatttgttaatttcacttggtaatattaaaaacataatttcagcaacaatcacatccaagaaagttttggaatttgtggtaaaaaaatattatatgtcggtacaaactcccataaaatattattttaatggaaaataatttgacagttagatgttcacagacttctgcataacacattgaattataaagtgtttctcagtagtttcacacccctaaactaatggacaagtcgaggcaatcaataagacattaaaagacaccatgaagaaacgactcgaaaaagccaacggtaattgaccagagaaactactagaggtactttggtcatacagaacaactgaaaggacagaaactaaacaaacaccttttctcatggcctacggctatgaggcaatgctgcccgtcgaattagaacctccatcccatagaagattgaattacaaccaagagactaaccatgccctcctagcataatcacttgatgaagttgaagaaaagagatttagaaaatctaaagctgctagctcatttgcaaaaagtggctcagtacttcaacaagcaagtgaaagaaggaaattttttgtggcaaacttggtacttagaagggtattcctaaacactaaggacagtgcagcaggtgtactcgaacctaattgggaaggatcataccaagtaactaaagttacaaaatcttgagcatacaagattggtcggtataatgaaaacatagagatagttctggtactaaggtattagaatagcaaacatttaaaatatactaccaataagtgtaaatggtttgaccaaataaattgcacaattcttggacattactcttaagtgatggcattctgagcggacctcgctcaaaggttcaaagaacaattggtgctaaggtcaaatgaccactttcaaagtacagttagtttaaaatcattgctcttgagtgatgtcttttgagcagaatatatcgttcaaatgttttatgttttagttagctaaagatcagatagatcgtgtgatagttttttataattcaataaatgtgcgttaccacagtaacaacacataccgaccaataataaataaaatataaattattgttcaaattgtgttaattttatacttttttacaaattatagcaagttatttaattgcctaacatgtgtacatagggtttgcctaaaccaaaaagccaaataggttaaagaaaacttgtgaaatgtaagtgaccaagagtcaaaagtctgcttggtcacttgggggcacctatactcgtacaagtattggtaaaaagcaagctaaagcaaaaaaaaaaaaaaaaaaaaagattcaaaattataagaaccgatttatattaagataaagatgcagaataagtgtgggattaaaagctgctcaacatgccaaaaaaggctaaagctatagatagagatttgtttatggaaagatgtaaaaaataggaagtagcatgagagatatgtagagcttaattttttaggaatttttctggtttgtaattggagaatgtaattagttattgcgcaatacaatgatccttattcataaaaaaaa

SEQ ID NO: 114385 - DNA, 2546 bp, Cannabis sativa
aattaaagtctctgttaaaactaagagatttgacacaacaaattctgttagatacacatttatataataggtaagatattttgagataaacaaatctctatatttattattgtccataatctcaagtttttgctaacacaacacaagtttatctctcaaggagacatttatttatttattttattttttttattattattaaacaaaataacacaatataccattttttttttaagaaaataagttgaggacttcggataccatttcctttgtttattattattatttttgttcgggtaatgcccttttctttaatttatgtctttttcttggcgctaatactagtaggataggaagtagggagcgggagggatgactctggcttgtgggctgccccaacaaaaactcttcctaacaggaattgaccaatacaattttacacactttcaaaacttgaaaactatgttcttccgctaattacgctccatatttttacatattcaatgtccagaaaaaaaaaaagaaatgttaaagggcatatatggggcttagtaatattaggtccatttattttaatttaatataaaattacgaactatctatagaatatattataataaagaaaaagtgaaaggctgtgtttggtcaaacaggaaaaagtgaaaaataaaatcatttttcttttgtacaagtgttgttccttcttaaatatatccatttcaaccccaccactttgtcaatcaatcctcataacacaactaaacccaacccaactctttgatgggagacttcatttgatgatcaccaaccttccaaccttgattgaatgcctaactaacgctatatgcccactcattccacaatccacatgtgtgcatccattaaacatatttaattttatttactccaattttctttatgtgcccttttaatgttttattattaatattattatataagtgaagtctttaacatattgtataatctatataatatattactacgtggtgctgtctagcaccacaaatatctaataatcataataatgatataaacatataaaaaacttataattgacaaaaatgacaagtcttcgttacagttaattgttgttggactttaatcttggttctactaagcttgaaaagtcatgtcatcaattatctttcggcatcaagggggtcaattagatatctacttttaccatttagatttggaggtttaattatatatttagcttaacaaaatgtaaccaaacaaccaaacgtttcgatttatacaactttctaatcaaagaataaagctgctaggatttctcgtttttaaatccttaactcgtgaaggttgtcttttttctcgagataagcctaccgaccgtccttaggtttaggtgtggcttagtcagagtctgtagttttgctactgtaattaggcaattgcaattagatttttgctactataatcaattttgtctctgtgcgtggttttgatgtcttttgtttagattaaactgtgattagtcttgactctataatatgattttgtttcattttgtttcgttattgatttgtcttcttttttctttgatgaatcgctatcaaatcgttgttagtggtagaaaatagtaaattagtttgaaggggttgctagtggtgcagttacgtaccttgcacaatagttgagtgctcaagctaagaggatgaatgaacttgcttgaatagtttttatttttgtgccttttaagcggtaaaagaaattaaatataagtgttcttaagatttgtaacttttttattctgattttattttaattttctttatcaaacgattcaagaattagaagactcattaactgactcgtttttttaattttgattccgactgtgtttccaacagaaaaaatgtctggattatgttacaagaaattttttttgttgttttactgatttataacctagcttcttatatcatatataattatatttacgtacgtactggacaggcgaggaccttttgctttaggaaaaacaaatcaagatatgaaaaatgatattgtttatgctttggttttggtgaaggtgcgagcaagtactggacaagcgaggaagcttcttcttaacatctcagtattcacaaccttttgctttctacagtattccgaatttgattaaaaaagtaccatttagatttaaattaatagcaagaagttttgtaccaaaaatacattttttgtcacaacaaaaagctatttttatgatgagtaatagttttgatcataattttccatctaaaattaagaatttgtgctgtgttgatttgagttttggtttgttagaattttgagtatggtgaatgggatttcatctcaaaactaattggtaatggaaggagtagctcattcctcttatatattctattatttttctacacattagcaatgtgagattctctaacacactcgatcataagcggctcttttttgactaactatccctgatcacaagtgagtcttttgctctattttttggatcggtatttttggatttt

SEQ ID NO: 114386 - DNA, 690 bp, Cannabis sativa
acttattacttgattaacctataatataaatataaaccatattatttaccattaggcttatcgggatattacagtgtcgcacgaagaggctattcctttatgtccaatccgcacgaagaagaagagatggaagaaagagaaaaagttagtttagggttctatttttttcttttcttttttactaaattatgtttttattttgcattttttgtttaatcatatttatatattgttataattttattaagacaaattataatatgtcatatgttcagtcgtaggaatggcaatttgggtttttcttgcgggtcggcccccgcctcgacaggatagcctttcacccgtgacaatcgagtttttctcgggtcgttgccctgatctagctcgacccgacactttttatatcagattgaggtcgacccagtctagtttagctccaaaagaaatcgtgagaatgaatcccaaaacaatgaaatcagacctaaattaaaatcccaaacaccttcagaccaaaatcaaaaatcaaattcagaaatttctccgaaattattgaaatccttaatgttgactgagaattttagacagaaattcttaagccacactcgctcgctagattggtgagaatgaaatatttgttaagtataaatagagagacacaatgtaatatcccgataagcctaatggtaaata

SEQ ID NO: 114387 - DNA, 2261 bp, Cannabis sativa
  modified_base (39)..(44): a, c, t, g, unknown or other
tctcaatagttcatgaggcattttcaatgaccttaaaannnnnnggggcatgatttggtacatgtcatagttcaggggcaaaaatcctaataagccataattttatatatatatattgacgtgttatatatattatttttaatgaataaatttgttgaatttcatatttgttgagctaactaatttggaagatattgttttatcttgataaatattatgtataattttaaattatttttcttttattataagtttagaaaaaaagtgattatatatttgcactgcacaaatatataagagcacccatttattaaagatagggtaaatagcggtataagtaccaaagttttatgtttgtaagcggtataaatccaatatttattttaagcggcataagtaccaaatgtttgtaaaactataattttcttccaatttcgtcaggacagactctgttttgaatttattaaaagaacatttagaagtaattgatactacatatttctatagagacccaatgatcaagaatttaggtcttatatgtgccttatttaagagaataacaaagtctatactgacaaaattagataaaaatacaattttataaatatttggtacttatgccgctaaaaataaatatttggtttatactgcttacaaacaaactttaggtacttatgccggtgtttacccttaaagatattaaactaatttattttttaaaatttattcttaatatcttttcatttttttccattcttaacttatttatttatatttattaattttaatttattttgatttatactttttttttaaataaatgatgaataattttaattattatttcattaacatgcaaaattttatatatatatatatatatatattgttttaattttattaaaatatatttgattcatatgtatttattagaaatagcataatataatgaaaaacaaaatacaaagtaagtattatatctatttacaccaagagtagtttcaatgatgtggacattaatatttgacacgtggcaaaaaaaaatgatatctcgtagttaagtagtcccgagtcatagcaagtcaaactgggagaggtccctagctctacgcccaggttgactttgggaactccgagatggaaatttaagcttcaataaacttgaattcaacccactatctttccgtattctgtaccatgaagacatggaacaacttaattcaaggctcgggaactaaaattacacaaacctacaattcggaagccaacctgggcaaccagggtttcacccggttgacattcttaactagagtttcagttttcaagaccgtcttagtgcaaaaggatcaaaacttgtattgtgacatcaactagatatatcacttacatgtttgaggtatcagaataagaattagagaaagttcatttttgagcacccggagccccggggccccaagcaaccaacgcccaagttgacaatttgtcaatctaggcgccttccaagtatctgatccgagatctaaattttgcatcttctttgtcttcatcaaaaatagggaaatgtgtcctttcaaagaagagcaacaatttttaggtgccgaaaatagggcccagtgcccaggttgacacttgggtcgactggccctgcgcccaagttgatattttgtcaacctggcccattttttatggtgtttttcaagaattctttcgagcatcttctctgattttagaaaatattgagattcaactattttttgggaccaaacaaaattttcagagggccaaaactgagacccactgcttaagttgaaaagggggaaatgtcgaagacctcactggagttgacggtgataaaaggttggaggtgatgtttcaggcggaggaggaatcgagaacacatccaccgtgttcggtctaccttgatcaaaactccatcaccatttatattcccaaatctatctaaattgtagacaattgattttgagagggaagagaaaattaagatataaatctcagtttctatactatacgttaatgactgtagtattattaccatgcacttgaccaattaaaattttatattaaatgccctacagatagagtctttttaaatgtctcagccaaaattttttctatataaatactaagtaaatagatattggagtattgaaagtatgatggcgagttattggtggcagactaacaaggatagtggaaaggggattcattggttgtcatgggataaactttgcaaacataag

SEQ ID NO: 114388 - DNA, 2794 bp, Cannabis sativa
  modified_base (59)..(68): a, c, t, g, unknown or other
tttatttcattgttttagaatacatattaggatgtaaatgaaacatacatggtagtaannnnnnnnnntggtaaaatatttccaacactgtagtcatttacaaagtggatataataacgatatccatgtctagatacagttggggaaggaccccaaatgtcggagtgaattaattcaagaggatgctttgattcttttagtgaagctggataaggtttatggtgtgcttttccaagttgagagcttgaactgagttgtaaatgagaaggtaaaaacttcttttcattgattagaacatgtttgagtacattagaggaaggatggcctaacctatgatgccacaaacttgattcactagcagaaatttagaaacaagattcattagacctaagactatgacatttgttaggtgactttaggactggttgataggtagatttgtgacttgaagatcatggtactggtgttgtgagttgataaagaccattgctaagcttcccttaaaaaagaacctttctcgaatctatgtccttcaaaacacaagagttaccatcgaattcggcataagcattattatctctagtgagttgagagacatttaatagatttttggcaatgttgggcacacataatatgttatttagcttaactggtttactactggaattaataacagagttaccaacatgagagatgacaagtgattgtccatttcctactgtaatgcgggtcttaccattatattcggtcgaagcttaaatgttattggtattgtcaatgatgtggtttgtggatccactctccacatactagttaacatcatcggattgagggtgctggctagagttagctacaaacgcctgctgatttgtcccctgtgattgagtattattgttgtaggaaggattctggttagcattgttggtaggtgggatgaaactgacatcgaagcgataataacatttgctagtaggatggcctgatttgctgcagagctggcagatgacacgcccctggttgccacgccctctgccacggccacggccacaaaatccaaaggatctgccagagttagaaggaggcagatttttccttcctcgagcagcaaagttggctcaaggagcaacaatatctggtgttgtggtggagttaagtaagagaaactgcacttcagagagggttagttgatctgccctggaggtgagattaatgacaacagagtcatactcagacccaagtcctcccggtatatagagtaagaggtcatcgtcgttgaaactttggccttcagagttaagaccatctgcaatagacttcattttgagaatataatcatggataatcatggacccttttttgagagatagtagctgaaacctgagatagagtatgcgggcacgggattgagtagtaaacagattttccaacaatgaccataattcatatgaaatgcgacagcgaatgacatgaccaagcatggcctcaaaaatggaatttaaaagccatattaaaatagcttggtctgtgcgaacccagacagtgaattgagggtttactgctgctgcagctctgggtttatttcgttgggaggaacatcgatgtaaggaggaatgggtcttatgccgaataggaacccatccaaatcttgagcacacactgctggaatgacctgagagcgccaatatgggtagttctctttgtccaggcgaatggtgattggagctaggggctgcaacaagggcgcaggcagtggcaaagtagctggtgcgggtgctggagcttgaggaggagcttcaacagcttgagatcttgcattgttgactgaggaatcgcttggagatgccatacccgctctagtaccaaatcagaaagaaggatcgaacaagaaattgaaaataaagcagagtagaggcagagagacaagcatttatctgtgtaataatctttgtgtattttttctcagtgaatatacaatgtaattggaccatgtatttatagtacaaataaaggaatatttctctaacaataaaatatttccttgcacaatgattggctacaatagcaagggaatcccaagaatttagggaattctaggataatcttgaaagctcataattggagaaatatctagaatgccagcacaccaagagcacaccaagagagggctgatcaggtaacgtgaggaccatcttatattttaaagatgaagatgcaaattgatgtctcattgttaaaatataactctcatttgtgaaacatttgctctaaataatagctagctatgccaaatttaatacataataaaagttatgctaaatatagcccacaatatagtatgatacaaatttatatcacaataaatattgtacatttatatttagttttatattattttagtaatttaataattatatttagatatataacattaaataattaacttttatggcactataattattattattttatattatctataattattaaaggatcattaattaaatataaaaatttgcatcaacttctacaattatacattaaaacacaatgcttaaaattattaatacaaataacaaatatatcataaaactttttttttttaccaaatataacacaatttaaaaattttcattaaaaacagttttacatataataattaaatcaatacaaaattatacaattatagacgaaataattaaatgattctaatccttatgtcttgacgaataatcctggtttagttgatcaaaatgtctcgagtttgatggttgttggggaaagatcttgggat

SEQ ID NO: 114389 - DNA, 2010 bp, Cannabis sativa
ttatttgctagtatcttgaatccattgaaatcacagtaagacagatggagatgcagatccattcgaccaggtctcagtagagccggatccaatcggtccttgtgattggtagtgaacacaacgattctctcgtctccgcaactagaccacaagccatcaatgaagttcaacagaccagagagagtaatctgtaaaaggaaaacaacaccataccataccatggagttagcacaaactcttgtgtaaacaaagaacaattttctctttttactaccttatcaccatcttcaacgtgtttgaattcattatctgaattcctattttgcaactcaactgaacagtcaatgtcctcaatcactaatatggatcggttcccagtgccaatcaacaacctcctcaaatccgaatcgcattggacttcttttaaatccaagtcatagatgtcaaacttgagatagttggccatggcagcaaccaagctcgactttcctgtaccaggcggtccatacaacaaatacccacgtttccaagccttccctactcttctgtaatactcttttctcgatataaatctatggaggtcatcaatcaatgtcttcttcatgtcggggtccatggccatagtttcgaaggtagcaggatgatccaggtttatccaactccagtaatcactcccattataatccacagtatgaagcttcacactctttctttcttctttaagccatttagctttctccaaaacgtagggcaggtaagaatccagagccaattccctgtgttttttacgaaagcttagctcgtagtgtcgtatctccttctgggcaaatccgctactgtgatctcctcgcctgccactactagaaaacgacgagccgtttctggaggagaccaaaacccaactgaatttgacccccttaaacgaatcttccatttcttgatttatgtctatggccactgccagctgcttctctttctccaacttcttgactttgattctgtcagttgaggcatattgggtggcgcccaagtaaatggtggcagactcgaacaactggttcgctgtaagaccgtcgaactcgtcgactacgacggtgacgtggggtgataatcgggtgtagagtttgtgaacgcgcgtgatgaacagctcctggacagcgtctgggataagattctcagtgacggatcggagaagaaccgctgaggcggtgagtgaggcagccactgaaatgattgttttagcagaaggcactgtctccggcgacgaccacattttccctttttattttatttattttatttttgcggttaaggtttgggtttttctattattatttttttttttaaaaaaatatataatacgattggtcaaaaagaagaggaaaagcagatgcccgaaatttcgagaagagaaactgtaaagctattatatgcgacacaacctgtcaagcttagtgctgaattgggcctaaaatttgctgaagccggtttcttaggcccaagagatataagtactaattcgttttggagattatttcgaaaataaataggagaaattatgttgggattttaaagtttcttaatatgatacttttaaatttgactaatttatatggtattttttttttttttattttagatgtttttatggtatttgatatgccatgtatataaattaggtttttaaatcccatatttaatgtttttatttgtttaggtagttttatatgtcacaagtgccagaaagtcgccagagtttgctgtcggtgctagaaaaataattagagtagctgtcggtgccggaaaagtcgtcagaattggtgtcgatgccaaaaaattcgtctaaattgcattgtcgttggaaaaatcaataaaaaaatcatcaagaaactagtttcttgcagaagaaaccactttttcggtgatttttccgatgacaatgccaatgctgacgacttttctgacactagcagctactccgatgacttttccggcactgacagtaaactt

SEQ ID NO: 114390 - DNA, 1241 bp, Cannabis sativa
  modified_base (1185)..(1198): a, c, t, g, unknown or other
taatttattaatcttttttagtaatatattgagttggtatattttatttattttgtaataaaaaatacaaaaaaaaaaaaaaattcttattcacttgtttctatttttacattttctttgaatcattttgtttactatcgttacattatttttatttttatttttttttttgctttttttggtttctatatgaattctttttctgttttctttttcaaattcatttattaaaaatatttttgaagaaaaagaaaacaatcacatctgtagaagttatctaattaccaaaaccaggtttagagcttggtatttttcagtttatatatttagttttctaggttctttttatcttttattttcttctttaatttttttttttttaagaaaaccctgtatccattaagaaatagaaattatatgttcacaatacaattaagagcataagtaatacttctttatctaagctgaaagtatatttagctagtaggtaaatagcaatatttgtcactctaacaacataactaatagtattttgaggaaatgaagataacaagttataaatattgcaaatcaaatcatctaaatagaggttgatattagttggatggtgaatactatccacaagaacttggcaatctgatttaattttagagacaacaattgtgttttcgagacaccattttagagattgttgtagggagagagattccattaacaaaggcaaaaaaacaccaggccaagggatggaggttgtcgcaattaaatctcctttacagttgcgtatcacaaagccaaggcccattttgcatctgtttatgtcttgaactacattaacattcaatttcaaaaaaccaactggcaggggtatccaatttgttattcgcgtttctggcattggacacgtggactctaggttagcatccaagactcagcagtggggccatcgaaaaaagtaaagtgggccaatcccacttggataggtccttctaggaacgaatcttagctccgcaatcgcaaatccttctaccttcggcaagccatgtccggaagcatgtccagtaccacgagaccggaagaagacagtgcgttcccgaaagacccttccagtttccctttttattcttgtgcacaaataaggaaattccaagtgttagagaacaatagagttgttgggttttatgcccnnnnnnnnnnnnnnttcaatataatcagatttacatattaatatagatcagaaataa

SEQ ID NO: 114391 - DNA, 3698 bp, Cannabis sativa
gcgcgatggaaatcatcgtacaaaaggtgcctggaaacgtagatcagggggtcagtcggagttgaaaattggaaagagtgcaccagttgaagatgctgcaacggatagtggttgttttgaggtgaggcctgctggaatcgtacaggatggtacgattcatggtgttacctcaaccatgcaggatgacgaggccaatgccactactcatacagttgtcagtacagagggaattcgcaaggagaatgtctctttgcctccaattccaaacgtgtcggaatccattttgaaaattccccccaagaatattctccttgaattacctaaccctgatttcgctttccccagtgggcctaatgatggtttggaccttatccctgattttgggccaactttggtccagagcttggaaatacgacacatttggtcttgtaagtctcaaagacctcatgatttccctgagcccatttctttgaggtggcccagcaatgatccaaaattgcagaaagtgtattgtgtactcttgggccctaacattgttgatttatataaggcccaaccatctttaatttcaaatccaccgaacatctttgaactcattgtgcacctgctggggaatcgaaagaggaaggcccatacttggtatattccatctccgaatgtttttgaagcttccccctttggaaaaatttgaatcctctggtgtcgtctggttgcagtaatggagttgagggtactcatatggaaagtgctaaattccaatcgagatcttgtgatggtggtgagacatctcgacggcaaggaagaaggggaagaccacggggggtttcttcttcttctcatgggaaataaggagttaaaactcggaggaggaaacgtgctaaagaggacgagataaaagggaatataaagggcattcttgctcagtgtgttgatgcacctattactttcatttaaaattttggagatggcgaggaggtggccaaatgcatgcccccacctgcgccatgaggtgtctagcttggaattgacgcgatcttcgtcgaccggtggcagagagagccttacgaggcctctctcgaagagaaggactggatatggtattttcgactgagacaaaagtggagggaagttttgtgacaagtgttatgaattgtttggcttttgcaaatgtttgatgcatcgatcctgatggccgggctgggggcctttgtgtggcttagagaactggtttaaatgttcacattcagtggccttttgagatgggcttttgcatccaagttatgtcaattgctggtgaggggtcttggaatttgttttgtgtttacagcactccgtatgcacaccacaaagtggcattttgggattggttgactactgaaattctgaggtgtaattccccttaggcgttgattgtgatttgaatgctaatgaaaaatagggggacgttggttcggcagccatggaagggattcgctgagtaattttttgttggatatcggtggggttgatcttgggttcattagccggactttcacttggtataacgctagagatgcccagaacagaatcaagaagaggcttgatagaggtattgcaagttcagattggtgtgtttagttccctgacgctggggtgattcatctgcctatttcctgctccgatcatgctccacttattctagatactcatctccgggttcaaagaatgagatgcctgtttggattcttagaagtctggtgctcggatcctcactgtggtaatgtcattgctaatgcctggaattctccttttactgggcattatagctacatgatgatgagaaaactttcacggactaagcaagccttgaaaatctagaatcgcgaaagtccacgacaggaagttacgtggactttacaacaaacttgcttgtattcaaaactccactatttctcagaaagtctgtcatgaggaggccctgctccaagtggagattttgaatttggagaaaataatggagcgaatatggcaacaaaagtcccctgaattatgggtcacgaagggggattgtaacacgaagttttttcagacttctactgttgtgaggagaagaaggaatcacatttgggctataaatgatcaaggggattcgtagatacaaaatcgggaggatataggcagatattttgtcgagaaattcaaaactttgcttgaaagctccagccctgctattggtaatgacttggagtcgttgtttaatgccaaagttacctcggatgacaactcggagctttgcagagttcctactggctcagagattaaagatgttatttggaatcttcatcctcttaaggccctaggaccagatggcttttctggggttttcttctgaacgtattgggatttggtgggaagggatatatgcaatatggttcagcatttctttgttaatgccaactttgtcatggaaatgaatcacaccttgatctgcctcattccaaagtgtgaaagcccaacgaattttgaccaatttaggcctataagtctctacaactttgggtataagattcttgcaaggctcttgactaaccgccttaaggcgatcttggataagttgatcagtcctttacaaaatgctttcctcaaaggcagatggatagctgaatgttcggttcttgcttcttaagcgcttgatacgatgaaaaagacacgaggcaaatctggttttatggctgttaagactgatatgcacaaagcatacgacaggatcgagtggagtttcctactccgagttcttaaggcaaacgggttcaatgagcatgcgtgcagcttgattatgcaaagtgttaccacggtgagtttctcggttttgcttaatggtgctcctttgaaacctttctctctgaggcgtggccttagacaaggcgatcctttgtctccgtacttattcattttgtgcagcgaggttctttcaaaacttttatgtagagaggaggatcggggtgatatcacaggtatcaaaattggtaagaatgcgatgcctatatcgcatttattctacgctgacgatgctattattttctgcaaagcaaatgagaaggaagctggaaaattactaaactgtttggagaattatgaatgttggtctgatcagaaagttagtaaagctaagagtgggattcttttctcccttaaagttaggctggataagaaagagtcaatcatggctactatgggaatgaagacgctaagtcaaaaggaaaatacttgggcagccccttctttgtttatgcccgtaagcggaatgattttccttcctgaagtccaaagtgctgaatcgtttggaaggatggaaggcaaagaatttgtctcaagtggggagattgaccctaatcaagtctgtaattcaaagtgtctcgtgttatactatgtctacttttcgaattcccattctgtctgtaatgagcttaatagtgtggtggcccatttctggtggaaaggatgcaggcaggaatctaataataatcgttacttggcgttgaagagctgggctgatatatgccagcctaaaagaaatgaaggacttggcctgacataattcagagatttcaatcttgccctgttggcaaaattggcctggatgttgttagacaaatatgtgttatataaattaacaattaacccaagatctatttgtatataacatagaacacaatagt

SEQ ID NO: 114392 - DNA, 2991 bp, Cannabis sativa
agcgcaaccattcctcagcttcaagtgagtccgagctcccattgaatattggtggttgttgtttcctgaatcgctcgtacacagcttcatgtaatttcctctttcaaacagtaacttgtaattttttttaatcaagaaaatatattccatttatcaatatcaactcatttacaatcaacaataaatttaacccaccctctttacaccatacttacaaagcccttagtctctcaagaatatttttctctaattggtttagtttcctctcatttacgaaattcactctaaactttatattttttgtttaccaaaatttttagaaattaattaaatacgagcgtaagaaatgaataaatcaataaagaaattagacaagtatttttacgtgattcacacgttaatggtccttagtccacaagtgagtgtattggccttgtaagcttgtataatgtattacaattggtttttacaataaaccataaatctggttctcttagtctttcttggagaagaacaaagcttagagagatttttcaacagattttcagctcgtaattctctgatccccccttttgtgtggaaatcaaagatatttataggctatagttcgagtttggacatgcccatgacccgtttagggttattgcaaaaagcctactactggggtaaaatacatgtaaataactgacagttgggcccccaagaaggtttctactcgtgtggagaggcaactagacaatggggaccattgtcggtacaggacacatgttgccaaaaggtttcaccttgaaaagaagacgcctagacaaactgtcaggcaaaaaggcgtgttcagaggtgaggtctgcgcactaccatggtctgagacaggagacaagatttgatcctgtgtcaaaaaaaggtataactgtcgctggggcaattcaggtctctttctatagtatacgtgtgacttcctttgtgcagttagtgtccatgttaggctcttcgagttccttccaggtgtcgcttggacatatgatgagcttggccttctctgggttctagagagatactaaggcctctgggtctcgaatggcaatatgctgcagggcaagcctccgtgtagcccttgggcttagttcttttcgggactcaaaagcctctttgtgacctttcctaattaaaggggcttaattagtgactatttaaggtcgtgcctctcattttatgtcatgtcttccttgtccgaaaacacggataatatttacccaacaagctttcgggacttcctgagttgcaagatctttcaaccctcttccggatcatcaaagtggtgacatgtgggtgactttcaaaaacacgaaagcatccttcctgtttggccttcagcaattggaaggtcaaaaagtcaagcgcaactggcattgcacgcgcgtcgtgtctttaatgagtctgtagtcaacgcccgcctgcagagggcacatttgtcttaaaaacccaatagacggcaagattattgacatgacaatcctttaatgcacactgggcccgaggtaggtaatgatgaaaaatgaatgtttatattttaaccgaaggacattagatgccatcctttcaactctccaaccgttagatcatcttgtgctttttgaagggatcatctaggccgataatttcaaatcacacaggttggtcttggatgtaaatagacgcaaaaccactcgccttcttttttttccatcatttggcggttttcaaaattccttcgttttcaaaaacttgaaccaaaacatttctctcagaacacaaactgaaatatctcaatctgttactacataccttcactggcttcactagtgaatgaatgatagtttcaagcttcttatagactatttcttacaagttcgtacacgttgtttccctagcggaccgacccttaaccttaacgcaacccaaccccaatcaaacgaagagtttgacgttcaggcaggctttgatcgagtcatcaactaggcacgaaattttcgaatcaatttcaacaaccatccctcttcttcgaatcgcattacaagtaagttttcttgaacttattgacattttttactctacgctaggatagaagtcatttgttcaagttatgctctggatttttcttgcatgattgttttagtaaggatatttaaggtgttatatggtgatgaactgattagggtcaagaatatcgtgtcataagtgtgtgtgtgtatttttctaggaaataagtgtaaaggtttgaacttagcaagggtgattcttaggaatttctatgttgattttgtctctgcccatctctttggagctgttagggctctaaatgggattgatgttagggtttagaactattcagtgagtttcctctagagttgttagggctttttatggtaaacggtaagtttgataaagaaatctttactcatatcggttcttgtcatatatgatctttattatatacaaaacattcatttagatgtcacgccagtaatctgaatcgagattacttgcaccaaataacaggcatccgtgaatcttcttagcaaccgttgattaaagatttctaaactttaacatgttgctaactatttaattcatgattaagtgatcttaattctttgtacaattacaagtcacgacctcatgtatgaatagttttttttttcaatatttatgtataaattattcaatatcaaatattaataatttaataaacatgtatatatgaaaatattcaacaaaatattttttttattatgtgaatcaactattaggctatgtttggcaagaaagaaggagagtaggataaataaggagtaagagcatctccaatggagagctacaaatatagtgtattgccatttttcagaatattttgcaaaaaattaaactccaatggtgatctaaaatgtgtgccaaattaagccaaagttaaaaattgtgccaaatttagcacaaaagatatcatataagggtatt

SEQ ID NO: 114393 - DNA, 4481 bp, Cannabis sativa
tcaaatttcaatgattatcactattacattgaatattattaattttaaaattatgatattaaaaaaaaaattaaaataaaattaacatacgttagcacgtaataactatctagtatagatatataaattgatcatcttagaatattatatttctgtgtgagaagatcttagaattatttatttattattattatcaagtcccggggcaagaataataatattatatactcataaaaaaatcaggatgctaacaaaatcattgaatcgccaaaacatggcatttataaggaaaaatctagctagctaccatcaaattaattatgacggtgaaattggtaaatataattaaattgcattatgatatacaaaacaagttaaaatcattgtaaagaattgatcgtattctcttgtgatatatctaagtaattaaagtattgttttgcattattaattgataataatatatgtaaattgttaaccggtaattaaagacatagagattttgtaagtcgagcaaaaataattaatggaataaatcatataagaaaagttaaatgcatgatgatatatatgtaagaatcttgtagaagagatatattttaatactcacacgtttattatcgccgcgacaaatattatttattttatcttcatttatttattttataatattattattattattttcttccaaacaaacgtaaaaataagtagattctatttatatatctatatcatttttttgttaggggtgatgatgtggtatattctatgaatttctttttaatttttttgtactctcatttttttacttttttgttaatttttttgtcaataaataatatttttgtaagttattatataattttgagcataactgaggtgttgattacaagtaaaaaaaagagagagaataaattgacaatgtccttctaaagtttacgggtttttatgtaaaagtaattgagttctgctttaaatgatgaaatcattttaatttattattcagggtaagaatttggccaattttaaagcttggcaaaactcaaaaccacttaggaaggaaagaataccaataagatatcattaattatttataaataacattaagttaataaatagaaaaatgctaaaaagtggagtttagtaccaaagtcattgtaatattatttttagtagaattaaatattaaattttatataaacttaatatataatttatagctagagaatactttaagaactattgctacccaaaaacactgatttgaatataattagaacaaatataatcccgatagccacacaccatatgatatgatatgatcatctttaggaaaagcatatataaattggctactagaattaatgcaattgaatttttgttttactttttttttcttagcaatatttgtttacttcttattacttgaattattgtctgaaaagttttcgatttttctatcttttatttactttttttttttaaatcttttaactaattaattccttacgggcacgttaggaagcgacaatcttttgagatttgttaggtatacagtggcaggctcacgtgaattctccaccaaaaccaaaacagtcgcatttatttatttttctaagaaaaacagtcacatttttttttttttttttttgaaagaaaacagtcacattttttaatccttaaaaaaaaaatactattttgaagttttatattttacaaaagttagtgtttgattcttttttttgtttattaaataataatttgtaacttgtgtaaaaaaaaatatataataacgcacttaagttcttaaacccccgtttcaaaaaaaaaaaaaaaaaaaagttcttaaacccgattttagcctaattatttcttatcctctaaaatttcgcttaagactttctattttctaactctaacaatcatggtttaatttctattttattcttaacaaaaatttaactagacttaagagtattatttggttttttaatcaaacaattaaaattgtcatttaataaaatattaacaaaaaatctaattaataattgtgtgtaaaatattcagtctaaaataacaagtacctaacaaaaaactatacaataattgtatggcacgttcactgtacaatattaaaaattgaattaacttaatagagaaacataacggaacatatgaaaaataattaaaattaatatttataatatgttatttactgaaaaaatttaaaaataaaatatagtgatttatcatatttattttattaaaaaaatataattaattaaaatacttaaattaactaaattgtccttttaaattaaactgcaatatataataattattttataaattatattttaaaggataaaattatcattatatatttgatattaaaaagtaaaataaatataaataaaatttattactcttaatagcattttttataaacttagtataaaaaagtatttttttttatctcatagttaattaaagtttttttttttaattttaataatataaataaataaataagtataaaaaataattatttactataaattctcgttacttattactaaatatacctttaactctttatataatctctctcaaaaaaaaaaaagaaaaaaaaaactctttatataatcagaaaatgtaaaaaatatgaaacctaaccgaatcagtaccctaaaaattgatgttgggagaaagggccaaatggtttgataagggacacatgtcccttggttaggacactgtctgaccaaaaacatttgctttcattgaagaagagattaaataagaaaagaaaaagtgagtaaccgacagaaaatagtactaaaaatatcattgcctcggtaaaagctttgaatgcgaattttgggggtgtacggacagatcgactataatcccttcgtcccaccttgggccgtacacgcgtccttgtccttatccgtttcctcaaagccacgtcttccattctcttacacgtggcaacatcacctttatcctcttatcctcgagatcctcgtgattttgactcttcttctttttcttttttattatatatttctgttttaatttgtttttcttggctgtcttggtatcatcgactgtggatgagatttgagagtgagaaagattggggtgtttttattgtggactgatgtatactaaatgtggtaggaaaagtatttttttttaaaaaaaatgtggtaggaaaagttaatttagacagatatatcatatgagacaaagtttttatagttaagaaatttattatcatatgattttttatttaataacaatgaatttacattaaattttaccacaaaaagaatacaaacgtttttatctcaaaaaataaataaataaatacaaacgttcataaaaaatatctataaatatcaaacgacaatcttaaaagaaaaaagttatgaaacgacacgaaacttttacgttgctcagcgatttttttctttcctttttttttttccaagcagtgcctaaattcttaccattaatcctattttagtatctataataagatgtttagcaaaaaaaaaaaaaggaagacaaaaaattaatgaaaatttaaaagaatatggtttcaatttaaacaaaataaacactggtaacatatgaatctgggaaatatgaataaacactagtgtaccatatgaataaagttttttatgtagtagcaaacatatatagcagttggcctaattaagagggttactaatactatgaatatacaataattttatatagttaaataaattactacatcagaccgcatatttgcatgaatatatgaagcagagtaatataataagtatcattttgtattggtacgaatgaatttatgactaacatttgaataatgttattgttagatatcatttcgtgttaaatatttttgggagtttctcctcactcgatttgataaaatgttacttatagaaactctaggcaatcctgtttttttttttatttttcatttcgcaaagtcaggcaatcttatttattgcagtttttttttttttctagattttttcttttcccaataatttttttcattaaaaacatggaaaataattttagaacatttctaaatatcatctgatgatattttttatttttttaaaatagttagaaagttaaaatagagatacacttttattattattgcttcaattatactttctattttaatttatatttaactatttaaataatattttataatttaaatttgtaaaaaaaataatagttttaaagtttttttttttgtattattattatagagagtcatttttttgtgtacagttataacttatttttccaagttttactctatatttaaactgaaaaatgtgtttcaagaatatgttaggaatactgtaaaacttaatataacactaattaattcatgagaattaaacaataagattaaagaatagcggaagcgtacc

SEQ ID NO: 114394 - DNA, 2225 bp, Cannabis sativa
  modified_base (2026)..(2041): a, c, t, g, unknown or other
aaacatatattgtccactaaatgtaataagcgaagagataccatatcttataatttaaacaaatgtttatattattttaaaggaaaaaaaatcataaaatcttagcaacttcacaagacaaaaccaacataatagactttctttaatttacaagacctcaaaaacaaactcacgtttcttctatatgcatagtattataacaacaaaagggaaatgaaaaaaaacacataactctattatattattggctaaaccaacctgatcaatgacctgtcttgccttcagttcctgattgatgaggtcaattctttcataaatcttttcttcttcttcttcttcgtccattataaccaaaactgttacttttcattgtaaaagatggaagtatcaggctgaaatatctgtacaacctagcaagcaagcacacatacaaaaagcataggaccttccaaaccagactcttaaacattctctttaggcaaaggaaaacccttagattgatcgagataacttgaatcttgaatgatgtctttggttcacaatctacgaagtagcccttagttcgctcctttgcccattttcatttccaagttttcggaatccattctgtaatgcaattacaattaatcagcaatttcaatttaaatattaagacctcagaatcacaatgcaataaaagataaacataaagaaagccttcataaaacccaaaaattgccctcataaaactcacagcacaagataaatcttctaccagtactgatgtgaatagagtgaactgaacaaacagtattaaaaccgataaagttaatagtttaaatggaacatcaataaataagaatttaaatgagctaatcacaataataatgaaattaatatgcatcacagattacaagttatacatatatatagtgtatatatggttattgcatttactcattgtaatagttagctcactttcaatcaatattagaacttgcatataccatagaatccatagcaattaattcagaaaagcaatgaataaacagagaaaaagctgtcaaagtaaccgtgaaacccacaataaatatcatcagatggaacaaacacaattgacaattccacattcgattaaaagaaatataagagaaaacttaacaaacccacaaaattcctcagccaatacataaaattcaatcacagagaaatgtttaatcttaaatatcaacaagaaagttatcaatcaaaaggacactaaatttttcaagagagaagcagtagcagtggataaaatgaaatggggtggaatatcaatcaacctgagagcgagactgtaaatcggctatgtgggatgtcgagtgaaaggaggcatcatcggaagtgagatcagagggctcagtggcggtgcaatcgggaggtgattcaaagagggagagagaaaattgcttatcaacgacacccacatcgaaatagataagaccagagctgggtacatcgacgcgaatacctttgacagggaaccatagaaagagctcctgagccgtaacgccagacaaatttccgatctggccaaacgtcaaggtgccggagacgttgaaatcgtagtgaaactgattctcgaacttggcattacagggctggttcagcaacacctggaaattcccggatgaaggttcgtgtgaaaattcagttatgccctttgggaaaaggccaatcgggagaccgtgcagccggagataatcgtaaatggtggaaggactgctagccgttgcggcggcgaaagtgaggaggaacgcaaacagggagagagtgagagtgcgaaagttagggcatgagagggaaaatgcgggaaagtgagggaaagtgaaggattttggagaaggagaaggacccatgttttcgttttggagaaggaggagagaagcgacgacggtatattgaatatctaaccaaaaaaacaaaagtatttggttaagacttcaaagagagagagatgacagattggaattgcaaattcagatttttctattattattattattannnnnnnnnnnnnnnntattattattattattaggattaatatcatcggaaaattctacaatgcacccccttcaaagagatttactgatacatccttaaattgtttcggcatccagaaaaaaattttagtctaattttttttcatattcatgtacactatagctatttaagataacctacaaaattttgagaaatttcga

SEQ ID NO: 114395 - DNA, 2507 bp, Cannabis sativa
  modified_base (1135)..(1140): a, c, t, g, unknown or other
aatttgctacaaattgtcttggtagcaaaaaactttcagcaacggagtattagctacgaagtagccaccaaaaaaagttagtagcaaaaagtttaatagctactaaataagcattatttactaccaatttttttttagctgaatatattttttttttttagtgaactacaaagccctctcaaaataaataaataaattaaactacaaagtatgtatatatttatagattgatgttttaaagtttagagatgatatgagaatttatgtggttttggttccatccaacacccttgatgttttaagtattaatgtccaaaaaatgagataaaataatagcttaaaatactttatatatatatatatatatatttattttccatgtggtttaagctaattgattttttttattataaaaatacgtacccaaacccatataataataatataattctcccaaactacaaacttaaatagaaacctaacaagtaaagagtacataatgtcataattaatacaattggttttataagtaaataaaatgttttcaggaattagtccacaatatattgttttaattgtcttaattaattatggtcaacctttttaagcatatataaaaatgatgtcatccttacataatataagtgtagagagagagagagagagagagaagcaatggatatcgttggcaatgggccatgcatgcaataaagctagttaataactctcaagaaaacttgtgaaacaaataaaatctatacatacatgtagtaatttaaaggaacataaatggaaaacaactcaactaattgttattgttattattattattatataaacagtcttttttttttttttattaactttgtagagataataattgattaaaaaaaaggaccttttatttttctttgggtgagggagttaggtgcgccttataaatattgctgtagggcactgtaatggaatagtactatttctctccactccattattcttgtgttatgggattatatctataataataattataataatgtatacgtgtgtgtgtatatattatatattgggtttgttgttgtttgaagaatattaatatatatatatatgaaaattgattattattattattatnnnnnntattattattattatatattaataatgatgcacttgatctctttccccacttcaattgggaaccatgtattttgtcaaacacctttggtgggcggttgaggagatcatatataacattttggggagttttttctgctaccaaattaatttcattattattaatatatatctatatgtatatggaccactactactacttcaaccttccttaatttcaatgttttacacttttgtatataagtatagaacatgatcacatggtgattagtttttttctccactaagctttgtttcttttccccttatatataaatatatatatacatcaatataaaggataaaatctggcctcatcatgtattcggatctaggagttattattattattattattagaaaattctataacactcccttaaaaatacatcgatgaacctctatttattttggtatctgaaataattttttagtcatcaaattttttctcatggtcatgtacattatagttaaaaaattcaaaaaatttaacacgctaaaaacaggattcaaacattgtgttgcatgtgtgattattttattttatatgcgtttgaaatagactgtttaaacattactttttatattgtaaattattccaaatttttcaaaattttatagaatatcttaaataactataacgtacataaataaaaaaaaaactaatttttttttagatactaaaataaataaaaaatgcatcagtacatctctctttttaaaaggtgaaatcaaccattattattaactgtttgccaaatttattatttaggttgtaaaattctataataaaacatgcatgaattgcatatgcatgtaaggccaagatttcatgacctgtttggattttttatatgtataaatacattgatttagtttattgtccttgcattctatatatgttgagttcatcacctttaattaacggcattaatttaagcacttcgaaaagaaaatgtattttgtgttgtctatttaaaattaggtactttttctaaaaaaattcaatcaaaacaaaagtacgtactttaaattacttgtaatattcttgctttaatttccaattcctcactaacattttatcaattattgttaatttaaacggatacagttctttttttacctttgtgaataatagtgaggtcttgtgttgttataaaataatttacatatataattataatatcagaatagtactatttaaaatacgtttataattgatgttgaaacacattggtcatggtacattattgaaaaaccgtgtttttgcaaatgtcagttgtatataagaaaatataaaaactgtaagcgtttgcagcagcagaaagtaa

SEQ ID NO: 114396 - DNA, 1275 bp, Cannabis sativa
tcttcagtgcacgaccttacttgaacaggatctgttctataggctcgtacctctgtttccttgagttctaaggagaaaggaaaccaaccgtggtggatgaatcatgactgttcgatcagagcgtgattaacggtcagatctccttcggattatcacggctgtagaggatcgttctcagctggatcactagctggggtggacgaacagttgtctgacaggttcccttcttttttcattttctttaattaacttgttttaattacttgtcaaagaaagtactttctgtcttctatatataattgctctccaccaatcctacacaacactaccatgtgtcattgaacagtgagttgactaattatgtattgatagtaatgaatcttcgcattaccattgatccaattctcttcttcacataattagagaatatgcattttattgatatcaaagtaagaattacaaatttccaaacttttcaagacaatttggtatttccctaaagagcaatggtttactctaaataattcacatctctctaagaatttataggctaataatagtccaactgttgactgattatgtatgttatgattttaaggaatttcttcttagataaagactatcacttttgcattgttgcatttagtgtagggacaatttttagtattcaatatttaagaaatcataactgtatagtaatgtagattgtaattataacaaataaattatgccgttgaaaacatagttcaaaatagtcagttctatacagatgaaaaaaaatttcaactctattttcaatacggtaatttggtatagaatttttagaaaaataaaaagtatttcttacgcggtcatatataaaaaggaaaaggtgacaatagagaatggctcttaaaggatgtgttagaccagcgtttgctccctccaactggtaagttatcggctgtggtggtgttagtagtgagcttagccttatcttgcagttgcaccagaacctgtcccgagtcacgacccaccatgcattgataagcttgccagagatgacaaagttgaccaacctggtagcaatggtaagagctcatatatagctcaatagtttattggtatgtgagtgaggttgtgtgcttgttatgtacatatatatttttgtacagtagagtacataacagtagacaatctcggaagctcatttttagtgactctcttaatatcttgatcagtataagaaacagtaaaagagtatctattgtataaagaaaccagttgcatattgat

SEQ ID NO: 114397 - DNA, 3393 bp, Cannabis sativa
  modified_base (610)..(644): a, c, t, g, unknown or other
atagagaataaaataatgctgaaaaccgtctgcagaatgcctccagtattgacttttgtctctgaaattcgtactcattttttcctctaaaattacttgactgaaatcaactccagttcaccctttatataggcttttaggaactaaaaagatataaaaacgcacatgttaaatgcctattcgaattaggaaaccaccaaaactcaggtgagacaaaaatacaatttttgtgttgtttagaggggcaggccgcggcccgtcttggagttcgacggtgatttttctgttgcgtcgactgatagtattttggccataactctctcgatattactcagaattgcacgattcaagatcttccgaaaagataaaagagagatctagaacttttatgttttgaatgttttcaaaatataatcagaagatagtcgaattcaggcttgaagttttagctttattttttgcataattttctctatttcaaatatcatctttttgtgagatatttttatcttttttcccatctttttcctctgatatttttctaatcttcttttattttaaaaaataacagataacaatcgtaaaaatgctccaaacacgattaaagctnnnnnnnnnnnnnnnnnnnnnnnnnnnnnnnnnnntactaaaaataacctaacacattttttggttaaaagtgaaaaaagccctaaaataaattgattattttcatatgatgatttatgttcttgtagttatattaggcattttgtttgttttcagaaaattcgaaataatttaccgtgtcgaaaataaaatttaaacattcagatgtatgtgtgtttattttattttatatgtgtgcaacttactattttaattttattttcgacaccataaagtatttaaaatttctaaaaaaataagtaggatatctattacaactacaatatacaatgtcatttatcaaatggtataaaagaataccctgaattaattttttgtcaaaataaaacttaataataattagatttaaagttgtcatgacaaaactgggtacattctctacatttgttcgtactaaaatttttcttcaagtttgttacattaaaaaaattatcaaaaattgagttcagggtactattttgtatcattttaaaaaaaatataaagttcaatttgtaattttataaaatagaggctccaatcgataactttaacaaaacacatgatccaaaataatactaatctattaaaatataaattatacaatcatttaaatgtgttaacaaaattcgatggattttttatataagtttaaatttgaacttgaattaaattttatatatttaaaaaatataaaaacgaagaatagtcaatttgtcattttacctctagataaaatttatagataggtaaatcaatgaaaattagttccctcaaaggtccatcatttgttagtctttgaatcctatcaaaacttatatgacatagtcttaaatgtcattaataagtgatgtgtcataattaatcttttgatgtttttcagccttaggttcttagctactttgaataacttagtgttgaccctcaaaagtggctaatgacagtgtcgtctgataagcgacatacataacaaaatatagcttaatgagacaataattaccagattttatagtagttcacccccaatatttgtagagttgatcgatatttttggcaactcaaataaaatgtaataaataaatattaaagagcttaataaaagaaagatgaagatttttacgtggttcatatattatcgaatcttaatccaatgactttatatattctttattaacttaacctcaatattaaaattctctctgtttgagagtgtttcgtcgctcttcttagagtgttttttgtgagaaagttttgtctgctttttgactttactatttcctgactgttgtgatttttcttgtgctctgtttttatcccatggcctctagcagtaagactgataggcaactgtccaataaatgggcggatatgtgcctggaagaagaagaagatgcaaaagttattcatgaagaggatgatgaaggggaaagagaacctgattttgatgatagatggtgtctgattaggcgacttttaacaggaaagatatcatattttctgatctttcaaaatataatggcggatctatggaaacatgggaaaggaatgtatgtcaagatcttagaacaaaaccgctttctcttctcattttatcacaagatcgatattcaaagggtgattaatggcagcccatatggagttacgatcgtaaataacttatcattaggcatctaaagccaggagaaaatcctaagaatcttactctgaattcccttgatatgtgggtgcaaatttacgatcttcaattcaggttccacacagagaaggttgttcgcgaagcacggcatttccttggcgagtatttagaagtaaacccgaataactttacgagagtttggcaggagtatttttgagttcgtgtgtgcatcaatgtcaccatactctcaaacgaagaatgaagttttgacgtacaggaggtgaatcagttctctatgctaatatcaaatatgagaaagtcccaacattctgctttatttgtgaagtattaggacactcgaaaggttttgtgataagctctacgacagccatgtggatcaaattgtaaagccttatggactgtggatgaaggctccaacaaaaagacaaaattttcttaccgcctcaccttggttacgatcggggaagatggtggctctggctatcaatggtgtgcctgaagttgacttaatgggcattaattctcctcctcatttcatggttgattctaagagaaatggcaatcctggagaatctgctccaataaacaacattaatgaagggtcaactgtggtctttaaagataatgccgccacttttatatgtgacaaggagtttgaaattttagaaggtaaaaggaagagattggacttagactcaaatgggcctctagattagtctatggaacctacaaattctaatgtctatattaataatctgaatttcacaaatgttgatggggtgccaaaaaatagaaagatggtgggtgctggtgtccaggcccactaaacattatgagcaccataagttagaattgatgtgggcttgggaacccacgggcccaacaattcgtagaagacatttgatgtcaaaagaagcccaagtttttgtttttgtgtgaaactttatgtaaaaaagaagttgtggattgggtcaagaatcggctgggctttgaagcttgctttgttgttgaggttcaaggtaggtctggtctgttggggtttatgccctaaataaaactcatttcagataatcagatttacttattaat

SEQ ID NO: 114398 - DNA, 1629 bp, Cannabis sativa
ttatgtgaatattagatgtatgtaactctcaaacacattatatacattaatctcatatcaatatataatatgttacattttaatattttaatctatctaatattataacaatataatatagcaggtttagcattggatgttttctccaagcattataccatttttggtttttcacttttgatatttcaagtttactatctagttttctagaagtatccctaatccatgtcttcttatacattcacggtgaattaaaaacttgtttggattagtttgatccatttgttttgtacactctattcatttattttaataatcacattcattattaaaaaaaaaaaatcccttatattttcaaataaataaaaaaaaaaaaacctcttatatcttagttttctagacttaacaggcttttttttaggaataccttttaattttcattctgtttataaatttgagatgtcaattaaatattaccattagatactaaatagattgcaattatatacatctttgtgtatgtgacatgttttgactagttttgagattttagtatcacatctatacatgagtacatagtgacaatctcagttgatatttaaagatagaattcaacgtccatgtgcctcacatttgcaaacaaatataatgttaagagggtattgttacaaaaaaaaaaataataagaaattaagtatataaatcgccgcaaattacccttatattattagtatgtcaagtattttatataaagaagtaaaaatatgtgcataagataaagtcactaacactactatctttgctaaaaggagtctaaatgtttcttctcctaatggctctagtatagatgcgaggaacccttgtttgaagtatggatcgtcaaaactaccaattagattaaatctcttagtcatccctttcaaagtgtaattattctaattcttccttcttcattgagcagcacttcatttcgaaaacaaaattctttctagtaagagtacaatccttgccaggtagaattattttttcaattgtctaccaaacgaaaattctcttttctgttccgcactacaaccaatgttcaattcaaataatgaaaactatgttggaatcttcaacatagatacgatcaacactgggcaacctattccaatagaaaagatgcaggtaattcccaaaaaaatgctcgaggccaatcaaagtaacttcattttataatacgggagtatcatacgcaattataaacccagacatctaccgccaaaactgtggaagctagaagaaaaaatagaatattcaagtgtcaaataacaaaatcctctacaccaaattaatgagtaagccaatcaatttcgacatttacacaaaaaaaggcttttttatgacatgttttttaatgtatttaggttatggactttcacaaatttttacatgttattatttaaattatgccacaaatttgttatatatttttgtaatctcatattttatttttggtccaattatatgtttctaccttatccaaaataatggaattacccaaatcaagagagaggaagagagagattgatcaatgaaaaatcgtgtttttgcaaatgtcagttgtatatacgaaaatataaaaactgt

SEQ ID NO: 114399 - DNA, 1649 bp, Cannabis sativa
ataactttattgtttaaatttttgagagcagttttgtctcatgtggtttgcaataagttttcaacaacttatggtttgacaaaacatgcttttcggttagacgatgagctatcctggctcgaggaaagttcctgtactgtgtgcgaatttttacattataaattcatgagtgattctaatcactacgtcaaacaaaaaattgaatgtgattgactaaatatattacattaaacatatttgtttaattatataattataatagtaacaatgtaatttttttaaggtaataacatgtaacttaaagtaattggagtgttctaatttgaatttaacatataattactaatgaaaaatattattaataatgtagtttttttatactatcatttgaaacacattactattttctttttttatttgacctcacatttttatattatactaccaataccatcaattcttttatgttttttccacattatttaaatgttatatatattttatttatttatttatctaaaaaaatgtaaaatatgatggtattacatctaatttcgaattttcaataatttttatttttatttttttttgacaaagaattataattgatatttcaaagctcattatcttattttttaaactgtgactgaaactatattagtcacaataattaaaattattttttaatcacaaattaagtttttattataattaaaattggcatcttattatcacaaaaactccaaaataataaattaagaactgatttttactacgtatagttttatcacttccaaactcgctctcttttgatgatgcaagccttttgtggtcagaattatctgagtttattcaaatctttgaatttattttggcattggctttataataattttcttttattcataaaaaagtgagaactaattatcattacctataattgtatttttttttttttatatcgttagtacatgagaataaattgtaattctatattttttttaataggaaaactttcataaatttttaaaaatttttaaataaattaagatatgaaaattatgatacaagcatgcaagcaattagctattaaatttaatttcaacatcataaaatatataattttttgagaagtcttctactaggaaaaaaaaaaaaaaaagaaatactaaattcagcatcctcattaaatagccgttatcctaattatttttacatgcatatatatacttgcatttataaaagaaaaagagtgatttttttttaattattattattattattattattaaaaggtttaacatttgcctaacaaaaaagactagaccttttgagttttcactatatattcgactgttgaataaagtaaagaaaagactaaaaatagagagaaaaactttgaattttgaaatatggtttgttgttgtggtagtattttggtcttacatatatgttttctttttctagtgtgaaatttggctcaacttgttgtgtttgtggtgatccaaatctaatagtttagaggttgatgaatctcaaaaattaaccattttttttttgtctaatcaaaccaaatgatttaacaatattttataatatttatatatatatatatagggaaatttgattttctatacttagaaaatcaa

SEQ ID NO: 114400 - DNA, 3206 bp, Cannabis sativa
  modified_base (40)..(45): a, c, t, g, unknown or other
  modified_base (2323)..(2328): a, c, t, g, unknown or other
  modified_base (2446)..(2450): a, c, t, g, unknown or other
tttttttttgaaaagaatttatttggattccttgtgaaannnnnngcaacttttatttttacggaactcgattttgataaaaattgagaaagttgtgctgttttggattttggtgcattgagtgttgagaacttgagcaccatgcgagccaggccctcgacaaggagggatgcgcatgtcgattaggacaattcgtgtgtgaagacacggtcagctccacttcggacgcgacccaacacacacctgaccctgcatctagtgagggagatgctgcaaatgccccgatatctcggcgtagggaccctgcaaagctctcaagcgtgcgcccaaggttgccaacaacgtatctcgtgggcagtcattaaaaatccaatttttgggtgatttttcatgccaatttgaaaaatttcaatttcaaaaccctaaatatcttaacaaaatattatgttttagatatttaaacttaaatatcaaatttttcaaattaataatatttaatatttaatagattattattaattttgatagtttaatgtttaaatttaaaaattgattattttactatttaaattatggtcagattttaaaaatttgttagtttgttaaaatttactaattatttaattatcaggttagatattttaatattaggtatattttaaattaaaagatagattatccttttaatttgaaatattatattaaaattatctatgacaaattaaataattataaatttataattggcctacatgtttttataaatatcctaaccataatatttttaaattcataaatttgttattttgtgaaatattttattcttgataaactataagttagaaaaattatattttatatcattttacttattagaaatttataaataatattacaaatattcaaataacttagatatttttgtcaaaatttaaaaaaaggtttaatttgagattttttcacatataatttagaaaattattattttttaattattttattcttaaaataataattggctaaacatatctattttaaaattagttaatttatttttatttaattttattaaattataacattagaaaatgatattgaaaatatctgattggtcattctcaaatcatttatcttattagaaatttaatttaatttaattttataaaactaattataataaacctatatattttaaaattagtttaaatttgatatttctaaaaacaagatttaaggttcaacaacgtaccctaagttttcaaaatttagttggttagttaaatgatagtttaattatatatttaataaatgtcttacttcacaatttgttacatgtgtattgtttgtttaaattgtttattcaatttttttttgacaaatatattttttatttgatctaaattactatgattaacttatttatagatccaatgatctgatattaatcataatctaattgttaatatatcatataaataatttgtaacaggtaaattttgtcatttctttcatctgtacataaacctagaaacatgaaatggcccatctaaatcagtttgacccgtgtgaacctatatgtttacttttgggtttaaatgcatataggaagcatatttatttctagatatttaaatggactaggttgctaaaataaaatatcacctatgatagttttatttaggcccaattagtattgagcttattcaattaataacaattatttaatgaaatgttaaattactctcctttgagctttgtatgagagttagggggccaattgtagtgggtaagatatattggacccaacccaccctcatatgaataaccccaattgtgaatgtccattaatcttatttaaataattgtattagcctaattatactagtttaacctgaattagcaacataattaattttgaaataaataaaattaattttcattggataatcaaatttcactattttgtttatctaaatcctttgaccttaatcacattactacacatacaatcatacctcaagtttattcagcacacaaatcacaaaaaggttgacgatacagcttaacactcccttcaatggtgcacacagcaagcaagcacctacaatgtaagcaccaaatcagtatatgcaaatccaattcgatcacagtaaaggtcaaataaaatcttgagttaagaaaaagagagtgagagagttagtctcgtaccatgatatatagtggccaatttatagaaaatagttggccagtattgatactaggagcttttttatttttacacttcaaaacaattttattatttttttgcatttttacgaaattnnnnnnagaaacccctattgcaactaacattgtaacctaaattgcaacaaaaaatcgtatagaaactcctattgcaactagcgctgcaaccagtactttagaaacccaaaccgtaaattaaaannnnnaaaaaattaaaaaattttaaaaaattcttgccctagggttgtaatagagtactaattcgacgatattgtctacaacagataaggaatgagccttaaatgaaaatagatcgaacacctggtagtggtaggtatcaaatatgggaattggaaggaaacattaagaaataatcaattgctgccattttagtattgaaggtaaattgaccttgaaatttttgatgagcggcgtaaggtgaaggagatgatagaagtgatctgacgaactcctctacagatgaatcgagagaaatactattagggttaggggtcttaactaaatttgtgagggagaaagaaaattaatttgcaatttgggatttttaaattgagaaaaaaaattctaaacatttttgcacacttttattagcgcacccacgttatttgaattttttatggcgaggcctttaatgtgcctgcattagcttagtaacatttaaaggtgcatgtaatgcacttctatatgatctatgcgttctcgctgctttaagaaacttttccggacaaatttttcataaattacgcttatgtaattatattgcggacgcttattgtgaaatgcgcctaagaaagtgtgaattcttgtagtgcaattatcttgatcaaaaattccaccaaaaaaaatttaattaagaaggctaattaggaatttttcccccgaactttgacatgtactaaattatgtcccttgaacttttaaggtcgttaaaaattctccct

SEQ ID NO: 114401 - DNA, 5832 bp, Cannabis sativa
  modified_base (5748)..(5750): a, c, t, g, unknown or other
aggtgatgacactacttgatgaggaatgagaaataagtcaaacggaatgctgttgataaagttctacctttggatttggtcttgctttgcttatttgattcaaggactgaagttttccattcatcatattcgtgcttttccattcttttgtgtttcttgtaactcgaaccctgcaaattatttggcagattaaaaaatagtctctggagtgtttaaataagaaatagatttagatttatgcgaaataatcatggcattataaaaaaaattacaatgatacgaagtgagaagactctaattgaatactgcattcgagcttaagttgttccaactgtgtattcatataacactaacataaaaattgaaagtctaaatcgggtagaccccagaattggaagacaacactagtagaaaacaatgaaaatactatctcagctaaacacaattttatattctttcagatagaatgccaatcagaattattctacgttggtttcaagaattttatttgcaccaagaattgtagatggcttatagggatagtataaaccacgtcaaagtgcaaactaaaagaaaaaaaaaaaaaactacattagaaaaccaacaagaagcaaacttggaatagagtaaaattgatctcataagctgatacagtgaatccagcaattagattagactgagattgcaagtacctcttctccctcatcagcatcagatgaataaccaccatcctcaagcttccttttttccggtaaaacatctagtagttctacatgcagaagtagaaagcaacttattagtttatcattaggtaaatttagtatcatataaattaaacaatgtacacgtaaagcatatcacaaaaaggggaactcagtcacgagtaacaccacaattaaagttacgacattgacacatacctcggttccccttcacatcacgaggatcctttttctcctttgaaataccaagaacatcaaagcacaaatcgatcattgaagcagaaacctgaatcaacaataacagtcgtattttaattgaaagtcaaaaactatagttggctaatgccactaacagtaaaagtaggaaaatgtctcttactgaagaaaactcagattctgatgcaccactaagctcaattaacttaatcttgtctacttttagctgcaaaaagaagcaatagattggaattaataaaagcttaagtgtagtacaccatgaagttgaatagctgaaagatatcagcaagtgtaccttgtgcttctttgcacacaagtagaaggctacagaggtaaacacaggacgagtaaagtccgcacctgctcgccgagaagcgggcagtgaagaaagaaatcggtccttgtaactgaaaagcaaacatatgcaagtacctaaattcagaaacaaaacatgtaccaaaacatagccaaataacatctccacttatccttattcaaactcctattacttctggtcaaataatttccattaaagacgtaaattcactcttcaaaataacagaatatggccacagaagcattttatcaagcatgtaacagctgttcatatgcttgctatccatttccattaagatttgcattctataatctaatctgaaagcaattgaaatatactaaaagcttatagaactagaaggcgatgatcttacagagacaaaccctttctcacaaaagggatgattctaacgcagccaaattgaatggccaattctctaatgtccagcttattcctacaccaacaaaatccgtgttcggtgtcagcaaaaccaccaccaccaaagaaacataaaaatgtagttaaagtaacaaatgagagtaacccacttgactccaagaccgttctggagcgaattgtacgatctggtgtaagccttttccgacattccactcagctttattgcacactgccgatcgaataaaactcccaatctacaatcaatcctttaacccattagaaaatgaacaaaacccatcacatgatgaacttgaatgatcgataattatgacattaatatatataccttgtcgccgagatctctagacagataacagctttacaaacttcaccctgacaataatgaacaatttcccatcaacacatggaaaacctaaatgcccaattgataacatttttatactgaaatgaaaaaaaaaaaaaaaaaacttacgacaccgataactgaggagtcaaactggacatcacagagccgacgaagttcggcggcttttcggatgagttgcttagactctgagactccgagcttcttcgctacatcggaaagatccatagttaaaatacgaagatcgaacgggggatggaattgttatctgcggatgacgggtttcggacttggggaagatgtaggagaagagccattaggtggttcttatcaattttcaaattaatttcccgcctaaattgtgacagtgctctttagttttgccgcctaagaggaacgagcttttttctgttttgttgatatacaatagaatattttaattatttttttttaagaataaattctgttattataaatttaaagaatttacaataatagaaaaaaaaaaaatagtaggatgaatttttcctaaccaaatacaattattatttttcaataaagcttgtttacccaaaccatgagcagcttggtttgtatctcgacgaacatgagatatacaaatattagagaaataggataattaatttttaacatcaagaattaagtcattaaaagataaaaaacttgatgataaagcatgtatagaattaccaagtactaaggaatctatttcaactaaagctacatgaaaattcaattgtcttacccattttagtgcatgaaacaaaaccttagcctccatctcttgaggtcaaaaattgcctgttgctcgccaacacatgacctaatgaatctcgaattacagcaccaaagcccatcttatctgtgatggttgcaaagcaacatcaacattcagtttatactatcctggaggaggtggtttccatggaaaatggcctgcaacattctgattcaattaaaggatcgagtttgaagttgaagcatgctgaaaattgcagagataagccatcgaattcgcaaaaatatcagcttgtttcttgtgagatttgtgatgaactatgttgttcttgtcagaccaaatagaccacatggtgcatataatcttttctagatcagatttggatgttgttgacagttggatgataaaatcaccttcaaacatcctactagctgctgcaaaataaaaagtgaattcggaagaacgccatactgatttggcattctaaaggcttggacatggataacttaaatggaaaatgtgagaaatttgattgaaagctctcttatttatagatgagtccagtctcccaatcctaaagcaattgggagtactttaaattcaaagccttaaaggaaaagataaatgataagaaaaagataaaatatatattttctcctctcctttggcattaaatttgaaactcctatagaaataggaataggattttttgaatttaagaggtaacatccaatcctaatactactaagattaaggaaaaattagagattaaaaagaaaaagataaatgataagcaaaagatcaaaaatcttttctcttctttcttttttctctaattttcgaatggaatttctaaataggattaggattcaagtccaattaatcctagtgtcgtaagaaatacatgaaaatttcaagttctcaaagaaaaagataaaagataagtgaaaaaataattagtttttcctttgtttctttgactacataattttcaaaatttccctacataagaacaaggaaacttaaatttctaattctattattgggattgcttgaagaatagaaacaattgtctaagattgtcaaattaatgcccatctggtagttttgagaaaaatagcatcagttcacgtcatcatgtcaactccacacaagtgtaaagttagcttaggcagtaaatattaacccaaaaacttttcctagtgatgtgaacatcaatctttaacacgtagcaagaaaggtaacatcacagagttgagtagacccgattcattacagtcgacctgagaggggtccctagccttgcgcccaggttgactttgagaactccaagaaggaagcttggacttcattaactcatttccaactcactatcttttagtattttgtaccataaagacatgtagcaataaaatctagacctcgagagatgaaattacatgaacttgcaccccataagtcaacctgggcacgttgggtttcacctagcgccaggttgacatcctaactagggttccagtttttgggactgtcgtaaagcaaatgggtcaaaattttcattaggacatgaactagacataccacaaacatatttgaggcatacgaatcagattcaaaaaaaaagttcatttttgagaacctggtgcatgggcccccagcgcccaagttgacaatttgtcaatctgagtgacttctaagtatcagattgacgatataactttggcatcatcttcgtcttcatcaaaaataaggaaataagtaattttagtgaagaaacaacacttcttaggtaccaaaagtaaggcccaacactcaggttgacacttggggctagtaagcgcccaacacttcagtgatgttttctgagaactcttctaagaatgttctccttcttcagaaaaaattaagattcaactatttatggagaccaaatggaacgtccaaggggcaaaaacttggacccaatgccaagttgacacctggcactaggcccagcacctaggttgacatattgtcaacctaggtcaattctaattagtttctcaaaaaagtgttccaagaattttttttgtcatcaaaaatattgaagattcaagaaaactcgaggagaaaaccataaacccaagggcctagaagcagagcccagtgcccaacttgacaatcaacctggtgcactattttcaatcactcaaatgcaaaatctgattcatgtattctctccaaaatggttaaaaatggggtaggagaccttgtcctcaagttctaaaacctttgaattataaaaacgacaacttagaagctcctaaatgatcaccgagcacctaggttgacaaatggcctgaggcactgggttctacctacagttgcgagtacttaaataatcgactactaacaaatataaaaaagcaaaaaataacaagaacacaaagaaattataggggttcaatctgagcttagtctgtttagtccactgttgcaaagatttcagcttagtttatttgatttggatcactcctttatgtagaaagtaagtattctttaggatttacataactaattgattttataaccgttttacaataaataacaatattaacttagaataaatgtttaaagaataaatgatgaacagtttaatccgttcttgtattaagtgcaacaatatattatgcgacttgctaagcgcaagtagttgttgcctgttcatattctcgcacaagctcgtaggattttggtacttttgtattcgctaaatggctcatggcgcatgttgtttggatgtttgcattcacctttgatcacatggacaaacatctcgcgtgttgataacgtggaacgtgcaagtccctgacgagtcttcgaacacaatcagtcattcagaccaatctcttgttgggttttgtgcccnnnataaaactcatttcaatacaatcagatttactaattaataaaagatcagaaatcattctatattgcatggttcacatgattt

SEQ ID NO: 114402 - DNA, 2608 bp, Cannabis sativa
taacagccataataaaccttttcctaccactcacaattacaagaaaggtccctctattcacttgacgagcaatacaaatgtaatcccctaagtatgtgaagctgataggaggcctaacacttacctgttttattgaactgtaggggctataatattggcattcgtctggttgacgagttcctggcaaagtcgaatgtctccagttgtgttgacttcaaagaaacggctgaagttattgcaaaggtaaatcattatctccatgtttaacctaccctgtgatagtaagagttggtttgttcttcttctgcatgtttgtcttctccgtactaatggttcctttgactacaggttggctttaagatgttcttgggagtcactgcatccgtgacgaactgggatgctgatggaacatgctgcagtattgttttggaggataatcctttggtagatttcgttgagcttcctgataattgtcagggtctgtattactgcaacatcttaagtggagtcattagaggagccttagaaatggtgagctcttccatcttcttcatcgattgttcgctcgcatcatgcattattacgtgcttgaatatctgcatgcgtttttaatcgattattttcaggtgtcgatgaagactgaaatcacttgggcgcgggatatgcttcgaggtgatgatgcatttgagttgcaagtaaaactcataaagcaagttccagaagaatacccctacaaagatgatgagtaaaataagtaaattgtatattcattcggtagaaaccaaaagattgaatattttctcttctatttttacgtgtcaacacccttgaattggaagagattattttaaatataagaaatttatgttttgtttaatgatgagttaaataataagagtaaaatgtgatcaattcccaaaagtttcacttggttagaaattaactcttcaatctgtgttatgttagtactttgttatttttatttatttttagctattaagtgtcatttttaattgtcatttttttttctttcttttttaaactgtaatttcctagttgtgtctctcacctcctttttatctctactgcctaacataacaacctctctcataaccattctctcttcttcctggctccggctgctcaaactagcacaatgacagaggtcctttcccctcaccaacaccggagggagaaggcgcatcagaaaggttgacacacaacaaatgggctcccctcaaaccgttgaatcccaaaaaccaactcatcttcctcacaataaaaatattatttataacttacatcgataacacttaaaatttttttaaataatgtgagatttttagtttttatgtatagtttatttttcaattaaaataggaaaaaaagaaaaatgtaagatgctacttaaactcttcttgattgtactgtgattttcttataggtttgatagacaagttctttgcgcaatttctaacatcattttctaaccatcggattaaattgaattaagggttataattaaaatatgtaataagaaatagtaaacatgaaaaaaaaaaattctaccattgtacattcatacatattgggtattcatataaactgcagtctttagttttaaattcaactaatccggactaaatcaaaccaaacgaatctatgtaattattttacatatacataatatataatttttggacgaaatattgatatttgtgaataactttaggtagaatagtagtattgactttatattgttatgataataattgttttattattatttatgtattataaacttattaaaagtaaaaaaaataccaaaacatgaataattattgtaaaaaaaatttgcttcattattattcaaaacccatctattgaatttgtatcattcaccatcgactctgacgtctcctccatctcaaaccatgacagtgatgatggaactactgcttttcttaatttactaattacttttctcttttcatcttctatatatgtagtatatatatgtgtatatcgcagttgtaggagattaagcatctttaaaattggcataaaatgtagaatttctcaaaaaaatttctcaaataccccaagtaaaaaagatcttagtgctacattgattgttcatggaaagctcgtataaagttttaatctcagaagtgtctactgaataaatttttactccaaggaagttagagcatcacataagcaagtttgtttatgtttatatacaattatacaataatgtgaattctttatagggaaataatccaaagttaatacagtaaaatatgatacattatttgaaagtgatcattaaatatgatgattttataatttggggatcataactgatattaacatttaacaaaaaatagttacacaagttcattttggtattagttcatgtgttcaaaaataaagaaccaaatgaaaactaagatacaaacgaataaaaaaataaaattaataactaataatcctaatttagacacagaggagtaacacgtccaatatgagtgaggtccacattgttgcacaaagcttcagcatgtactctatgttggggtagttgtagctcgacatcttgtaatat

SEQ ID NO: 114403 - DNA, 4195 bp, Cannabis sativa
ttttacaaaacataaggtgtaaaatgttacttactctttttttccagttaaatactaaagacaaagctactaaaagcagtagattttgttacactaatcttaagcatcatagattcataggtaccaaagaaattacagagctttcatagttaacttaaaaaaaatatgatgtaatccaatttcatgcaactttccatccaaacattatattagagttaatattgaaagagaatcaagtaaggtgtgtagttttttcttgaatgcgacctaagtagaaggagaaatgatatgatacgccttactgtttatttatataaaattatataacgtaccatactacgtagtggcggctattgatgaaaattttatactagtcaaggtcaaacttttgcccaattattgaaaagcctggtcaaccgaagactaagacaaagaacatggcaaccctttgatcttcttacaagtttttcatacaacttcttctccattacctcttagaaaaagtcaatctcagcttatttattatgctataatgtcctgttgtttcagtttcagaccctccaaaacaatatgagtttctcttcttctcttctctctgtcttcttcttcttcatttgtagttgttatttgatcggtgcacagcagccttacgtgggaaaaaccacatccgattgtaacgatcaacataaggcatcttctggtcttggctacttctgcaatggagttaacaaaagttgccaaacttatgttactttcagagccattcctaactacaacaatgtttcagccatatctactctgttgggtgctgacccttctcaagtctcactcataaattcagtcccggaaacaacaacgtttgatacaaacaagttggtgattgttcctgtcaactgttcctgttctggtgagttttatcaatcaaacacttcttatattgttaaccaaggtgaccaatattccactattgctaatgaaatattccaaggcctcacgacttgtcaagctatagctaatcaacccgaaaatcccattcctagtggtcttttacaaggtcaaagaattagtgttcctcttagatgtgcttgtcctacaaagaatcaaatcgattcgggtttgaactatcttattagctacttagtagctaagcgtgagtttcttttacttataagtcaaagatttaagattgatcaaaacttacttgttagtacaaatggtatttctcaagacaccattttcccaaacacaactcttttggttcctcttgataagccaccatcaaattctataactgtagagccaccaacatcgccaccaccgcctccagttactcgtcctaatactaccactccctcttctaatgagagctcaaacaaaacttgggtttatgccctcattggtgctcttggaggaactgcttttatattggccttaggcaccataatctactgcagagtattgagaaaaaagagtaaagaactcgaagaacctgttcttgtctcgaaaagttttgaggcaggggagaaacaagtagtggacaaaaagattgaagaatcacaagacttcttagatagtttatctgatattgctcaatcaatcaaagtctacaaattcgaggaacttcggttggctacaaatgattttagtattagtactaatttggtcaaaggatctgtttacaaaggtaacctaaatggagattttgcagctatcaagaaagttgatggagatatctctaaagagattaatataatgcagaagatcaaccattcgaatcttattcgcctttcggggatttgtttcaatggcggtttttggtatcttgtctatgagtatgctgccaatggacctttgagtagttggattcaccataagagaaaagatgggaggtttttgaattggagtcagagaattcagattgctttagatgtggctacagggctgaattatcttcataactttgctaattcttctcatgttcataaggacataaagagtagtaatattcttcttgatagtgattttagagctaagattgctaattttggtttaacaagatcaacacaaggacatgatggtcaatattctttgacaaaacatgttgttggtacaataggttatatggctcctgagtacttggaaaatggtgtggtttctacaaagcttgatgtgtatgcatttggagttgtgttgcttgaaatgctcactgggaaagaggtttctgttttgtatgaagaaaataagcacttatctgattcatttagtgctctacttattaatgatgatgatgaagaaaaacaagatggtttgaagcattttatggatccctccttggaagagaaatatccttatgaatttgttgtgtttgtggttcgaattatcgaaggttgcttgaagaagaatccggaagctcggccagacatggatgagattgctcagcttctttcaagaacattgaacgactcattgaattgggaattatcaaacacctttgttcagtagcaattttatagtaccagtttgatacttttattatattcttttttgtgaatgtgttatgattcttttatgtataaatatatatatttttttatatttgagcagttgttgatcagtgccaatgttatttcatttattaacattttttatacacttaatcaataaaaaaaatgaattggaataattaataaaaaaatgaatcggtttaaaatataaaataatcggaaatgatattttattattttgtatactaaattaattggaaaggaaaacaatatcattttattttgtttaaataaaaaaatggtaattaaaatgttttaatatgactaaattataattattagaacatttaattattttttatttatagatttttattgaagagcatatttttctttttattgttaattaataaaaattaaattaaaataaaataaattaagaaagagaaatatactctttaaaaatgagggagaactttttgttttattttgtcactaatttgtatgaatcccatgatatactagttttaagttcattttatgtattttacaggtgtgtttcaattgattatatttattttgtgcagaattacacttattttatacttgttttaggtttaaatggtaaaattcataaaatgaattgaaaatagaaagaaacatgttaaatgagatgaatctgatgaatttatcatggaatttgacattctagaatatagttggtgaacatttcaaaattatagatgctcaacacgctttatttgtgataaaaatcaagtctgtttttgactaaaagttctgaatctttctttcaactttctaaaatatcttgaatcatttaattccgagcaatatcgaaagagttatgactaatatattatcagtcgtcgcacaaggaagctcattgccctaaaaccaagtacctgagccgtgatactgaaagggctatgccgtaacccgcttgcttttagagactcagtagggttttaaaaccctaatttcaaaaaaagaagggtagctttttgattgggacttttggaaggacgaaaatagaggcaaaaaaactatcttagaagctacaaccattaatttttaaagagttttttttttttttttctattttttaattacttaatcaattgtttacaatgacaataagtaactaaatattttattaagatgtaaatggatattgtttgatttttctttaaggattaatacaatttagttcttctcaaattttttgtatgtgcaatatccattaacattctaataaattaatgtatgtgaggatttatttcaacataaattaatatttttttagcaatgctatgcctatggcttgagaataaattttgtacatttcaatttgtgaaagaattaatttttttcacagctgaatgaatgaatgaattttatttagtcgatcaattcctgtaattaaggctttaccaatcaattcaacacttttcaatgttttaattcaacttttatatttctcacgttttgttttgtttcaaataagacctggcatgagtctgatgttttagacaattaagaaatatttaatagttgttctttgcatacagaattccatattaaatatatctatattatatatatatatggtaagactatggtaggacctagcaaaagttccttaccggtagggaactttttttgactattga

SEQ ID NO: 114404 - DNA, 1256 bp, Cannabis sativa
gcatattatacaactggctccttttctagtactccttaattttatatatgtatatataataatataagaatcttccatatgtatactctaataattaaaaattctctttattaattaattatactacttttttcaatgaactagactcattcttcacattatagtattttcaaagagttggtttctatttttaaaaatgaaatttaaataaataaatgtttacaaccaccaccaccttaataacaaccattgtaattagttgtaaacgcatctttaaaaatatctcatatatagctgatctgatctcatattaatattgcaaagagaccaagtccatccatatgtgatatatacatttctatttatcaccaccacgtaatactatcatttcatctctctggctgtttatatcaaacacatctaatcccttcaaatataaccacatatatcccaaaaatccattccaaatctctcctctatctctctacaacttaattagtcatcagtttattttattgggcatagttaattaatcatgggaaactacgcctcatgtactctctcaggccctggtgggaggcacatatgcaaagctgccaaagtaatcttccccggcggcgaaatccgacgcttcgacggtccagtaaaggccgcggagctaatgcttgagacgccaagcttcttcgtcgtcaatgtgcgctccatgcagctaggcaagcggttttcgccgctcaatgccgacgaagacctcgagctggctagcgtctacatcatgtttcccatgaagagagtcaattctgccgtcaccgccgcggacatgggagctattttcctcgctgctaactctgttgccagcaagcgccgtggcggcggaggtggaagtggccggaagaatactagggttttgccgtcggaggagtcctccggtgagaactggccgagatatgagaaggaggaggaagaggaggaacgggttgcggtggcacccaggccgaagttgaatttggatgatatagaggatttctctgcgccggagttcctgcatagggtatccctgagtaggtctaagaagccattgttggagactatagctgaagaaccagttttttcaagataatgatcaattagtaaaaacctcgttttttcttttctttctaattttaatttccatttcatatcttactacactttgtagtaaataactaactaatttaagtgtacattaatatatgcataaattatatacatatctttat

SEQ ID NO: 114405 - DNA, 1909 bp, Cannabis sativa
  modified_base (38)..(50): a, c, t, g, unknown or other
catatttagggtgttaaaaaacatacttgtgagtagannnnnnnnnnnnntaaaataatttccaacacattctttaatgtattgcgaggaaacaagcagtttgaatggacagagaaatgcaagaaagcatttcaagaaattaaagaacacttgttaaccccgccagtgctttgaaaaccaataacttgtgagatcatgtatttatatttttctctttcagaaaatgcaataaacgcaacattagtgcaagaaaaaggaaaagacaaattgttagtttactacgttagtgagcatttaataggggaagaatcaagatatcatccacttgaaaaacaagcactatgtctaattcacgcctcgagaaagatgagaccctacttttaagcacaccttatccatgtattgaccaatcatccactaaggcgggttttgtctaaaccaaatgcctcaggtcaattaataaaatggttaataaaattggggcaatttgacacaacttattaccctgagtagccatcaaagggcaggcattgtcaaatttttagttgaaggaatagatgataacaaagacatagaggtaatcccaaaccaaagaatctggaagttgtttatcgacgacttgtcaaatgatcaatggctcaaaggcaggcatagtccttgtctcaccagaaggtttcaagtttcattatgtcataaaatttcattttgtagcttcaaacaacgaggctaaatatgaagcacttttagcaggtttaagaatggcggaagtatagtaaatgctaaatcaatacattactttagtaatttctaattaatagtgaatcaagtacatggagaataccaaggtcatcatgcgaagctgtgttggtattctaagaccatattacaaataattgtacatctatagatgctgatttattatgagaaaatgtaaatttttatgaataaaattttagtcattttatttatgtcaagtaatcataacgcatattttaaaattacttgggagacataagtatatccaccaaatttaagataaagtgaaattataaaaaaaaaaatgcaaaatatacgatattcgattaaagttggtccaaaacaatagaaaatcaaatgttgaaatctcgctataggcaagaataaaaataacacttgttgtaaaaacaagattatcaaaaatcttgaaaacaacatcgagctaaatgcgagcttataaattaataacggcttgcatataaaacagatattatgaacaagatcctatactgaatcttgataaataatacacaagctaaggtgcgaatacatgattaattactcccacatacttgatcaaatttttttaacaacaatcaagaaattagttatttaaaaaaaaacatttaagttcaccttttacttgatgaaattagttatttttattgctctatgtggacgatatcctcatcatgagcaaagaaaaaatcgtgatcaaaagtattaaaacaaagcttaagagagaatttgagatgaaggagcttggatcagttcaaaagatacttggaggctgttttggctttacaatttaaaaaatgttttctgttttttaaaactgaaaacagtttttaaaaactattaggagtcgtttggaaaaaaaatttaaaaactgttttttaaaaattgagttttaaaaaattagaaaacagaaaacatcaaaatgttattttcaattttcaaaaacaatttttttgtctaacatattatattttatattttgctcgcatactcgaatcctagacccgaaaccataccccaacctatacccggatgggttaatgtcatggtatggtgctaaaatattgatttttttttcgtaagaaaaatctaaaaatagtttttaaaaatttgtgtcaaacaccattaaattttt

SEQ ID NO: 114406 - DNA, 3497 bp, Cannabis sativa
  modified_base (1630)..(1631): a, c, t, g, unknown or other
  modified_base (1841)..(1846): a, c, t, g, unknown or other
taacaaatatatattatatataaaaggatataaaaaaatgggcctttttaattttggggccttgtgcaatggcccaagctgctcaatgcttgggccagccctggtgccaccctgtttagctaactggttgcgagcgacgactgggtgcaatggtgcacaatagtgcaccgaaacaccccatttaatcccaaaacccaaatttcatctcaaaaaatttccaaacttaatttattatgtaatttttaaccaaatcatcttccaatatttttaaccataaaattaacataacaaaaatattttacaaaaaaaaaaagacataataaaaatattttatcaaagaaacatgtataaagattacaaaaaaaaaaaatcatattgcatacaactaacatgaaaaccatccaaattacaaataaacatataattttgttttaacatgttaatccacgagaaataaatattatcaatgctctgaggccaattgttaaaaaacatatctacagaatcttattatttttcatataaattattatttaacataaataataattttctataacatgctttttaaaatcatgaaattgatactatgtttgaatatacttacaacataatttttttcattccattcagtattctaacccttggatggtaccaaagtattatcaagtactaaattcatttcttcaataacttgaatttgtaactaatttcatcacaatctttcacagtgaccaaggtatcaaatagaatagtgtgggttattcttcaatgccttatttaaaaaataatagaagaagaataaagttatagtggcggctaggaagagcaaaggagagaactttgtcttttctgataagaaactcagacttaaaagcttagcttaaaattctctcttcctcctttttcttaagtaggcaaaccattaagtattagggtaaagctttattttccaccatttaattaactaaaataaaaaggaattttaacttaagcaccaagtaatcttggttgggttttgaatttcgctcttcaatttctttaagcccaatgaacctaaatttactttacctttttaattttactataattaattaaatctcttatatttaaatacttgttttattctaataattataaataattatttttaataaacataagtaaatatttttattaatttgataataaaatgtcataattaataaaatgcctttttatttttcttctcttctttgttttcaccaaacatagtaaaaccatttaaaattgaataagtcaatattgtgaattctaattgattaaataaattaattattgagaattactatttgatattttccccgtatactgacgggactatgggcccatgaaattagtaggggtgtgcaaaaagtcatccaatccaattacaactgaccgatctaatcccaatcaatccaatagaatcagatatctaatcataattggattggatcagatgtaaattttgaaagtctaatcagattggatcggttgctgaatgggacattcgatctaatggacagcaaaactgaaccgattcaattatcatccaatagtaatctaaatatatttatatatttataaaatacatttataattttatatnnttaatatattttatttaaaaaatacattaattgatttatatatatttaacacatgagattaaaaaaaaatcttaaatctaaaatattagttctcatttttcctaaacgctaataaaattatcaatgcgtattgaataaattttattttttggcagttttattatgggatcatgagaattaggttatgggatcatgagaattaggttggannnnnntaatgtttattatgtatgttggattattaggttttaaaattatgtttcttttatataattttcttttttaaatcaacttaaatggtagctaaaatagattggatggatccaatctaatccaatagaaaactagttaatacatccaatgattggaaccgatccaatccaatacatctattggatcggatcggaaaggatgactcaattcgattgaattagatcggatgataaaatttaatatccaataaataatttgattggatcggttggatcaaaatttattgaatgtgatctaatgaacacccctaaaatgtaggctcccaaataagtaaatatgaaatttaacaaatgaattttctaactttatgaatttttcatgactctactgtagacttagaatttcacagaacgcactatatacataatatatatgaattatctattattttaatcaatgatcctctataaatggtttacaatgagtagggactaaaattaccattttaccctatcaatgtattttatccttaaaatacttaggtgatatttgattgagaaaaataaaaatataggaatagaaatgagaataggaataagaataaaaatggaatgaaacaaaatttaaaatgtattaaaataaataaataaatcattaattttttctcatgttacattagaatggtctttctttctatttcaaaatggaatagtcattccaccaaaaatagtggaagggaattctattggaataacattctaatacttcaaaatacaactaaacaaatgaatggaataaaaattatttccttttcattcaattccatttcattacctccaaccaaacgctaccttagttattataaattatatttcagtaaactaatattagtactgaaatgagatctcaaccatttatcccctttaaccaagctgaaagaaaaccaccattttacttctaacaagtagaacttacaaatattcatatctatgattaatactctcactcaattatactacttagttcccaagatgtaagtgttggctaaacctattaatttttagggtttatgtcatgaaaagcctgtaaagacatttttgattagaaatataaactaaaaattttcatatatgcttgagtgttaaattattaataattaatattggttaatttatatataaatatcaaaaaaattcttatccatacatgaggttgtgacttgtattgtacggaaaattaagaacgcttaaccatgaataaaacagttagtaacgtattaaagtttaggaatctttaatcaatgattgcaaatatggttcattgatgcctattattaggtgcaagtaatctcgatttaaattactgatgtagtaagacatctaaatgaaggtgttgtatataattgaaattatatatgacaatgatcgatatgaataaagttgtctttatcaaacttatcgtttactacaaagacctaattcatatcatgaatatgattaatggtagatcggcctaaatcttgagcaatcatgaactcttgttcatactattaatttctttgattcactcgttaaagttttctagagaagatgattcttataacttctattttgagaatctaataatgtagatggctggaaacatgatctacaa

SEQ ID NO: 114407 - DNA, 2086 bp, Cannabis sativa
ttttatcaagaagatgagatgcagatgcatcacctggtggactgcaaaactggaattaattcctgcaccgtttatctctttgccctggacataaagcctcctcacggaaggacccattcccttgggacacacagcaattacgctaatgttcttggggaaatccagcccaaccgactgcaaatggcccaaaagaaaaccatgggaaagaccaaggatgctgtttggcttcatgtgcgagaaaattttctcaaagttatcagcctgtatcatataatcatagcagataccacccgtcaaacaagattagttatgataaggaaaaaccatctgctaaaaaacaatcaattaattcaccaagaaacataatttaaccaaatacttcaattagcttggtcaagttaacaaacctgtgcagaatcagaaatgagtagcataacaagatcactgcttgagattgtttcataaatatcacccagagtcccactctcctcagtgaaaccagctgcacgagcttcagcaaaagagcgagatcccttcctcaacccaatctatcaaacaaagagcaaaacatcagtacagtcgaaaatgagttgaatagccgaagcatgagtaaacacagcaaacaaagagaaaaaaaagtttaccttcaccacaatatcagactttgcctcagtaagagagtctctcaaattctgagcttgagcaggtccctgaacaaatagtagtacttccaaattaaaatatgaatctctttacgtatctacaaattcttacgatcaattacgcttaagagaatgaatatatatttatattaatatatgtacaagtcgtttttccttcagaagcacatatcattattcaacaaaatgaatgacatgcaacgcaagtttatagggataacaaaagagcctccatttctcaatcacataacaatgctttataagaacttgtagatcaatcagaacatgagtaaccaaaacagttaatcgaaatgctaactcatgaaacatgtattcagtcgattcaaaatgaaaagtaatacacaaaatgtgagaaattacctgtgaaccccaaccaattacaccaatctgcttgatgcccttaaaagcatcaggcaataaatggaacaaatctcttcctccttttacaatatactgcaacaaaaaaatcaagaaaccacgttaacaaatatattgaaaaaataaaaacattaacaataaaaagaatagttagtgttttacacaaataaaaagacacagtcaagttttaaacatttcagtacttctatgtaagctagcccaagttatcgtacagatatggtatcatgttgcatgtaaatatatttatagttaaaaagggtttgtttttctttatcagaaaacggaatggttcaacaaaatattctttcctctccaaaacccatttccaaaaatccacagaaaaactaaaaaaaatcaattccaaaagacaagattaacgagttcataagctgaacaagagggggaaagagtgacctcttcgtgaccagcgaggttgaccttctccttcttgaaaacagaggtatcaaaatcgagagagatcggagacttgatcgcgggcgcagagaccatgcgagctccaagagctgagccggtagcgacattatcagcacgagaggctgcagtcttgagagacctgagagatttgcaggcgacggacacgaagccaagagatttgggaatgagatggttttgggtagaaggagaggaggatggagcagagatggctggagagaaggaagatgtagccgccgccgccattgatgacagtagcagagtaaaatgaagagagtgttagagagagagaagagtaagggttttgtggcagacagagagcgtctcacctcaacaacagttctctttatattttgcagggccacacacactcgaaagtaatgttaaaataataaaaaagacaatttttattaaatattattcatttttctatttttctctccaaatttttaagggttttttcttactctccaaatttttaagggttttttcttactctccaaatttttagggtttatccaatattttttttt

SEQ ID NO: 114408 - DNA, 4145 bp, Cannabis sativa
  modified_base (432)..(436): a, c, t, g, unknown or other
atatatagcatgctaataaaattatatgtcacgtcaataaaagtacaatagaaaatagaacttaaatattatttttaaaaaaatgatataccatataacaacaaatgcatatataattcaccaacatatatatactgctaataataaaaaaaatatatatatatattactaatttatatatatatatatcatatactaactaaattatataccacaattaaaatatatataccatgacaataaaattatataccaccattgtatataataaaatagaaactaagtaaatattatttaaaataaaatatatcatacaattaaaatatattaaaataataattaaatatatgtagcatgccaataaaattatatgcatacattaaaatatttgtattatgctatatataatacatagcaaaataaaaaataaannnnntctaagaataataatatatcatacaacaaaatagaaatatattgtacaacaaaatctatataccaataacccacaacaacccataaaaattttaaaaaaattgatataactttaaaataaattttttttaacaaaactaatatgcatataccataatctttaagtaatttgcttctaattctaaaaaaatatgaaaaaaaattattgatttttttatgtggcaaaaaataatataaataataaatagtgtaaaatgaatatttctctgcaagttttgaaatgaggatatttacttacatagtgttatgatttgggctcatttgttataattttccttaagtaaattgtcacgtagtaattcttgattagttcaggtcattaaatttttatttttttaaaaaaaaagatagattaaatataccaataagaaaatacacgtggataatgtatttgcacctcatcgcgccacatcaaaagcaaaccacatctcaaccccactctgtcaacagtctagaggttctcaaaatgcaacacactactcaccctctcaccttgagtacgcgtcaatttactctccgttagaaaaataatgctcggtccgacatctcaaacatgggattgtaatgcccgtaatatccagggattcttaaatccctggacattcaagctaaccattttcattgtgctcgacggccttgaatcctaaggctcgccgcttaattagtttcagaaagagatgagaaatctatattagtagaaatactcacctcaaaattggtattttttcctgactccattttctccattgcatccgtaactccaaacaacatttcaccttcttctagtggccttaaagttccatctaccccccattataattttccttccttcgtccctttgaccactcgcaacgtgagaccccaaaaactcgttcttggccacatttcttactttatttttaatcgagattttcttcctctgcttttgcttagccaactcccctggtgatttcgcaacattagctccctgtgcaaagtttccaagctcttcatgaatctcacaacccagaaaaatggctttacttttattaatattgcacttacccctctcatctccttcactcctccaattatcataatttttccttttttcagatgccctccacttagatcgtcttcaactacctgcttggtcaactctcgaccttcaccaatgcctcgagattccttcttattatcagtaatgagaaacccatctttgtaacttagagaagaaccaattgttgaatttgtgttgcccagttgtggagaggagtctcccttttgcagcccatttaaatgatcattgggttgtctactattatcccatgtttgtattttgaatggttgggcccccatccttaagcccaattctcacctaacccataatatctttaatccccacatgatcacccttatgcccactaccttatgccacatcatcaaaactcccatgttcaataactgtttcatccccaacttccccttgtttttctgcttcttgccggactatctcctgccagttactgttacctgatgcttctctcattacctccacctctacttcacttctttctccacatccagtcatgaattccacccttcttgcttttgtcctacttctcactagaaacactgcatacgcttcaaaacatgttggggtaggatcgtcttccttcagccaaacaccatatttcgacacccctattccatctctccctcgttccattaactgcattttctcacaatccttttgttcatatccccaccatccataattgaagcataacataggtaaacgatcaaactttagatgaacccaatgttcctcaccgactatcttgataaatttacccacaaatatacttgtatcaactagaaaagctattcttgcatgaacatatccattgaacatcacctgctgaggactactctatcagatatctcccaccacccttgtcattttttccgtccgctggacattagctaaagtaaaggattttatcaaaaatccccaaattctaacccaacaacgtacagtctctagattaacatatttccactatcccgtggttaactagtcttctactatcaacaaaccacccccatacaaccaaggctgcttatcaagaatcattctagcatctttatgattcttaaacgatagtttataaatgtatgatccccctatttctccaaaaattttactttccaattcaataccaatttccacatacgcccaaagacagtcttcaaaaagtttccattaacggaccgccttgaaatcactcttccaattaaagacttttcaataaattgtattgattcctcctcattaacctcccaatcttcttcggtctacatagttatattatttgctctatttacaatatcctctattacttgcccagtatctatgaacaccattaaaccaagccacaagatcctaaccttacgaaagagtccttcagaccatataagtctacaaggtcactctaaccatttatttttttataatttttaactatcgggtatttaatatctaggttatttaaatatatatatataatattatttataaatttctaataagtaaaatgatataatattataataaattttatttttctaagttatgatttataaataataaattatatcataaaataactaatttataaatttgaaattattatatttaggatatgtatgaaaatatttaggttaattttaaatttattattatttaatttatatataagataattttaatataatatttcaaattaaaaaggataataatatctttcaatttaaaatatatctaatattaaaatatctaatcttattattaaataatttgaaagttttaaaaaattaacaatttttaaaaatctcaccataatttaaatataaagtaaccaagttttaaatttaaacttcaaactatcaaaaaaaaaaaataataacctattaaaataattaaaaatataattaattttaaaatttgatatttagattcaaatattaaaattaatattttatattaatattttggattttaaaatggaaaaattcaaaatttggtgaaaaaatcaccaaaaattgattttttggggtgaaaaattttcacccctcaccgagaaacaagctgcacgtagccatcgtacgcgcgcagaggagggacctgcagggtccctgaccgagaatcctcagcgccttgtagggtcctgggtgaggatcgtgtttaaactaggcgagtgatcgagctttagacaaaagttgtttgaattccgcacacgtaaggcctccttgtctgaggtctggtgcggatggagcaccatgctcgacacccaatggaccaaaaatttcaaatcctcatatctcactcatttttaatcataatcgagttccgtaaaaatcaaacttgcttaatttttcacaagaaatccaaataacttatttccagaatgagaataaaattatttttcaaagaaaatttttaatttacaaatattcatcaattaagtacataaactaacatgaacacatctaaatctcaaaattatcgtttttaatccatatttcatgaaagtaaattattaccatggctctgatactagttattggaaattattttaccaggatctagatttactaatgtgtatgtt

SEQ ID NO: 114409 - DNA, 5450 bp, Cannabis sativa
  modified_base (32)..(58): a, c, t, g, unknown or other
  modified_base (5402)..(5410): a, c, t, g, unknown or other
ttccgatctatttagggtgttaataaacatannnnnnnnnnnnnnnnnnnnnnnnnnnaaataatttccaacaattacttgtgaaaaattcttgcaaggtaagtcaatcttcccttctctgactgacatgttgatggtctggccagattcttcctagaagaccttctacaaaccactaatatcaacatcacatgggatctgccaggcacacttcttcccaaaaatcccttgtcatgttaaaggccagcatgactatgccacatgcaagtgccacgtcagatgtgaaaactttgggataacaaatgggtttcttcaaaaagggttttttcacaggaggagatggagaagacgatgaatgcgtgatagccatttatatagaaatttatagaaggaaaaaaaaaaactaaaagaaattgttggatgatgaagaaatgaagcaaggattgaagctgagaatcgtgagggaaatttcttggcgagaaacagagttttgattgtggtttcaaaatgaagactgaaattgaaaggaaaaaaaaaaagaaaaaggaaatgggagaaaaaggtttgggtgtgatgattacatagtgacatcatcatgtatgtatgaggtatgaacaagaaataatttagtaattatttttttaaaaataaaaatgtttaaaataccatgtaaaggtatgtttaaaataaatattattttccaaggccattttcttcctgtaacagccgaagcaatgggaattcgtgaggctctaagttgggtcaaggcgagacaatggatgaatgtaatacttgaaaccaattgcctcacagtaattcaagccttacgaagcccaattaacatggtttccatgtttggtcaaaattgttaaagcttgtaaggagatgtttaaagatctaaaaaatgttgttatttattttgttagacgatcagctaatatggtggctcataactttgttagagcctctatattatatcctgattgcagtttcagtttagagtttgtcccaactaattttttacctagtttagtaacagagatggtgatttaataaagttattatttccattcaaaaaaaataaatattattttatgtttttttatgtaaaaattacattaaattattattagccaaaatagatatattaattaattattaataattaataattaattttcgtaatactttatttttcactatattacttgtttcaatttcaattacgtatacgaatttttcacaacataaaccatcaatacatttacatattaagatgaaaattgagactttaattagtctaaaaagaaaaccagttccctgttcttttattttatttagttgaccataataataaaattattataatatttaatgttaaaactcacacttgaaaggagtaaagattggcaagtctaacttttggaggaccattcacttgtaaccttctctccccaaactacaaactatcatatgaattatttttatatgaatgatcattaatctttcaatatatattgaatttggtacctaactatatataattatatatatatattattatatatgatagggtgaattattgttgcctctttttgaaattttgacattactttagaaaaactagcattattttagtagattctctccaaaagaaattccacccaacctataattataactattactaatactattactatatatgaatataatcaagacaatgatcaagtgagaattggccatggtaggactaggagatatacatttatattataataattataattgtaacaaccaacgatgttaattgaactatactgtactagtgatctagacatttttaattggaattttatataattagtggcaactaaagaaatattattaggtttttgtttggttggttatatatgaaatgaaaagtaatgacatataaaaagtagaaggaataatatctagtctttggtgtgtgaaagttatggtgtaataattagaattgtgtttggaaagttactctgtaatttaatttgtatgtaattggagatagttacataatttagcatatttgtttataggtaattgaggagttctaattctcatggctctcatgagaattgagtataattatactgtataattactaatttaaatagtatttttctgtataattatactaactattttgctaaatcaaatattaagaattcatatataattaatatctcatatccaaacacatatttattttaaaatatagtgtaattattaaattatatatatcatcttaataattacactgttacttccgaacatactcttaattatttgaaaattataatattttgcaattatatcgaattcttataaggttatgtgaattaatgaatgtaaatgagactcttcaattaattttttttttttgtaacagtaaattttttaagttagatcaaataaatgtcattacacaaaagatgaagagattttttccatctaataactgtctatcctaagagcatgctttgccaacttttgtgccacaacattaatgttgcgactgctataagaaatttcgtgcatgaaaataatttgaaaaatcaatgaaatctaaaaatttaccttaagaagatatatgaacccgaaatttttctttgaaattaaagttcatattttacgtattttagatgtcaaaattttacatggatttcttaattttttttatttaaattatttttgaattgaaaacacgaaatttgatcgtcggaattgtatttttcgagtgggttcggggtcgcgtcagcatgacccgtatttttgtgaaacaaatcttctttggttctctcttttttgccttctttggagggttacttcggtggaaatctctgtactttttaccttttggggttttttgagtactactcatgtcgaaaatctttggttcaccagtaagtgctcaattgctacatctatttatgatttatttcatatttttggcttagtttcttctgattataaccacatgttattgttttggggtgtttagatgatatttaatgggttggattttattttatttgtagatgattctagaaagaaattttgactgttaatttttaaaatattgctatttgtaggtttaatagttcatgaatgtttggtggctaagaatattattactttgtttgatgaggtgggatttgatatttttattggattttgttataaatttttaggtttgaacttcaatctaattaatgttaaaatttaaaaataattttgtctgattttttactagctgctaatcgtaactggtttctctatgtctaatttttgtgcattaatttttaatttattcactttacgtaactagtttttatgttttgctataacgggattgtttcattctttgtagtgttttgtctactttttattttaagtttgtcttattattttttatatggtcaaagttggttttacagtttttgttatgattttgtatgagtttacaagttttgttatgatttcataggtttcattataattttgttatgattttttcatagggtcgaaattagtttcatggttcataggtacgaaactggtttctcaagttttaagggtttttgtaatgtggttgctctatttttagatgttattgtatattaatttttattttaagtttctttttattatttgtttctaggttcgaaactgattttcactcttatattttggttttagattattgttggacattgtgtattgttttgattatatttgtgcgtattttttgtgtatgctttttttttccatttagttgattaatgaaacttgtttaagttatcttcattatatattatttatgttttgttttcataattttcattgttgttgtatgacaaaattggttttttgtttgatttcataatgttcattgttgttgtatgataaactgattttgattttttttttgtgcagatggaatctgattcctctaataaaaatacaatgaaagatgttgttaaagattttaagtgctgactctgagaagaaacttcatccagttaaaattaaaattcgtaagaaggttatcaagaagaagaaaaaaaataaatctggtccaagttctaaggattcatctttgaaatatgttattatttttttaatttatcttctcataattttatatgtttatttgtaatttttgaaattagtttcttttgtaagtgtcttatgcttgttcaatttcttagtttgttgtattaaataacgggttttcgtgtttaattgttagtttgttgtgtttaatgtaattgaggtttaagtttttttatttttttttttattttaagaaactagttttactatgtcaaatttttatactagctgataaatgtaactagtttctgtggtcagattctaacgtctaactctggtgacgactccggcgtcaaactccagtgactaggataactctgaagacttttttgataatttttctggcgacaatgtcaattctggtgacttccagtaccaacatgctccaacgactttttcgatactgacatttattttcaactttttcaatgcctgagaactccggtgactttctaagcgccgatggaaactctgatgatcatcgttctttcatttgtttctaatttatttaaaaaaaaatatggaaaaaataattttaatattttttataataatacaaatagcatatcccatacatattaaatttttattttaaatgttatattttatcttattaaatttctttatcatatttgtataaattagcttttctttttccatattcatataaatagccttctaattaacggttcaaaaactacaaatgtataaatctttgtggtgaagtatataaaatacataatgaatattccaaatattaaattattttgcttaatatatataacatgtgttctttatgcttgatttaaagagaaaagcatactctaaaatgaaatagagtttcgtatctcaaaagtaagattttgatatgacaaagatatttctcacacgaaccctcgtgcatgtgtaaataatttctagattcacctttttttttttttaaagttgataaaagtttcaaaagagcaaatcaaaatttataaatatgaaaacaacattaaaaataatattaaaaaaaaggttttgcttgatgtcattatgtttataattttttttttggatcatttagaaaaaagacaattaattattattataaaaataaaaaaattgtgactaattataaatcatcattcttataccgtgattaaaaggtttgtgactaaaagtattagtcaaaaaaatcacaatttattctaaatgtgttttcagttacaatacttgttatgactaaaattaaattagtnnnnnnnnntatctaaatactatgttttaatcataagtaattttttgtt

SEQ ID NO: 114410 - DNA, 4902 bp, Cannabis sativa
  modified_base (433)..(443): a, c, t, g, unknown or other
  modified_base (751)..(752): a, c, t, g, unknown or other
  modified_base (1323)..(1326): a, c, t, g, unknown or other
caagagagcaaatagagtccaccgaacgagaattcagacgagtttcgagaggtgatcttgagagagaggttcagagaaaatagagagattggatttgagttttgtatgaagaatcttctatagataaagaaaattcttaggtaagagtgtgagagataaacaattttagagaattcatcagagaatcaatctcgactgtattgtaccctgttcttgctcaaataataaagaagattttggtggagttccaaaactagagtagagccataaatcacatcgatctataggacttgaactagtatatatctcggtgttgtttttttattgttttactgctttatcgttttggttttaatattctgttcatccatgtttaaatcttcaattattgtgtgtgttagagagtcccacattgataatgtgttgaaactannnnnnnnnnnataagatgcatgagctactcctctcattgccaattgattttgaaatggaaccccatgcaccttaccatacactcacctattctactaccttgaccatacacttccgcattctaacatgctatcagagccaaactaattctaacaagtaatcgatccagtctaaaaagacgagccaaaaagagctgcatgtgattcgaagatactgagccgctgtgagccaaaagagccgtcgtgcaagattggtgatcaaaaaaaacaaatagccaccatcttcagggagaatgttagagagtctcacattgataatnngttgaaactaaataccatatataagatgcatgggttactcctctcattgttaattggttttgagatggaatctcatgcaccttatcatacactcacctattctactaccttgaccatacactttcgcattgtgtgaattattaatcttatcatcactatttatttattgattaaatttttagttgatttaattgtgcactttagttataattttcccacatacatacacatttttttggtactagaacactacaaacacttatgtgttattactttttaactaagttcatcacaattatatataaattaacataaacagggcaaaagatacaaaccaaacatttgacctttaataactaattcacactaaaacaaggggcatataagaccataaccaaggtctattatttcccatttcttttaattcctaattaattagctaatcacactactcaaattgccaattatcatctactataggcccttgaggagaagtagaattatcactacaaccaatagtactaacaacaacactattggtttgactagtcttattattattattattatnnnnattattattattattattcatctcttcatcatcacattccaatttctctcctttaagtaatttgagaaattcactaagagctaaatcagcatcctcatacttcaaaaactcctcagcaacttgggctggagtgacttgtttttcaccaagcaacactttgatgtgttcatagaattggtggtcaccaatgactcccaagtaatttgaggctaattgtttaaatgcctcataagtacaatagcccatgtaaataggcatgtccattcgaccaggtctcaacagagctgggtcaagcctgtccttgtggtttgtggtgcatatgatgatcctttcatctccacaacttgaccataatccatctatgaagtttaacaatccagataatgtcaactgcattgattgaaaaaaaaaagttaattcatttggtgttatagaaaaatattaattcaacaactttctgtttaatttctcctcaagtcaaattctcaaaagaaaaagtaggaaagaaaaaagaatttaagaaattgtgattgtggatctactactttacacatagaccaatttctttatgcaaatctaagagctagttttaaataggtttatttgtggggcaaatctttaaactctaagttggtccttcatttttcttttaagttagtctacaaactttatatataaaattcatggatgcaaatattataattttctaaatattgaagagatgtctactataattaaaatttagtaccaaaaaaatatttttgttttaaaagtaatcatatcttttagtagtttttaaaaataccatatttttttaataaaaggtccaacaatttttattctttccccaagtccactcaatcttaaagctaaaggaaaattcttatttttatagattttagagtataagtttgtaaaaatatagtttttttcaaaaaaaaaaaaattattttatgggaaaaaaaaagttaagaaaatatggaaagaaacggtaaggtatctggttacccactagtaattggttatatctctagttactataagagtacctggttactatacttgagtttctcatattttttaactttttctttaattttctcataatatttttctcataatatatatatatatttttttttaaaaaaaaagaaagccatattattagacaaaaaagtataaaccccataaattttataatttcttctattataaaaagtctccaactgttaaaaaaacaaacaaaaataaagtactaaaataagagaagtgagtagaataactagagttttttgttgtggtaatttgactgtgaaatgaattgtttagtggggaaaggttggtggtggggctaatttggtgcttttttccttttaatgaaatgagaagtgatgataatccatgttaggcacttatggttttttatggccaaccagattccaaggcacccaaattttttgtcctaattggtaaagtgtgatgaaaaaaaaaaaaccaactttactattataggagtgaagagacaaaaactgtgcacatagctcactactcaactcaactccacaaaggccacttatatgaaagaaaattaagattacccaaatcaaagagataaaaaaaaaataaaaaaaaagaacattttttttccatcacaaattataggagcacaagttaattaataaaacaaacaacattatattaatggcctaaggatctaagaagcatttgacaaaataataaaaataggccttttgaagagtgtttttgtggttcttttatttcttttcttttaaaaaaaatatacacatataatatcaaaattttgaaattgtttttcttttttcaataaaattttaaacttttttgtaatatttttttttggcaaaattttgacatcttaggccatgtcagctgcctcaccctctaacaggcacatctagcatatcacaactatgctaaaaggtaccaatcaattagcattactgtaatttgtaatctgtcgtattactattagtataatttaatataaaatataaaaaatcaatattcagtggtgccaaatagtattagtgcctaataataatgttatttcgaaacaaaaagttgaagacttaccgatgggccaggattcttgtcattttggtcaccacatttgttgtcaccatctttttctcctccacctccattgagacgattaggaagatcaacactacaatcaatgtcttcaatgagaagtatagacctattagccgttgtaagaagcaaccttctaagatcacagtcacgctgtacattaccaagttgcaaatcataaatatcaaacttaagatgattagccatggcagcaaccaagctcgatttacccgtcccgggcggtccaaacaacaagtacccacgtttccatgctctcccaactttcttataaaaagcttttctcttcacaaacctattaagatcctcaatgatatcactcttcttttttgggtccatagccaaagtatcaaaagttgcagggtgttctaaattaatcgattcccatctcattcccgggtcgaaagtgttactcaaagtatgcatcttcaacacccttttctcatctctcatgattttggcttttttcaaaatgaaaggaatataagagttcaaaatcaaatctctatgcttgttgtgaaaactcaactcatagaatcttttctcagagctttgagaaccaaatctgtggccagagttgttattcacttgttctgataacacaaacttccaatgaagctcaattccttcgaaaaagtcctttagcttttccccattttcaagcctaatggttaggcctttctctttagtactctttcgaacattaagccttcgggttttcgggctacgaagggtgtctaagtaaaccccggccgcgtcgtagacttggttgcccgagtaatctcggccgccatcgaaaaccaaggtgagattttggtcatttgctctgaacaatctttgagccaatgagattaggtagtcacgaacttgtttaggcaagaattggtttagtagtgactgaaacaacattatggaggctgtgattgaagtaaaggctgtgaaaagtgaggatagagatgggaattcgattatgggaaacatgattaatttttagctcttaactaagttcagagtttgagatttttgaaagagaaaatattgaaaaaacggaggaatttgagagagtattttgataacactaaggaaaagtgttatggtttaatgctatatatatataacaagagtcgagacttttggggcgtgacagaataggctgtgaaactcatatatagcattaaacaaatcactttattgcgtgttgagtttctcttcttttgttaactttagatccattaaatcgaaagtgggtttttttatttttatctttttgttatatgctatagtggtgatatgctctacttcttcgtatatatatataatatattttagagaattactccagtttttttaactttttttttttttttttattttccgtttttcaatttttttttttttttttaaacccttttttttttttttttt

SEQ ID NO: 114411 - DNA, 2485 bp, Cannabis sativa
gtacaaaattctgttattaaaggtatctataaatatatatagaaaatttaatgagcaaaatgtacaaacctagctgtcttctgcagatagtgagctgcatattaagctggttgagaatgtaatggattttttgagcataaggggacaaatcatgaggcctatccggtctgttcaaaatcacaataatgaaaagcaaaaaatgtttaaacttggcaaaagtaaggagtgattaactaatgtagaattggtgttgatctgtttttgagctacttactcatcactgatgagaatagaaaccttagtagcacaagctgtaatagtaagaatagaccaataaacgtcgacaggcaaatggtccaaagcagtagtcaagccagggatgtctttatggtcataaacagagagcttctcaaactcatcaaagattgctatgactcgcatagtggttttgatgagattgctaagctcaagaatagcttggcggcgttttggaagctcagatggcttgatgagagtaggcactcttttgagaatggccaattgtttggccaaaggatcggactggtatagctgagccaaaagccagaaatctccaaattctaaggccaaagcagccagtgccaacactgcctttgcttcccatgaatagtttgatagcttgttcagaatcgacagtgttgttttatgggctgttgcctctcccggagccttgcaacacagctggaaatccacacaatactattatagtctgttattcaaagaaatatatatgtgaacatatggatgtatgaatatacctcgctattgatcgacttgagggtgcataagggaacattgaagttagcttttgcaggggctctgtcttctatgttctccagatgaacttggcttccctgcaaaaccaaccaaaaaagaaaaaataataaataaatataataaaataaaaacattttacttttcacataattagttttaatatataatatatccagctttctcgatttggcacataaatattaagttatttgttactttaaaaattataaattagattttctaaacaatatatacacctgaacaagtttttcaatggactgagttgcacgagtgagaatattttcgacgatgacaaaaagtgagtcttcgtcgaatgtgtcatcggcgtggacatgagtagcgtagataaggtcagtaatcttcttatcggacatggagaacaagctgacctcgccttcgatgcgttgttgctcacctgaaacgacaatccccactttggaaacgacattttgagctaggctcaacattttcaagatcaaaacagagagatctagtgtgtgtttgtgtgtgttgagtaattagagaagctagcaaacaataatttaaggtatatatatataaactagagagatggctaaggcattaaacaacccttgatgagttggttttgtatttaagaagagagtgcacatgcatatttatagccttgaattggcctctttctcactgttatgcaatttcttcttaattatcttttactgttgaaatttgtggtggaaatatttacatcgcaaaaggaaatttattaaaaggaaaagaaaaacaagtatattgaaaagaaagataaaaaatcgagagttcttgaacgtgtagtgtgggccaatccttccactgcaatttttatgtggttacatgaccgatttaaaaaagaaaaaattatatgttgctttatgcaaattactcaggtgtaggggagagagagtagggttttattttctttattttttttctgtaaaagttttattgggttatctcatcaatgggaaagagagtgagaaaaagaaaaaagaaaagtagttacgagcttatttattattcctgttttcattctctttaactcccatcagaattcaaggtcttttgtagagtcaatttatttatttgtaaaaatacaaactaataaaacaaaaattaaaaaatacgatctaatagcattttaaatattgttaccatttttttattttatttaaaaaaaatactatctttttatgttttacatttattaattttttgtcatatgtatgttattttttgttattattttgatgttatttttatattacttttatttagttttcttattgttttcgtattgtttttataaaaaaaaaattataaaaatacaaaaatataatttttttttataaaaaagtaccttatatttttttgaatataaaaatacaaaattttataatctctttattttctttatatggtacctgagaaaagttaaaaaaatgagatgaaaagttacaatattaacttccctaaataataatacaaaaatatataaatactcttgtgaagaaatcgaaattaaagaatatgcggacccagcataagataaggggtaggaaggaatatgcaaattttaaaattttaggtcttacaaaaatagttatttttttttttctatttttacattttt

SEQ ID NO: 114412 - DNA, 2359 bp, Cannabis sativa
  modified_base (2304)..(2313): a, c, t, g, unknown or other
ccgcgacatgcaaaacccatgcaacagtacctgggttaaaaattctaaaaaataccaattttcaaccaactcgaacatgaccccaattacataccaaatcccaaccaaaacatgcatacaaccaaattcataactcacaaactaaagccaacaataacagtgagtcaaagcataaattcaagctctaaataacaccaatatatgtaatttgaccaagcttttcaagaatcactacaagcaacaagctttgaaccaaaaccaacataattcttccattacacaagcttgaacacaaagattttaaatcaacaagaaaagcccagaaaaatcagagtataaaatcaaaaattaaatacaattctcaaccctactactagctcaaacaacacaaaaatcactaaaaaacatgcttttctcaaccacatgcaacatcatcaagcaagaacatcaaacacaactaaagcaatcatttctaatatcaaaaattaatattataaaagaggaattagagtacacaagctccaactatgaaaattccacacaattcttcaccaattcaagctttaattacaattggttgagattttgaaaataaagatgagaaaagggagaaagaggttcggctaggctagcggaatccagaaaaattagctcctcaatttttaaaaattcattttgttgcaaatatgtttaaatggtcaaatgaccaaaatgcctctatggccaataaaaccacacatacacatatcaagggcaaaattatcataaatcacacacataataattttcaaattattcatttatcaaataaatgtcaacataaaatcccgaaaatatatttcgagcccggaatccggttcggtccaaaacacccgattgtgactataccgccccgacttgtcagaaaacacccgcaaatagactaaataaacatactatataataatatagtccataagcacgatatatcatataaattacgattttacccctctttggtcagaattatgaaaatgtccctggtacaccaacggggtcttaaaatacaatttattaatataattccatatattaaattatataataatataattccacattaatacataattaaactagttaaggttgctaattcgatttcctaatgttagggtattataaaaaccataatcataaaaactatatgcaaacttaaataatttctaatattctattgatagtaaataagattatattaaaattgatcttatttagagcataaaatcctaataatatcttcttttcgtttcaatctctcaatcgattcctctagagtgaagcatttcatatcaccattctttgaattccattcttgaatctccttctcaataatcgaatcattagtgtccgtctctgctattctcgcacttatcactgtatttccatcgcctaattcagtaagttcattagatttctctcctcgcccatcctcatcaccttcctattctaacagaaaatccatggcctccactccaagaatttcagccatggatttagcttttttaggaagatctaaagaggtaggccaaccttctttcttgttcttgttgatttgcatgaattcctcgaacaatccctcccgaccatggcaccagtgtagacattgtaagagaagccctaattgtaaccttagcatagttttttttttttttgaaaattatttatattttatatccccccaatgatataggcctatgacgaaattagtactttatatttttgaaatagtttaatttttatttaaagaatatttatgaaattttaaaatatttttttaaagaataatatatatgaattactaattaaaagttttatatttatggttttaatttttattttatactatatatttgtgtttttgtgttgttatctttatataaatattgtgcaatctttaaacttaaatttttcatgattctaaactcagtttttttttttttgttgagagatattaaaaaataccattagtatctggcacatccatcgatattatactgttattggtgtaattaagtatcggatctcatacaacttaagataataacttttaagaaatatctctaactaatcataacacgatacctataaagaatgttagatactactaatacctaataacaatcattttttttatcgtaccatacccaaaacttatactctttttttagccgtttttggatttggttaggaccgtgataagaagaattaattatatatatctttatatattaaaagtgcctttctaacggcaattcttggtttaannnnnnnnnntttaacgattctttttttattaagccttacacgattaacttaacag

SEQ ID NO: 114413 - DNA, 1560 bp, Cannabis sativa
aaaagaaattgtcaaaaacatttgactagaataagattcaaaattttctctaacaatcgtacaaatggcatatataaaatcaaagggttatatattctgtatttaaaatgacccttaattaattttgtccgaaccaaacttctaattaattttagtaaaataatatatacctatctaaaatttgtaaattgcaaatatgaaatttttataattagtaaaagttattttagttattagaaaacaaatgtagtaagaagtaataaattagagatgaaaataatgaggagaggaatgaggttgaccaaccttattaaccggtgcatagagttattaagagatcttatagttagtgatcgatgctaccttattgatagctccaattgtttgtagaccacataatttataatcacaacattctatatttagtcatattaatcacctatatatacatatgtaacacattgatgatgatcaattacaacacttaattattaaaattaattattacttatttatgagtgggaaagtaaaaataccaagactagtctccgtgaataataatgtattcacggttggattagtgatttttattattgtcattggtgtgaattttcaaattggcattattaatgctcaatttgagtttgagtttggacctgaaggaatttggagcgatgagagtgttgatggcactcttcacgcgcggctaccggcattttcggttgcatcctcatctcatgctgctgcagcaaccacattttgtgagccatgtgatcacaaagaggcatgtatggagagcattgagtctgttgtggccaataacaatgcaaaccccaaggattttctccaagcggctttacaatcaaccatcaaacaagtgagcactgcaagagatgtgtctggtggcatagcagcaaagtccattggctcaagaaagatcttcatggaagattgtaaggatttgcttggatttgctgtggatgagcttaagaattgcttttctaccgtgggatcgggtgatttgtatgccttgcatgacaaacgagttgatcttctcaattggttgagtgctgttatttcttaccaacacacttgtcttgatggcatatttgattcacaactcaagaaggagattttgttgagtggtctctctaatgctgacaagcttactagcaatgctttggcgattgtgtcatctatgtctacgatttatgatgcgtttaaaatccctgtcaaggttggtggtgggggtagagctcgtgcactgactggtttcggacaaggaagatttgagtttggtattggtaagcatggtgctactgctagttggagtaaaggtgtaggtggtggccttggtggcggtcttcatcatagttccagtggttatattagctttggtggtggaaaaggaggtcaaggtagtgggagtggtggtggtaatggtggtgtcggtgctggtggtgaatctagttctagtggtagtgttagcattggcggtggcagccgtggcagtgggagcggtagtggcagtggcagtggcagtggcagtggcagtggcag

SEQ ID NO: 114414 - DNA, 1373 bp, Cannabis sativa
  modified_base (26)..(37): a, c, t, g, unknown or other
tttatacattaaacataatcatgaannnnnnnnnnnnaaccatgcaacataaaagcgatttatggtgttatattaattagtaaatctgattatattaaataagttttatttagggcacaaaatccaacaacatttaccccttagtccctatgctgacgtctatacggataggaactttccaattcctgccttggtgtaaaaaaccttaacctggcaacaatgggtggcccaatatttgacctttcaaatatcccactttatgacataaagtgactttgttgccaatcattatgggaatttatattttggctacacacttttctatttttgaactattggtcttcttctcccatgaatggctatctttgtagaaaaataaccgcttaaatttttttggggaaaaaactacaaatactatacaaggttcaacttttcttcattttgatttccactctctctccccttcacactctctctgtaagaaagaagagaaagagaatcttcatttccttatcaaacttgacacccgtagctcatttgtttctcaaggttttcaaatttttttgacgatctgatgtttccctgagcatctacagcagtcttcatcagtggctaagtcttcatatctcactttgtttttgttttcttgaatctaccattgatgactttaagatttttcaagcttttttgaaatatttgattctcacgttgtagtgtagtcttttttacattataatccacatgattgctttaggacatataatgtatgagttcctgataaaaaagattagattttgatctccatttagattcttgactctttgagtcacgaagaacactattcaagtttttgaaaaaataggaatttgattctcgcgaacccctggccgacacacagggtccgtttgtgaccctggccgatttatgtttttggcctaagaacttgtccagtttgtggctttaaacctgagaaccgaactggttcataattctgtcttggaaccctagttggtttgtggcttcggtcctaacaacttggctggttctagcctacacttaatcttagaaaagactcttcgtggctttttgagcttattcttcccttacccaatacttaattcccgtaggaactctaatggcatgccttaggtagagcttaacctagccagttaatagcttaaaactcaatgcgtgtttaattttttgcacctagatcttgtactttgctgattaatagctttgtacattagggctatctggctaatattcttaggtttaggctaattgacctgttttcatctaagtctttttattttgtttgattgctcaccttgtaacatccccgcttcaagcctccattgggtccttacacc

SEQ ID NO: 114415 - DNA, 3694 bp, Cannabis sativa
  modified_base (3558)..(3558): a, c, t, g, unknown or other
tggcaaaaattgaaatttcccttctaatttttgaatattataaaaatttaattctcataatcgtgagtcatgggagaggatagatcagttccaaaatattatacggttactatatttaataataataataatcataatcaaatacatccaactttattataattaagcaaattacaaccatcaattgcaaaatcaatggctaagaaaatgccctcatgtataggagggaaaaggatgcattcacttaagatacccaatatttctaaacatctatcaatttattaagtgaaaaaaataacctacaagattaataataaatattaaattattttgaaatattaatttttaacaaaaaattaatttttaaaaataatacaaaacaaatagttttgataaccaagttaaatgacatatgtaacaatattactatttacattatttattatttgatggatttatttttatttttgaaaaaatataaatttagttttgaagaggaataaaaaaaaatacttaagccacaaaaagacaaaatactatttttgatcaaattatttttatttttgaagtaatataaatttagttatgaagagaaagagtaaaaaacatacttaagccccacaaaaggacaaaataatacatttgaagtgaagagataaaaaagaaaaaaaagaaccttgaactactaaaagtaaaataacaatcaaaaccgaaaaaccatcaccaatctcaatctttatagattatacattatagatagatagattatagattataaattatttggtgttggttaatacaaaaactatagggtgcattgtcaactgtataatgtagtcagtgttactaaacatactaaaatatatatcaaatgaactaaagatggggcaaatagacaaagttatggttcaaaatataatcttgatcaactcaaattttttatgtatttaatacatttctttttgtacatttactaaattatgtagtcgagtacaccatatccaaaacttagaaatataatcaaataaaaacataattgtgaccgatgtgattattccttttatacttagttcatcaatggcaacccggccagttagaactcatattaaaatactcatgccgtacacataaggaagggaatgctatataattgagagaaaaggcataacgagttcaagttgtatttgttttttgtcgtagtaaatttcaataatatttgtttgaatagataaggacaaaatatgtacatgcctatcaagtactccaaccaagctctaagagatcgatgagctattattctcttattacatcggaacttgccaactgtggaggagcttatcaaaagtaggagtacggccaatgaacagacaatactataagttacatttttggtgtcaattttaaatttatactagccttggttctttcttttctacattgacgaaaagttaaatattttgtgttagttttgtaagacactattgacttttggtgtcattttacaaccaatacttattatatacatatatatatatatatatattttttcttttattgtcgttttagaaccaacactattgagtatcgttttataaccgacacttaaataaagatttttaatgtcggttataaaccgacactactagagacaaatgttcttagtaaaccaaacctgcatagaaatatttgatgttcttagcctttaattaatgtcacaagtcaattattcatttacttaaagaaataaaaaattaagtaaaactataaacaaaaagttaatacaaaatatattgattatctattccgtttaatagttcatcttacaaacataagttctaataaaagttgaaaatgaaaacactaatgcaagggattgtaacaacattttagttacgtacggttctcatacaacaagggccatagtaatactaaattcaatatatagtgacatatgaagaagaaaaagtaagtaaaagttgtcaaataaaaaactattcctaggagcactaaagcttcagctgcaatttcattttcctgaaactcaagacgatttattgattcatatgtaacagcttcacgaggctcttttactgaagtactaatttcacttttaattgaactccaaatagctccagcatgtttaactgctccatattttagtgagcaatagctcaaatacgtcaaagaatcaactttcaaagataaagagtcagcatggaattttatacaaacaaactttctatagccaccaaattaattttcttgccttcgtaattatttatcgagatttttagaaagtaaataaacaagactttagaaagaaattaaacagtaaatagtagacaaataatttttacgtggttcaaacgttaataatctctagtccatgagtcagttatattggccctttgagcaagtctttggataatacaatgtgtttatagtataaattctagctctgaactcattttgattctcttgaagaaaaagaaagcttgtaggagttttttgcagaggtttggctagtataaaattttgttcaccctttgtaaataaaatgtgggagtatttgtaggcttacatgtgggtatggccattctctttacccacctataggttttcgtaccacaactcgttgcaagggtaggagaatacaattttaaatctgactgtacggtcttcaagaaccttcttgatcatgcgatgtacagggatagtgaatactgccatctagattagggacacgtgttgcccaaagatttttcctttatcaattactctctagaaaagcaattggacaaaaggcatgtcttgaggtatgtacgtggactaccatggattggcacgggggacaagatctaatcctgtgtcagaaaaaggtataatcttctataggtcgatttccatacaaagctgacgtggccatccgcatccgcgaccagtccatagaagtccttacccggatgttagatagccaaattttcgttccaagacttcttgaagtttggggaagagtgtggtccttttgcttcctgaagacgctaactggctagagatagccctctgcatcaagcatccataaaacctctcccaaattgacatggcatctctgcgaggaactgcgaggttcattctctattgatccaggagattgacaaatctttgcctctgattgtgccatgtaacaccctaactattttaggcatgttagtgtgatttttaacgtactgtgcagctcgttgataatcaacgaggttttcgaaaatcgtgattaattaaaattttgcttatttaattaaaaaacataaagttacaaacatataaaattccggaatcccgtttacaaaatcatttacaaaagtttaactatacatatacaaaagtctgtcgcctagcgactacatagcaaaagccatgatgtcccaaagatagtacgctccaggcctaaccgccccgacatgtacaacctccatctgctcgctctcacggctgctcaaccttagccttgcccttaccctacacatggaaatagcaaatgtgagtcaacagactcagtangaaaagcataacataaaacataataaaatcccttgttataatcagatgcccatacacctaaccataaccctaactgagtcaggaatgttcttgacaaagtatgactaaccgcgaatccagcctatactcagtactc

SEQ ID NO: 114416 - DNA, 1960 bp, Cannabis sativa
aggtaagaattataacatatactaaaagaatgaatttttctaacaaaaaagtaaaacaaggtcgtaagttatatgaaaagtaaacaatctaagagacccatgcttaatcacaaaacccaagatttataaagatttgaagaaattgaaagcaacattcaagtcaaaaccataaagaagaagcactttacattctacttcaacatttgaagcctcagttgtcagcagagctataattctaggtaccacatcagctctggtcaccccaccaacagcatctatgtcagctaatgcatcccagtttggagttggaatcccaccaccagtacttacaccttgtgccccattatccgacaaaatcctggctaagtaatagtagacataccgtagaacactcctgtcttcacactgctgattaagctgcagaaagaaaaagaattttttcacaaccatgcaaaaatattttaggattgtttagtaatacataaacacaagatgtgcaaatgaaagttaaggaatttgagaaacaaaccatgagcagggaaggtgccaaagaagggtcaactgaattgtacacagctaacttgggaaacacatgattcagtaactgcttctgggaacttttctattcacacaattgatcgttattcaaaaaaattaaagaaattagttatttccaaactggtaagagaagatatagcaataaaaatggacaaaaagcaaatgctaagttacctgatctgatgcggcagcaagctcgtgaatacttctggcaagttgtgaatacgaaacaggctgcaatcaagaaaggaaaagtaagcaactgaagtagaaaaaggtcttaaagagctcaaagcttaaatgggttaagtgataataagcaccttcttcttcctctgcttctgaggcatcattatgtttgtgcgaacaggatgcaatgcagctttggcagcagagatggtatcgttctggatctgtaagagggttgctctcttggaacgcttctcgccggaaggcttccccagagcggttgggggacctgtcggcatggatgatgctgaagaagaagatgatgatgatgaggatgaagcagcaggggcggagacaggggcggggtccgccgtaattagatccatgagggtggtgccggaagagtcctgctccaccaaaaccaataggaacaaattcaaaattcagtaactacaaatataactgcaaaaggagtataagtatcccagaaattaccgccattgttgtctgcaaatggtttcgttgtttagcttggtaattatgattctgtgcaagggaaagaaaacggggttaattttcttctatacattaacatcatcactctctgaattgggcaaaactgataaagaacccaagtcagtgtcagtgaccaacgaaaattttctgcactgttattccacaaagatgacatagatgtgcaaatcgatcaagagagagagagagaacccaaaggaaaaaaaaatacagaagcaaatgaaaacaactaagtcaccaaatcaaatgactaataggaaagccccaaatttaacaaaaacaacactaaattgggccaaacctaaccaaagtacaatgaaagcaatcaaagacataacgaattcagatcaattacgtacaaatataaaataaataaaaaagaaagcgagggagaaagaaagaaacctgtggtgagaagagtagaagagaagaagaaaaaagaaatggagaaggtagaatagcgatcaagggagggacaccggatctgggcaacggaaagcccagctccaacaatacaaccagtctggaaaaaatcactacttcattttcacctgcgttttctatgtcctaactcctccccttggaacaaagaattaagaccctaaactcttaaaaagctttcattttagtcccttcacttcaaatgttatcattttgattttattttattttattattt

SEQ ID NO: 114417 - DNA, 7708 bp, Cannabis sativa
ttttttattcaaataattatttctattattttttttatttattaaattaaacatatataatataacaataaaataaaataaaagtaacatagttatatatagaaattagcagttcttcccctgaaggagttctcttcaagaagcttgcattgcaatatcgagtaagaaagaacacgtggaacataaaatccaagtctagcaatgccacaatataactatgttaaaaataacattgatcaacacaaagtattttttaggaaacacaatccactaactttcactagagttacataaatttccattttacttgggtggaaggatatctaacagcaaggagtttgtacaagagaattgacaataaactttttccatagtaaaattttaaggaataaaaaatacccattttgtgaaagtacaagaaatttgtgacgaggtggcagaattaatactgcttgacaactagtttaggattcagatacaaattgtaaggagaggttatctgcaaattatttccctatgtatgaactatgagactatgcctaggattcaaatacaaaattattttttaattaatatagatatataatgcaataaaaaaaataaaaaatatatatacaatatattaaatatgcgggttggcgggcgggttcgggttcaacccgaaactcggtactcctaaaaactcaacctgcgaacccgcccgaagggtaccgggttgaacccgacctacccgaacattttttttaaaaaaaaattacaggtttaccagttcgagttcgggcgggttgctcgggttcgggtcgaactcgctgaaaatgttcagtcctaagttctaccgccaatattccaaagtaatttatcactttaacctataatcctacactaggtgaatagaaattctaagaatgatagtagaataatgttgttcacgctgaaaaatagtcaatatcaactcgctagattagcaagataaaaaatgagttaagtaaatattacagagagatacataaaatttatagtacttcactccttatggtgtgaaggtaatggagctacgtctactttgagtttttatttctcacgagaattataagagaattcgcttaggaaagagctcaaatttctagggagagaaagtagagagatatgctctaaccttatggggacttagtagattgtgaaaatgagctagtcgagctctcaaattatagggaaggatgtcaattaaaataataataaaataatacaaaaaatatgaaaaaactactcttaacaaaaatcatcaatttttggagcttgaatcacgtcagttagatcattttcgggtaatttgtggaaaaaattgcacttgtctttatgataaaatttggacttgaaatcttcaaaattgcgatatgagtgtgagataagacatgaaatatctttaaaagagatttaaaatttaagttgaatcacatcaatcggatcaatattaagagagttatggccattttattgaaagttgtacaagacacaatgcccaagttggcagccagtgcccaaattgacatacggacgtcaacctggacgctgggtgggtgaaaaaatatcactgacttgtattttttgatgcctatgtgttattatgacttcacttagtcaatttcttagttttggtgaagttgttcactagttctcaaagatgtcgctttttcacaaaatcaggtagactcgaaacttctgatttatgactaatttgccaatattcaaccttgtcaataagggaaaatatcaaagtgtgaatttgacttatcagtagtcgtagctctcgtttacaacaaaaaaaaaatagttaaatgctcaagatagaaccaaaatcatataagcagaacctaacacaccaagatatctgtcaacctgggcattgaatgctccttggggagcctcctggggctcgttttgatacttctatggaatttgagattgcaaacaaggtcttctaccccattttgaccaaaacaagaagaatgcacatagaaaattttgagtttgagatgaaaaaacatgcgaaccaggttgtatgtcaacctgggcgcagggcctagtgcccatgtcaacctgggcgttgggtacctatttcggcccttagatggtctcattttctccccaagatcacttgtatctttgttatttctgaaaatggaaaagattcgtataacacttttcaggaaaacttattagattttgtcaacctgggcgcagggcccagtgccagtgtcaacctgggtgttgggtccaactttttgccaccaaatgattttgtttgattctcagaaacatttgtaccttaattattggtgaaatgaagaatacgcccagaatacctctcagaaaaactgtttggaaattgtccaggttgacaatatgtcaacctaggcgatgggcccaacaccaagtcaacttgggtactgggtcccaattctagctcctaaatggctctgtttgtttcctaaaagcacccaactcttaattgttatctaaaacagagtttatgcgcataagactttatctgaactgttattggaagtggcccaagttgacaatatgtcaacctaggcgttgggacctaggactaggtcaacctgagcattgggtcccaatttcggccttcaagtttatctgtttctttcccgaaagcacttgattccttattttggatggagaaaataaaattcttgggatacttctttaacattatggttagaagcgccctaattgttaacccgggcgctaggtgcatcactaggttgcttgggtgctccaaacgtaaagtgttctgattttgattctgatacaactaacatgttcgtgacatgtgttattcatgtctaagtacaaattttgagtaattttcattaagacaaacctagaaactgaaaccctatttgggaatgtcaacctaggcgctaagtgaaagccctaggcacatgggttgactttcgggatgtagtttcatctcttttcaatttttaggccttagacttggattcttcttgtcttcttggttcaaaatattaaaaaatggtgagatggaaataacttagtgggatccaaaacccattctgaagtttctggagttaacctgggcacagggctagggacccctcctaggtcgactgctatgactcgagactactcaactctaagatgttttctttcttgtcacatgtcaaaatttgatgtccatgtcactagggtcagttttcgtgtaaatattttccccccaatttagctttacacctgtacaaggctaacttcatgatgtagactaagcccgtgtcatgtcaaactaccaggtaggaatcaattttgacaatcttagcaattttttttctgattgtcttgagtgatttcctttgatttgggagacttctaaaatatgttaacaccaaaatgttatcacctattctaatatttagttgttgtattagcatcgactttcttgtcttgccatgcatttatgtagatatagatgcactctttgttccctcctaggttgcagacttggaggtctttaacattccctctattgtgttcatagcaaaggtagtattgttcatctcttcaattttacagtagaggaggccttcttcatctcatcggctttacatcaaaggaggccttcataatctccccagtttcacagaagaggaggccatcgtcatctccttggattcacatctgaggaggccttcatcatctccttagattcatagtggaggagacctttgtcatctccttggttttatagtagagaaggccttcataatctccttggctttacagtagagaaggcccttgtcattttctcagcttcatagcagaggaggtcttcatcatcccctcagctttattgaaaaggaggctttctttggcgctattaatgaggtgttgtagtagttgttgggcattctttagtccatttaaagtgtgaccaactcccgaattaatgtatctaagatgcgggtgatgtcttccccctctcgggtgcaccttaaatcgattgtaggtgcagtctccattttcccttggtcttaaccatagagttctatgtcgtcccttcatctgtattcgtagtggaagaggccttcttcgtcctctcagctatcttgatagtggaggaggtcttcctcatcccctccactgctagcaccatagaggaggcttcttcatctcccctattgttttcacaatgggggagatcttcttgttgaatgtcaatgatgtgttgcaacattcacgtgctactttttggttgccaaggagactgtcgatatcacctgttgttgagaacttgacaaacatgtggtagatagatgagatggcttagaggtcacagagtgttcaccttctaaggagacttgttgtcaatcactataaatgtagtcattgttgagattttatgccctaattaaataaaatctaaatagaagattagaagtcatgtaagttaaattaagactaatttaacaccctaacatggattcctaattaaaacaacaaaataaacacataagggatttatgataacctcacattgattgcaacagaaataattgactcatttcgttcagttctctaacccttgatcatttctatcacagagtatgatcaagaactgagcatggattctctttcactcttctacactatcttgagtattgctttgatatgtgtgggcaatcactcaataccaaagagctcaaaatttaagagagaaatacatagagtattttaaaatttcatatagtataatgtaggcttttctttaatttactttgtctgacaagagataggtcaaatggttagtgtaaattaataactataacatactatatatagagagtcattagggttaggcttagcactaaaatgggctgaattaaaaaaaatgaccaaaaaaacactcatggctgaaatcttcttaggcccaatgagattgaattttgtcatttttgttttcttaaatgaaacaatcttatctttcttcaaaaataccatatttcaattctaattatttaaatgttaactttttctatttaataattatatttaattactaaacaaaattattatccaaatatatttattaattagaccctctaaggtctcttaattaataaacaaaccctaagttcttttttattctcaaacatgcccttccttagtaaaatttataaataagacatagtcttacttagaatcctaattgattaattaaaatcaattcattgagactacaaaagaatattatcttaattagtgtggagaccatgggcctatgtaaccaagctcctaataaccagattttgatatttaccgggtaaattttctaacttattaattcctcctaactcgactataaattcagaactatactcatgatttcatagaacgctctatatagaaaatatagatacactatgaatttatccattattttaatcataaaaattattgatcctctatagacggtctacattgagtcgggacaaaattattattttacctttcaatgtatttcatccttaaaatacttagttacttataaatgatattttgagaaactaatataattattgaaatgagcacctatcatttatcatgttaagccaagatctaaggaaatcatcatttaacttctaaatagttatagaagctatagatctccatatttatgattaacactcccactcagttagactactaagttcccaagatataagtatgggctagtcccgcatgtaagctggtaacaaacaagtcaaagaactcgtgcaatacatttaagctagagcttaacaatctcaggattgagatcaaatgatctatgttcagctaagtgatattaacttaaaaaagatataaaggtaagtttataatattttttctattgttaatattggtctagaccgatgtatagctgatacattcaatcctggttgactttactaataccttagaaaagtctttccactaaactaagtttaagtaaaccttatcgttgcttatcacatcagtataaatctagtgcattaataaatcatgagactaaataatttaaaacatataatcataattactttctaatatgatgacatcactgtaattgtgaataaatatatgttcataatttaatagaacttatatatcgaacctataatcatgtgtaaaacatgtgaacaaagcatatggctaagccatggtatgatttcttatttttattgaaagtaaatatgattacattgaattaggttttattgagggcataaaattccaaaagagacaagaacactcgttactttcattataaaacttccaattgaaaaaagaaaaatgttatatgaagtttatatgatgcgagtggtttgttaaaaagtgacaccgttcttatttcaaatctagtggtggattatttcttaaccacttcaggcaacagtagatcaaattggggaggttttataagatgtcccaaggaaaatcacgcttaaaattaatgttggtctaatagataatttcatagaggaagatatagtaggagcagttcaatccataaacccgattaatgctttgggtcttgacggtctttgggatattcttagatctgatgttgttaaagtttgtttaaaggttgtgaatgatgatctgtcagttcatcacattagtgatactacaatagcgttgttgcctacgattgacaagccatctcaggtggagaaattttgaccaataagtttgtgtaatgttattcataagattttttcataatgcctagcgaggtggttgaaatttttacttgatgtgattatcttagaaacacaaagtgtttttgtttcgtggagattgattcatgataataccatgattggctttgaagggatgcactatatgaaaaaggggaagtttgggaatgggagtaacatggcagtgaagctagacatgtttaaagcatacaactgagttgaatggaattttgtggaagctatgatggctaaactaggttatgatgggagatggattaaaaagattatgaattgtatcagtttagtgtcttatgaatcttaattaattgaaaagttaaaggtgttgttaaccccaaaagaggtattcgacaaggtgatccccttacacatttcttatttcttttgtgtgatgaggctttatcattcatgatttaggcagttgaggattgggagggtcttcatgggttaaaattttagttggtgggcgttcatgtgtcacacctcttctttgctaacgatagcattgtatttcttaagaaaatttcaaagaaggtctttgtctcaaaatgattactgcaatatatgcggttgctacttggtaggttattaacttttctaaatttgagatcaatcgtggcagtagagttcatgtctctactcataaacctctagcggatatatttggagtcaaggtcacttagaattttgatagatatttgagcatgacatggtttgttgggtaaacaaagaaatagctatttcaattaaggaccttatatggaataaatcgaatgggctattttcagtcgtgggtaaagaggtacttattacgagtgtgcataaatcgatccaatccaatgacaactgaccgatccaatcacaaccgaccgccaaacattggatatccaattgtgatcggatcggat

SEQ ID NO: 114418 - DNA, 3845 bp, Cannabis sativa
cgcgaacgtcttaaagagagcgacttagtccgcgactcaacccagaattcttcattcggtaatatcgttcctcttttattttgctagcagtttgatcaacagagtccatggggatgtgaaacttagccatattgtctcttgttaagagcatagagttaaccacttgccatagcacaaatctgtgcttaagtaagttaagagaactccaaatagttttatggcaatgaacctggttttgaagtaaagagttgttatataaacgactggttttgaatttacttgagaaaccatctgattctatttcctgctcagtgaacctcttcctcaagtgacaaagtttgagccaataccagctagtgtcgggttttaattcatataaccagaaaggaactttctttaggtaaatggtattgatccctttaacccaaagtaaatctttcttgtttgataaagcccacacaaacttagggagattcgcataattccatttaacttcatctttaaaactcaatcctccataggctttcggaaggcagacattttctcaagaagcaacatggaatttgcttctgttttcaatatttataaacttattaaggtcaaattttatatttttcgaaaaaaatgtgaaaaagattaagtggtttggaataatttaattgaatagttatataattaaaatttaaattatatatattttgtaaattgtttatgtttaaattaaaattttaaaatcaagaaagttgctactcactttaaaagaaaacagataaatgtatagataatttatgcaaaagtagatctttaaaccaaacaaaagtaaataaaaaaatctataaaaaaaaatgttattcttagtttgtatttgcaatgtataacatattgactatcaatattgatttagtacttttacttctcaatttcatatctatttgacaaagtcataagaaaaaaatataatgaaatattctattgtaagttttatttaaccaatatatatttggttattattgcttgatgttggtagactgattcacatatattcatcattcttcttttaaaattaagttgtgctcattacttgaaggcaccaaaattttcattggtaataattttctttataaaacatgtcatataatagcttatcatcatactcaatctttaattaatattgtaatacttgttttaatatctttgttattcaaagtcatgatcaatgtatcttatttttggttatcacttttgtctttcctagcagttttgttcgtgtacttaaaaataaaaattaaacaatgagttactcaatgtaaatacaatgataagtgaatcattcaacaataatttatttgcgttacaagcaaataacttattaatttgctgatttttttcatgatcaatttgtcacaccatgttatttatcatactatgtgggccaaaaacaaattgtaacatccaaaaaaaaattaaataagagaaaaaaataatataatattaaaaaaaaataataataataactcatcccaaaaatatctacgtgcatgactaatttatgtggacaccaaaaaaaaacaaagaaaacttattccaaatctaataagaataaaaaatacatataatatattattcacttagcgtgtagaagaaaagaagtaatctcgctatgtgtggttgctttcttctaatttttcatttatttatatactgatagatgtataaaattttcaaaaagataagtttttttttattgaaatgcataattcggttatgtttaccaggtttttcggtaactaaatatttatagagcttaagaaagtaatgaaagcgtaaatagcaagattataaaaaataaatttttacgagattcagacgttaattatccttagtccacgagtccattttattagactctttggccggtgattgtttatacttatacaaaaatggactgttaagatgcatgagcataggtaagatgtgtaattcgaagactctccccatatttccattcaagtcgtgcaccagtgagttcagtgagcatcaattggcgatccatatacattatagcatttgttacattttctggtagttgcaaagctttggaaatgtctttttcagcaaaggagaaccaatgtcctctaacataaacttttcgaaaaaattcagaattctcatcaagaaaatcatcagacaagttagcataaaattctttgacaattccatcaatatataaccctcaaaactagtaagagtattttcccaatgatggtattgaacaaatttaactataccatacaccttatgagcatgcaaatcataattcttctcactttcaaactttcagatagcataaatattccaatcacgctcattctcacgatagtaaaatctggaattgacagcttgagatggatagatattaccaggaaaagaactcttcataggctgcttgcctctggcagcaacagaagccttggctgctgaagatgcacgaggaggtgctggagcagacttggtcaatggaggctcgggttcgagttcagtttcctcactgtcagaggagactccaaagttttttggagtctctttttcagaatggagagactcggatttggtctcaaaatcttcagaggagacctccataggatcatcttcttaagaactcgaagaagctgaagggggattcattttcagcttcttggcagaatgaatgggtctgtcatcgctttgtttagagcgaagttccttctcgagagacgcctgttggccacgagtgcgagtggaaggccctgttggagttgaggcagcaactcccttacttgaagcagcaggaggagacgcagtaggacgaggtggagatcccttcgatgacaagaaagtgcaaaatttgtgtggacgcacaaatttccttacaacttgcttggggattcgtttcggcttggtcttcataggctgagattcacgctaaggaagcaatgaatctcctgggtttgatgcagttgcagcagtaggcagcacgattggagcagcaggaggagcattcgagggggcttgtttggattccaccatcttgcttggatgccctaagttcttagtcttagccatgaatttctaaaagaagaatgaaaaacaaagaataagaacataaggaaatatgaatcgggtaggtggtaagaataaatgacaagtaagaattggtttaaataaacatgggagagtggagcaaaagaggaaaccaatttcaaaattttgagtaaccaccagcccacgaacaccaaaggaaaccgccccactctttttccaaaattattgattttttaaaaaataaaaggaaactagaattactaagatactttccaaaaataggcaatttaagaaaatccttcaatatcaatgacaaattacattggataagatatcaaacttgaaaaggaaacatattaaaataaatcaatttagattaaatgttgaaacttaccaaacaaagcacaaaattttcttagcccacaagcaaaatcaccaacgcctccctctcttttatttatttttttatttttatttttgaaaactcgaaaataatactaaataaaatatgcacaatatgtataaggtaatctatagcaagcaactaatcaaaattcataacaaattataaatatacatgttatgctttcaaaagagaacaactaattagtatctcaagaacaaaccatacttagtagatgttgaggaaaaggatatgatgttactaaaaaatatgaaccaggattttttattttagtagaggagacttacaaatttgtacacacttgtcagacgtaagtgtgtgcagtgaaaataggatcatt

SEQ ID NO: 114419 - DNA, 3624 bp, Cannabis sativa
  modified_base (31)..(66): a, c, t, g, unknown or other
aacataagatgttatttctaatctttattannnnnnnnnnnnnnnnnnnnnnnnnnnnnnnnnnnntagggcacaaaacccaacaagatgttctagcttctgcaacatttccttcctggaccatgagaacagtcttggttgaaacattgtatcagcttctagcacttttttggttgcctctggttgttccaatgcttctagtatcgcccgggaactttaagcataagtggcagatggatgtcactgctccaaaatcaaccagaaatggtcttcccagaataacgtgataagatattaggcagtcaaatattacaaaagtgctatacttgaaagagaaatgcattgcttctggagacttccctatttattgtcattggaagttgaatttttcccattgggattagcgtgcctccattaaagccttgcagttgaattggacaaggtaacaagttggttttcataagactgatggctttgaaggcatctttgaaaataatattgacagagcttccattatctacaagaattctagaaactcttttattcagaatctgagcttctatcaccaaagggtggttgtggtgaaaatgcacatgcttggcgtcatcttttgtgaaagtcattggcaaattcatcatctgaggacactgagtagataattgtactaaattgcaagttttgtcttgatccaactcattcaagtacctttttttgtggttgctacatgatcatcaagcgcaggctgggatgctctaggaggatatggatttctaggatcgggagctacaacaggccttgctgttggagcattttgtacccctaaaggacttgtgcgttgggagcttgaattctaggagtttgtggatgtccaactccctaaggagaggattaatggctccatgttgtctaggaataaaaagctccatgtgcaaccccctatccaggataaatgattggtacccaattggacagatgtctgtttcaaaccaatcctttaatttcatcccttagatagtcacactcattagtggtgtgctctatatcactgtggtattcacacctcttattcaaataattttttttttgtcttcttcccttgtacatcggtgaaggcttcttgtaatggaccatattccaagttgccttatatacattctctcgagtatccacaagtcttgtgtacttagaatatcatgactcttgggtctttcttttcttcgtagaatcattttggcttgggccttttgaactcatctttctccgtgattagcttacattggactctggagcttctgctttttggtttatttttttaggagcggcactgaatctagttcgtaccactctgaatcttaaaaaactagcctatgcagctggctgcggggatgcacttgcttcgtaaacggtaagagttgaaaggcagttgtcggagggaaaattgatggagtagtcatttgggaagcttgggttactgctatgtttgtggaaggtactgaaagtactctataagcatgagcataagcttcttctaagtttatgaatccttgagctcttgtcaagaaatcggtcaaagtatctactcttttgcattaaatatccccccatagtaaggatcctatggttaatcctaatgtcaaagccaccatcttcatatcatcagtaacctttgttttagcagcaacatccaacatacattggatgtatttctttaggctttctcctagttgttgcttgatactagttagggaattagcttccaggtcaaatgccttcactgctacaaattgcttttaagacattacttgtaggtccctccaattgtggattgatcctggagatatcctcttccaccagttttttgcagacttgctcaaagtcaataaaaaagcaagaacattttacatcatcactagccttagtgacttgcatcatgcgattgtacttggacaagtggtccttggggtttgtcttgccttcgtacaattccatttgaggaattctgaagcgctccagcagtggtgcatttatgattcttttcacatgaatatgagtcttcttctttaaaatttgacataataccattttgttttttagaaatcttctatgtgagctttatcaactcttcgactttgcattctaagcactaagttttgtcacttgaggttcccttccatgaacacaatcatttatatgatttctcaaatcattcctgcagggtttggctttttctactctttctttctattttttctcgtttaatcttcttcgaagattagttgtggagagacttccactgttgctgcctgagaccagatacacctcatcaacatcatcgctttgacttgtggagttgttgtgatgatgcttgtccttcctggaagcagacttcttgactccaacatcaaccttatctttctatgtgactctacctctagaattagtctagtcaccttgcccggaagcatggtttcctttcttatctgttgaggttgggcaatagttttagacttcttttgctgtttagtcgaaggatttttcttcaatgtttcacatattatccctttccctttatccttgtgaggatttgaggttataggatcttttggatccactcttccaggagtatctagtgctgaaggtgtttgcacattagggatccctttggtcagggttgtcatcacgacctccattcttatcatctttccaagcactatctcattaaatcgatctaacgagacaacttactttcagttaactagaactttttggccatggcgaccacgcgatcggactcgtcaagagtgtcattgtctctaacactatcttcaataattttatcctaatgattatctttcggtgtgtcttaaggatcatcttttgaggtttcattaagactgtcatcagcatcatcaaaactgttctcttctgagtcatcatctttaaatataggagcatctagatctgtatctttgccaacttgatcttcgtgatggctagtttccccgttctgatcttttacatctcctggctgggcattaggatcaatgaagtgaagaccagatttattacgggtgagtaccatgattactgaatgtaatcttcagatggtattactgcttcctttagttctcaatgaaagcaccaaaatatttaccgagattttcaaaaaaccagctataaattattagaattggagaaataaataaataaaggagaaagagttagaataactcaaatagtttttacgtggatgggatgttaacgagccttagtccatgagtcgatgttattatgtaacttaagctagacaagcctttaggaatacaatgagcataagttctcaattttacctgagcaagtattgtaggagagttcaacccttaatctaaaggattcattagatatttatattgctaagagaattacacttacactatgtttggtgggagggagaagtgggtggatggagaggagagaagggagagagataggaggagacaacaaatctattgtttggcaagggggattgggggagggaagggatagttggatggagagcaaatccttccaaattcctaattttaaatccttccataaatgaaaggattcacactcttcctcttt

SEQ ID NO: 114420 - DNA, 2511 bp, Cannabis sativa
  modified_base (2449)..(2468): a, c, t, g, unknown or other
attaagagttagtcccacattagtggaaataaattgtaatatatatgataaaagggctactcctcccattgctaattggttttgggatggaacctcattcatcttattcctcagttctaacattcctcaccaaattgtttctgattgcttgatgttactgatattattttccattgatacgaatggtttgattatttatttgctgtgcttgtttgtttctgttccatcattgttacgatttttgtattgtaaaccttttttttgttattgtgttatttgttttttattctttcattacccgaaatcttttctgtacaagtgagcctaaatattgtgctttacatacttctaatctaactttgcatttataaacttaacctagtaatagattgcgtcataatgaatacattgaaaaacaagtaattgttggaatgcgaaagtgtagtggattaagtggaatagggtgagtgtatggtaagatgcatagggttccatctcaaaatcaattggcaatgagaggagtagtccatgcatcttatatattatatggtattaagctttaacacattatcaatgtgagactctctaacagtaattcccaaaattagcattctgcatagtcttggttgcaaatttggcctaggataaggtgcatagcggttcctgaagtatactttatttttattttgtaaaagagattaatggaagtagtcatgggcattgtattaaggaaacttgtaaaatatattgcttaaaaatgaatgcatggaaaaacaaatgattcccacataagtatgctgcataatcttggttgccaatttggcttaggataaggagtaaagtagctcccgatgtattgttattttgtaaaggaggttattggaagtagtcatgaactgaacattgtagttaggacaagtgaaatagagggctgttattttcaactcataggagggcggctagctgtgggtgtgactatattgttttctttgaacttcgaagaataacatggatttcgaaacttatgtaagtgagagaagcccattgtattaaccttactcagatataatttcaattaagtaattgtagtagagagactagaaatggagttattcactatccaaatgtcttagaaagatttgtgattgatgactgctattttcaacccaccaaaggtggagctagtggaggcaatagtttaattcagttatcttgtggaggttaaaattgatccgatctacgaaaatatatgctgaaaaccccctcaatttagtccagtatctagattttcctgaactttagttatttatttaattttatttagtgtggttatgccgacctttgagttgaatgaatctagaacagcatggtatataaaacacacgtggtaagagaactaatttgatactcacctttgagttgactcatttagttgctctcattagcaaataattaagtaagacataaaataatatatatgtactcttctatgcaatcccataaaacatggtggactcatcagtttacataaagtatgctggaggcaccttttgaaaaatattttatcttatctaacaagggtgaaagaaaagaaagcataaactgacggaagtttaatggtgctaactcttagtttggctctaggtgtgcatctgtggtcattattctcatttttttaagtctatgctttttgtcaattatctaaaacagctagtggaacacgcaaaaatatttgaatagtcagtgcttttgacaatgttctatattagtatttaacgaattgatgttggcttagctgctttttccttctccttaagaatagtttaattgtgtttgattgttacaggcagcaaaggagtttgaatctgagcttaagggacccgaagtgacagaagaagcccctgtggacaaacctacggcagtgattgaagaagagaagcaagataccaaggtccccagctcaaaagagactgtatgagattctattgtatttaagtagttttatttattatgatacttgctgtaacacttttttaccattacctgaatcaattttttaggcagtttaataatatggtcaatatttattctcaatatggtaagtttgtttgatctctatttacacttcccaagatggtacctccgacaaaatatcatggaattactatattgcttttcaactattcaccatgaaaccgcgtcaagtataatgcatatacgtatgtgtgtataccaaagatattgattataaaattgagcacaaacataaaggcagccacctttatgtattggaaaccaactagacgagcttagtcagctgacctgggcttttgggggcatcatctaaatttcacttgctcttcctactcatcggttatcagcctatgcgaggatttctttttggcaaaatttgcatggtatactaatttttgctatttttttacaaaannnnnnnnnnnnnnnnnnnnttacttttttactgtgtttttttctaagtttcatactgcagta

SEQ ID NO: 114421 - DNA, 2299 bp, Cannabis sativa
ttaactttttcaacaacatattagatattttacataacaccaatatatacactatagtgacgccaatgaaggagaaatatttaattagcctaacatttctaaatgaacacatgattgaattgagagaagattagaaataatacaaggcactttacaatttttttttggaaaggagattcattactggtaaaaaaaaaactaaataaaaagtgtggcgggtcgcacaaatctcttaacaaaatgactacacaaacaaacactaaataagattgtcttaagcttgaataaggctttgcgcaaaaattaaagtacacatttttgataaaattattctaaaatttattgaaatgttattttcagttaaacacacattaattaataaaattcttatagttggatttttttatatcacatattttattaatattcatcacattataactaattttttttctttaaactttaattcatttataaaaatctcacataaaaaataaaccaacatttataaaaatgatgactataaaataagtataattataagcaaatattatgatattatatatttaaatttgttttatatataaatttttttattaaaaaatcattagttattaatattgttagttctaaaatcattagttatttgcttgtcatactcttgagataaaagtgtatacttttgctctaattttgtgagttcctgcttgactttctcaaagtttttctgagtgagagtttgagtgtagttatctttaaatttgtttatgtgctctccttcaatttcagtttccttcttctcgtcggaaagaactttgtccaaagattctttcactttttgcttgatgaccagttccattttggcattggcatctgctagagctttggcaacctcctttctcctccattcaacattgatgcgctctgactttagcaattcaagctcataagccattttgctgaccaaggcacaattcttctcttccatcaagctaacttgtaaagagaatcataaatgaatcagataaatcaaatgaacatacttcttgtccaaggcaacttaagcaaaagtcaacttacagcattagcttgagtcctcatgctatctaccatatagatagggtccccaatcaccatcatggaaaatctatcagcacctagcttgcaactagtgatcgcactttgatctaacaaatcagacaagaatggagccagatcagtccaaaccctgggatggagcctttccaccacttccacattgagaatatcaaggaatggctcatcccacttttcatagtctacaaattcagcattacgcttagtggatatgttggtggccaatttcctcatttcctcatgctcaacacatcatctttttcagtaaaatcattcattgtcctccatctgcgctcttacttctttcgacatcaacatagacccaacatgaagattacaacatggagaaggtagctgaggcaaagcttattttctctagacagttgagtagaggtggttggaatgtttttgggtacttgaggttgtgaaggcaaatcacgagtctctttgttcgaacgagtacttctcctagtagaccttccgccatccgaggcattagatcccttttgagattaagaatcaaaggcttgtctcctcacagtagccagctgttgcaacttctccttggcattcaccttcgtcttcttgttcactccgtcattggaggtcccagattgctttctggaaataaggactggcccatcacaattagaagagtcctcttcaacttgccccatgggcatttgtcgcaaaggcacaacgtccataacatgttctatcaaattgatgacaagagaagataagtcttctagggttagagctttcagaacagcttcctggctcgatgccggaggtgttgacttctgagatccactcccagaaacttgtgcagtcttacccttactcttgccatctttggccacttcagggacctcgttggccctagagttaatggcatccaaaaagttgtccataatacctatctagaatgtagcaggttgttttgcataaagataaacaaagcagataacatatcaagtataattacaaccacaaattactagataatattccagaaagatccaaaccgtttatcgtaacataattttttttccttaacaaaaacggcaatttcttctcgacctaagttagtcttgtactggaagaatctcagaatttaaattttgctaagtatgtccactctaacatggtgatgttgtaacgtccccgcttcaagcctcca

SEQ ID NO: 114422 - DNA, 6166 bp, Cannabis sativa
  modified_base (204)..(206): a, c, t, g, unknown or other
  modified_base (539)..(542): a, c, t, g, unknown or other
cgattaggtcatataggctatgatcgacttcacaggttaaccaaaggtggtccattgaaaaatgtcaccttaggtgaattaccagtgttaacgcagatttttcgttaaccaaaatatcctttacgtaatagattttctatagaaatatatataagcaataaatgattagataacactagatatttttacgtggttttgtagttnnnatctacatactccacgagtccttattattggggatatttattgagtacaaaatacaatattagaatttgaataatagtattttctttctcaaatttgtcatcccctttcccatggaatttgccccttttctaggaatataggttggcagttacccttttttaggattgattcaaatacaacggttcatgaaacgtggacaatccccatgtttcatttaatcacatgtggaataatatctaataactactcaactgttctttactcttatcctttagacagtcattgttgacttggaaggttgtatctcgcttgatacgagttatcctccttgnnnntcttaataagaaaaaatgctaagtgttgggaagtagttcgtctcgtcatattcctttattggaattaatagtgcgagatgatcttctcgctatgtgttatgcgaggcagttatgctgttacatttattctgctgaaatggatgaatatccctttcttgtttatatattctgaggcaggcatatgtctcgttaatctcagcttaatagttattatccttgtctcgcttaagattatatagtcaatgagttttgaatattatctatcaagcctttatatagtaataacaagttatttaatatgcatttaatgatataacattattatatcatttgagttgattcatattccttctataatacacatgtcagcttctggagtatagccgaatttcagttataacaattgacccttaaaaaatacctttttaattaaaaataactttgtaaataattacaagggtatttttgtctaacccatttttgaaaaatttcatgcattgggtttttggtggtttagaacttcgaggcacatcattaccattaaatgttctgactgttctcatttgcaatgtttccatctgttagatcaattttcttttgatttaacggtggtctgtaacaggatataaaagtcaaaagtagcagttcattttgccatttttggacttcaaaccatcaaatcttttctacaaatcatgattactccttctttcaacttgcatgccctcactatcattgacttatttgttgcgtatttcatcagattacatcttcaaccttacagactctatgaactcatcgtttcaatcatcaaaatctcaatcgcgaagttctctattgcccagaactcttcatcaaaacagtaagtggctcattcccttcttccttatgctttacttttcggtatttgtagtttggtcttcgtgattgattgtttccttttgtttttctttgtttggttattttttaggtaagttttgtttgtctggataattttagggttaaggaaaagttttaggttattagattcatagatttctaggttaggttgtatttaatttttccaaaaatttggattacagatgttcatatgtatgccccaatttattccagaaattacaaccccagaattcttagaaactgactgtcctgaaaatttagcccttccattcgagtccaaaacttatgtacctaaaaccattcttgagataaacgatgccaaaattagggatcatctaataaaaagcaatcacgatgagattttaagtcgctataggcaatttttgcaagaaataactgaggctaaacatcattttctacgagatgtagcttagcctgaatgccaaattttatcttctattcctttagcgagacccttgtttttacctcgagtcactgttgctttttcaccagatgacttagattttggaattatgacttctaaagcttgaaaatccaagactcatcaagatcccacagtcactttcgaagcagaactcatcaaatcaaaagttagatccataggagcatatgtgggagatgaactaagatcctgtggcatcaagtacgagaaaggatgtcatgttaggtctgtagctccagaggaatttagttgtttctctcctgaaagaataattcgagaagagggtgtagcactaggataggcgcttggagccttgagcacatcagaggtggagtagtactccccgtaagggactattacaaggatttttgcaattatctcaaaattgccccttttaaattaattatgggttcatatagacttttggcctgcttgaaggtcttatatcaaattatggagtgggagtgtccaactcctttcgaaattttttatttttactttgtgaaggcctgtcccgtaaggaagcgaggatcaggtgggtttctactatctcaagacccacataaatgatcgaaggatcatcgtgaggttaccgaacaaaactgaattcaaggatgatttcttctagacatccggtctctcaccaatcaatatcattgcattttgtttcttacgtaagtactaccttttctcaaaaacctagttttgagtttccaatttataaattgtaggcatttacttatttttcttattgtactgacagcggtctcaaagaggcctattctaactcttgagaaggagaaatgacacaagattctccttggtcttccgtttggattgcgatcacctgattttttactgaacgaaatcaatctgaatacgtgtaatcttgttggtagcaaacaatctgcctgcgcctttaagaatccaaaatattctaggtggcagaaagttccagttccagcttacgaggaagatagggattatgtggctcgcatttactacatgaagaaaatatccccttgggaagctgaagaagaagcatcccgtggtaattattgtggatggtctcctactgtgcttagagccaaatgtacctcattaattaagtttaaggatagcatgtataacttttacatctgggatcatttttgtgtagatcgcatagccggtttgacagctggtaccccaagaatcatgtccaattaagttgtaatagctcctactttggaattattgaacattatggtactaatttggatagggcgagccatccagactcagacttggatttgtctccattaaatccctttgacctatatatgatcactggttctagggagtttagtagttataatagttcttcctcatcctcatgataattatggtaacccctttaagtgggagtttactccccaccttctttttgtttatttgggataaatgctgacatattttcatttttcctcgcatatatgtattttgaaaacctcttcacaagccctttagtatctaagaaaggtaaaaaacgtgttgtgggttcggaaacttcctcgggaatgaaccctgaactgttagagctaaaaagaaaacaatatagaaaatgtgcctaaaaaaattgttattgagcctgataatcctcagacaatttctccaatcccagctgttgcgaataatgatgaacaaaagttaaattctcaggttttcaacccgagatctaattcttggagccttcctgccctttgttggctcatgtcggcattatgggctcacaggcttgttcacagcttgccacttcttgttggtgtcacttccaatctttcagtaggatgattgggcttttgtaaagaatgggagttttgagagcttatatgagaggagtttaaatctctctttctcggtaatcagtaaatcttcattttgttttccaaaacttttttctttcccttttaatatcctcttcctgaattatttttatcttgtaggcatctctcttttctcagctagcttatcaaagaggcctttagagaattaaacaactggagtttgagctttgaacaaccgttgagcaaagtgaggttattatgaggcaatggactaactctcgaatcgaagttactcgtttaatgaaggacgctaaggaacagaagtaaagccataagaccgagctcgatggtgctaaaaaggagattaaggatctctgcgatgctcatcagaagctcaatgaagaacttaacgaggcaacccaaaaccttaatgaaacaaactagaaactttatgaagccaacaagaaacttgatggggctaaagaaaatcttatagcaagagttaaatcaatggctaaatgttctatctatcatgcttggttagccaatcacaacatgaatttaagcttttcaagagaaggagtcgtgaagatgctggcctattttgagcaaaccaaaaaagacggggttgcggaggccgaggaagaagaagaagaagaggaagaacaaccatccaagtctctaaccatgtagacttggctgtcattttttttttcttcagaaaaatggccattatgcctagacaatggttgccccttgtggcattttgtaaaaaattttgaattgttgcatgaccaacttttcttatttatatatttttactttttatgccttgcatcttgcttatgacttaaatttgtttgttaattgcgttttatttcacaatctaaacatttgtctctcgatttagcttaagatactttgagttgcatggatttccaatgtcattttctgtgagatatacaagtagttaaaaatctaccatgtctttcacgagcagttttcactctgccatgttctacgggagcagtagataatctgctacaatttttagagcaaacttaaaatattttgaataattcactttaggaactattttgaatatcttttgattgctcatttgaaaagttaatcctctattcatatttttagcttaggtattatttttcaaggcacatttgtgtctcatttataatacatgtcaaaacaatgcgagctgttaagtattcagctcacatatagcttcccgtttttttatgggaaaatctcatttacaactgctattttaattttttcttttaaagtaaaggtttttcaattttttgaatttatattgtcaaaagacaattttaatcaattatctttttctttgtggaaacaatttcaatttttaggtttgcattacagtatatatttctaggtggactctagttattatacacatatataagcccccaagtaattttaaaggaaataaactttgtaattactgaacaaattttgattttattcataacaatcactaatcattacatagataaatacaacatttatacattaacttcactggtaataaggtcgtaaatgtttactattccagtggttctgtattaatgagccattaagccaagctaatttgtaaacccacttcctacaatagcttcaatatcatacagaccctcccagtttgggttaaacactactgcagctagatctcgcgtatttgcaaatacacgtcttaacaccaaatctccaattttacaaagtcttttctggactattttgttaaaatatctttatattcggtgttgatagggtgcattggttatctgcgactcattgcgtctttcttcaagcagatccaaggacattcaaaatttcttagttttcctcttgattataaaattcgcgcctgtgggtcacaatgttaacttctactagtaacattgcttctgggccaaatgctagtgaacatggagtgtgtcctgttgttgtttactctgtagttctatgggcctaaagcacctgttgtctctcgtctacccatcttcctttagcagcgtctaacttctttttaatagcatcttttaaagttttattaacagcctctacttgtccatttgcttgagatctcgatactaatgagaagtttttaataattttattcctttcacaaaactcattgaataattcaacatcaaactgagttccattgtcagatactattttgattggaatgccaaacctgcaaatgatgttattggtaacaaaatcaagaacttttttgcaagttatagaaactagaggttcaacctctatctattttgtaaagaagtcaacttccacaactgcgtattttgctccacctcgccctgtgggtaatgccccaatcaaatcaatcccccatattgcaaatgggtatggcgagggcatca

SEQ ID NO: 114423 - DNA, 2022 bp, Cannabis sativa
  modified_base (1759)..(1777): a, c, t, g, unknown or other
tttttttttttgaatcaaagatggaatttattcaaaaacactcagaagatacaatattctttagagcgctaggagcatcatgctcactaaactcacaatctgacaaataacatgaccctctagcaacacaatgagtggccttattagcagatcgattaacaaaaatcaaagaaacattagaaagagaagaaagcaacacacgacaatcccaagctgaaaatccaaactgagaaggcataagaatagcgctattaatagcttgaaccaccaccaaagcatgagtttcaattgcgtatttttgctcaatttactcaatctgttactccattagcatgcctactagccactgcaatctttgatgaactttgataccatcttttttttttacttggtacttagtttgcttataacataggttaggtcactttagtgtttctttctaagtaactcatttttatgggtagtttcgcttgaaactttgttctctaatataatcaataattggaaaatatttggtagtttttgggcattagaataaatgcaaaaggtcatcttgatgagccgtatactacttataatatggatatatatatatatattttatatattatcaaaaagtagagatctattcaatgtaataactgaagtgatgtaataatacgattatattttttttagtgatgtgttaaatattttttcataatcttgaatgtactctagaaaatgatttttaaaacatataaatgatgacacaaataattgcctcactaaaaaatcaacgcaatttggtattaaaaagtgcacaattatttgcatcggatttaatttttgtattattttttagtttgaactaagcatcggttacagtttgatgcaaagcttttttgcttcaattaataaccaacacaaaatgtgcattactatttgcgtcagttattaagtgaagcaaaaagaaaattgtgtgggttaagaagcaaagcaaaaaataacagtatttgcgtctacggatgtaacatcggttacaccaactaacgctaattctttatatgtcactgaaaaattgaagcaaaaagtcctttttgtagtagtgaaacatttagaatttaaaattcaatgtttatgaataattgtcatttcttaaaaaattattaaggttttgttgaattaaaacatcttttgatgtaataaggatggaataagttaaggaacaacatatgcagttcaaagatcttttatatctattgaactctagattacattcgaaactctacaaaatatctataacacttaggggtggaagaagttattgatatatgtagttcaaacactttaactttgaactttagactatactcaatacaccacagaatctctatgacacacattttgattagacatggatatactataatatataaactagcaaataaatagaacttattcttcatcctgtaagtgttccaattaacatgttactatcgtaatagtaacatgataccagtaaaagtcctttgacatagaatcacagtaccttatcttagtgggagaattttaaagttctagcttcttattatttggatgacactagtgatagcctattatgatatgttgaagaaaggaactttaaataaaactaagcacaattcatgtagatagtagtaacttatcagaattatatggataagatatgaaattatgcaatgtctaatcgaaagactcaagcacaattcctagtccttatgaaaagttttatggtatnnnnnnnnnnnnnnnnnnnttaagcaagtattttacattaatgctaatactagaatactatattgatgacttaatctagatggaacttattgttgcagactaatataaaatatcacaacaagatatccctaagcatcaattgtaagaggttaaatgcacactagtgtatgaatttcaccagactcctactgttgagtgggagccatctaagatgtaattaaacaaggaacattaggagacaatcaagaaagaattatgaaagtg

SEQ ID NO: 114424 - DNA, 3458 bp, Cannabis sativa
  modified_base (3189)..(3189): a, c, t, g, unknown or other
aaacaaaattaccttatatatataagtgcatatagttacttcctttattaaggtatgtaaggtatatatggaccaccttattaggtggtctcaaccaataggacaaacactgtcgtcaccctttgacaaaactgtgacaaatgattggtgcagaccacatagcaccaagtggtctacgatgtagctgatctttaccttagcgtaaaaaattattctgtaaaaagaaaaagaaagaatttttcttttcttttttttttttttcaaattggtacactataattcttttgtctatcttcatcatcattattagtgtctgtccttaatgggtgtggcctctccatgtattttgtggtggtctgtttaaaatgtcgtttctctagaagatgtgtgattttttttttttttggttattttcaagtgcagtttttcactcattaatatgatatttaaactaaaaagttagaaatatatatgtatatatatataagatgatgatcattataatttaaaagagagtattagtgaagtagatcaaaagaaaaaagggaaaaaaattaacccttacacgtaactatatgtgtttataatcagaactttatttatatcttttaccctatagttggatttgattacttgtaactcttgtatatatcagctggtcactttatatttatctctatttcttcctatatatataggaattaattattataatgcttctaaaaccaaagaccaaagacaaaagatagtttgtttcttaagattaggtgcttgattgctatttaaagcatatatatcaagattttgttgtcagcaataatgttgtttatttattcttttttatcttaatttctcaaaagtcagtctctctgtgtgtgaaacaaaatatgacatatcagccttcatcaatatatcctagctatgtttccatctttgccttttttttattttaaaataattttgttaatttttattttgtttcatatatatatttatatatagcgatgagccatcaaaactttttatataacatatctttaaatataaatagattatccaaattatttcattaccatgcatgcttcacattcttttattgtttaatatatataaatatatttatatattaatatggtggcatggaccatgtggtgttgtctttacaaaaaaaaagttagattattaattatcaattagagaagctatactaccatccaaaaagaggttgagatttccatttgttcttagatttgcattttagaatccatgattttcaggaacaaaagatactaaccctttcaatttattttattgattcatcaacattaatttattcccaaaataaattgatataatatatacatgtatgtgtccctctggattaatttacacactacacatttaccttttgttttgattattacaaataatatttatgtcccacgtcttttggtatatggagtaactatgctcttaaagcatgcacatgcatacacttttgattttttgtgtcatgagtcatgaccatatatatttatatatttatagcaaaattaaacgagtgagtagtctcaaaaatattatgactccaaacacgtgcacatctagaatatggtatgattatagataattataacctccaaaatcacaaagagactaaaaggaaaggaaaaaaaaaggttttgaattctttgtcacgaaaaaagaatcaaatacatgataagagacatatacatacatatattatctatgtttgtgttaacagacaaaattgcttttgctgcgtgcgaccgttgccactcggttttgcttttgtgtctaaatagagaagactttttttttcatactttatttttaaaaatttaattaatagtgcatacatataacataattcagttatattaaaaatgattgttacatttttttaataactaagaattaaaacttctattttttaaatttaaactaattataattaactatatacttaaaataattttttttaattaaaatatttaataagacatttttaacaattcaatatttataaatatttttatttttatttaataataatgtaagttacaattaaattacatttaattaatttattaattatttttagttaatttataaattaatcacaattatttaatgatccaaccaataaaaataaataaaatatttagtgtaactattgaaattcttccatatatatttatattttatatttgaaaacatatgtgaggtggttttgagtctttgatagaaatgatgatatgggtgttgttggatttttgagaggttaaaagaaagcattgaggttgactcttcagcaatggagttgtgaactggctatggcataagggacccattatgtttcccaacttcactacatattctcatcaccatgcatgccacaaaacccatcagctcttctctctctcttaaatgccatagcttgacatgtgaatttggcttaatttagaggattatactgtgcttcattcatgtcatggactactcatggtggtattaaaagaagatgaaaagaaaaagtgtgaaagctagctagctatgtagtaagattgatttaaagaccagccattgtgtagcgaaaaacatgtacatgcttgtgggttacaaaagctaattaaggtgggaacaaagatagcttcttaaaacaaaataattaactagctaacttgataagaattgaagagtaaaaaggattaattgtatatatgtacattgattattgaacttagactcaaattaattattactgcttgtttatatatcttatatatataatgtatatatgtgtataatatgcagtatatagactaagtttaaactattcaagatatattattaggggtttgaattattttgtactatataagtttagttgtataagtaatataatttaaatgttatattctcattttgcttgattcaacccatccattattgaatcaacgtgttaattgagactttttttaattttctttgacattggttgcagcggaattaaatgactcattccgctcagatctctaacccttgtatcatttttgtaccagagtataatcaagatccgagcccgatactccttcagttatttaaattcttcacagtcttacacagtatgattgaggacaaacttgctatgggtgggcatgcacncaatcactaaggctcgaatttttatggtgaagaacgctaagaatttcgaaatagtagagagaaaaaaagaagaagaaatctcaaaatactagttgtgtgacaaaatgaaaactaggtttagaagcattagcaacattagttggaccgtgagacctttcttttctttttatactaattcacatagggttaggaatgaattattcggaataaaaaataataaaataatagcaaaaataggacttagtggtcggcccctatgtgggtccatc

SEQ ID NO: 114425 - DNA, 1894 bp, Cannabis sativa
ctatttatctttaattaatcacataaaataaaaaaaaaatattaattaatttcttctaacctttactaaaatatgatttttttttttagaataatcactgttattataaattagagtcatttacaaacgagaaaataggatagggaatttctcctaacctacaaatgtcttcatccaggcctaaagcaaatttagctaactaatgaactgcttgattggcagttcttttaacatgggaaactaaaacactagagagaaaatgataacatacaacgtacatcaaaaataagatctgaaaaacaagataaatcacttgaaggggaatttaatgcagtagaaactctcaaggcagctatctcaatatgcgttatagacagttgtaattgagatacccaattgagaacatgaaaaaaagattttgcttccatctcatcagatctaaagctgccttgaacagctttcgaaaacccagccacaaccattccatcatgatctcgaatgatagcaccaattccaagttttttttttgttccaaattggtggttgcatctacatttaatttcaatacattaatgctgggaaaagaccatggaacctgttgctgcaacgctgaattcatggaggactggttgttcaaaatctggtctgtagcagcagctggtttggaggattttttggctcggttgtagtcattgtagaaacatgtggtataggcagttatggaagagctcaggcgtggtttcccaccatgaaacactttatttatgtcagtccaaattccccacattagacaaataaaaagctcaaaatcctcttgattatatacaacagaaagatggtgtagatactccccattgtacatggactgagctttgtgaaagtctattgtgaattttgaatccttccatactgctttagcatgatgacatccaaaaagtgcatgtcctatggactcccaacttgaagggcaaagagaacaagcagctgaatcaatgatttttttcttaaaaagagcagcagctacagggaccacattttgaaggactttacaagcgaagatacgtattttttttggcaaatttaaactccaaaagaacttccaccagtcacggtgggtgtctgaagtaaaagaatgaagttgatcctccatagttgtggccaaatggaaccccgatttgacattgtaagatctagtaggagaatgatgttatattaatctatcctgatcaacaaagaaacctaatggaatagttaagaaaatttcaacatctattaattggaaaaactcactttacaactccacattccattccctattgtgagtaatgagcgtagaacccgacatgtgaggaggtccacaaaagcttatgggctgaaagtgattatggctggggatccaaggatcattgtcacaagcaatgtgaagaccattaccaaccctaaatcgcattcccttgataagtaattctcttccccaacatatactttgccaagtataagatggagaatgactaatgttagcatccaaaaaagaggtggtagaaaaatatctattcttgagtaaccggctcaacaataagttttactttcataatttttctcatatttttatatactttctctcttacaaaataataaagagcacttctcctatatttttctatcttttacatgattaacaaaatatttttttttggatattttgtagttattgagagttaatttatgaatgatttacacattttaacaagattgatgtcttattatttttctatttatttacatgttgtgttttgtgtcctaactaaaactctatttcaatgttatcttgaattttattatcaataaaggaacaaaattattttattacttagtataatgcttggttcacatg

SEQ ID NO: 114426 - DNA, 1211 bp, Cannabis sativa
acgtaaaaatccttctctcactttcttacagctcagtaagtttataatattttattagttgccgaaaacctcggtcaacataaggtatcaaagtaccaaatatgttttttgtataaaaggagggtactaaacaagtatattccctttattaaaagatgaaatagatcatgtgtttaacaatttttaatataaccaacttgaagataattactaatgcgaacaaattcaaaaaaatgtaagcaattttattttgacaaaaaatccgctcaggtttttatttgtaccatcttagaaaatacatgttctattttttttcatttaacaaaacataatgtctaataggtaacttttgcaaaatacacagtccaagatgatatttactctttaaaaaatactcattttattttctttatcgtaccaaaagaatatctacaaattacataaataataaaaaaaaaaagttagtaacaaaattttaagaaagctataaaatttttacacataaataatgaaataattttaagaaaaaaatccaattaaaacttatctaatgagaattcttggatccttgagtaaagtaaaaatatctctagaaaataaatatataaaatttaaataccacactacttacttcataatattaaattaaaataaagattttaatttcaatgttgacaaaatattctaaattattatttttatgaagaaaattttatatttgatatcactggaccggaaggtgtcactgctgcctcacaccattcttaagataaatattaacttaataaatatttaatattctattcaaagcatgaggggcatccaagagtacaagcctagctctaaaagaacactgaagttagagtcaaacgtcgccctccgaaaagatgcaagtctctcaactcatatagcgtccgagaattgcccatttgttcaataagattcccaatgcaaaaaacactataggtgactgcttcaacgtaggtggaaaagtaaacataccctccagatggagatatcattcaaacttaactcataatgttctgacattacgttttcctattaatactaattgatggctaatctttgtgttgtcacatcagccgcattgtaacgccctaatctataggaacgccacgtgtgtgaatttataaaactagtttaatactaatatagtaattaattattaaaaactgtgaggataataaaaa

SEQ ID NO: 114427 - DNA, 8200 bp, Cannabis sativa
  modified_base (1314)..(1328): a, c, t, g, unknown or other
aataataataataataaatttattattcataattatcttatcattttttagccattaagaaatttatacttttaggatatttggtcaactccgagtatccaaaataccttagtatttctaaaatcaacttatcccaataatcccagcaatatttctaattaacatcgttgtgacatttttgtcctccaatcgggtctccagggtcaccgaactttaaaatatttttattccacatatacatattacattcacacagactatataaatttccgtaatttgtaaattacgcttatttactcacttatagcaaatttaaaatttatgttgaactagattagtatgatcataatctcacttattacctgtttaactcaaaatataaatataaaccctaattatttactattaggtttatcgggattttatacaactcaactcaaagtttttttgtatcttggcagaggtacatgtcccgacacatgttgttctatttgatgctattgtatattcttgggccaatcgtttgtttcattgaaatccaaaaaacataccacaacttctcgatcttcggctgaagcaaaatatcgagcaatggccaatacaacatgtcacattttgtagattttaactctcctcaaagactttagtatctcgcatccaacacatgttctcttgttctgtgataactaggcagctattctcatagtgcaaacttagtcttccatgaacagacaaagcacgtcgatatcgactatcatatcgtccgagcgtgtccacaccaaccacatcaaactcatccatgtcaactctcaagataatttactagatattttaaccaagtctttatttcctacatagtttcactctcttttgtccaagatgagtcttagaaatatgtacatcccatcttgaaggcgaaagtattagaataagtaacttacttatttaccctttattctttcccttattctctattcaattaaaatacaaattttgcttggcatttctcctaacatgagaaataataaccatgattgtctgttacaataacttttatagagagctagaggaaactcccgttgtaaacaaaactttagcttccatttcattggcttggacattgccacaacaacacaacttgaggcatctcgaacaactgcccacacgccattggttttttttttttaatgcagcatcatattttagtttcagaccaggtcctgaaggtaagtgtagggacattacatagaatacttcttaatgggtattactcattgatggttactaagccatttaactataaatattaatttnnnnnnnnnnnnnnnattagattttgatccaatgacgaataacattttgtgtaacgaccatgaggtctaacatctatttaatatatgactacgcttattttcaaaaaacaaaataacaaaagagaatttaaatttttgtacttaatttaactacttaattaaaaaaaaatatataaaaaatcattattttttatggtatattaaaaatatatttatataaaaaatacttaaatcaaatttaactctttttttttttttgacgaaaaactttttttcttgatttttttttcagccaatgaaacaatcttaactcatataatgtaaaaattagagatttttttaattagatagaaaaactaagtataaaaactcaaattttcaagatattatccatgaataagtaatgccgattaagagagtccacccatatgtatatatatatgtacatcttcataaattaataattcatatcagcctttagaacgattatgttctccgatattatcatgggcagcatggtgaaattcatttgatttaaccagttaaccatgtataatcgtattatatctatgcacaaggtcaattaatattatttataattaaacaatcttatacacacttatggcttctttttttttttggtacaaatttatcatttggggggctaagcctaagcataatgtgtgtgagtgttgtggattcgaaattaaggaagaaaattaaaagaataacaactttgtgaaaatagttgaaaacgaaaaaaaaaaaaaaaagagagattaatttcatatgatatcttcatattatccagcgagttcacttatgggaggacggtccatgacctcagacgcaatccgagcattactctggaggaccgggtcaatatcgggcaacttgggaacttgggccaacaaatcaatagtccgtcgcaagagacgggccagatcaccctcatccattgcacaatccatcatcatttctctccaagtcagcccagaagcccaagcttcaaccattcccgaaaattggctatccaaactacacacaatattcactccatgtttttcttgtagctctaccagtgagcttctttgctcgtttaaaaagcttattacgtccactacaactgatgttgcttcgtatatatagctgttgtttttccagggacgaactttaatcccttcagagactaaactagctagaactccagccagttgtgccggctttagttccgttaagatgttattccggagaaccattgctagccatagttcattctcacctcgaattgaggctgctgtctcaccgagcgggaatataacatgggtgttcatatctaatgcccgagactcgtgtatgacattgcttatttgtaagaactccttccacccagatggttcaatctgctctattctatttgtcaaacgtcttgatctaagcttcaaacgcttgatcttctcctccgtcagcttcgtcatgtcaatgacttttttgtattctttaaacccttgtgtgcgtgatatcctcttcttcaaacgtgaaactttggttctttgttgtttgtaggattccacagtgccatggtatgcttctgatatgtgtaatagctcatcattttctgaaagactgtttaaaaccggcacgttcaaactccacgaccatgtctccagagatccttccatgcaccatacaccaccaaattcagaacctgaaagcttctcccatttcatgtcatccttatcaagaagcttcctcataatttcccgtggcaaagcatccccctgagctaaagcaacatttgggaagcccgtcttatataccgtcttaatccacttttctgttaatagataccatgaattatctgagccaagagccacataatatgatggctctaaacttggttcagcgtcagaaccagacttttcttttatgttgtttaatgaaaaagcctcatcggtagataccatattcttaagttttgaaccctctagtgagtctaccttccctaaataaacagcaggaacagcatgttgaactccttctgaatccttgtattggagacatagaaagggtagttgtccactttcaaactcctctaatagaggtttcagagaatgaatcttctgtgattccatcttccttcgtagttcagtccttaatcgtttttcggccctcagttcttcctgcagatctgtaatctccttgtatgctgcctctgatagaagcttcctactttttctgtctatagcatcgtcagtaagttcagaattaagcaattcaatctctttctcgattttagttacctcttctcttgcggcaagcattacattactgctaacatagtttccaaaactttgctcgaccaacttcctagcttcatccaaagtcctccctttttggaaggaatttggatcttctgatacatttgctctgcgggtgacttttgcaccagcaagaagatttaaaaccattccataggaagctgtaaactgtgatacaagaggttcaagtccagaaaacagaaccttggtgcattcttcagcgccttcaaagggagtctgaacaagaacaacgtgaccctttttgtcaatgcccctacgtccagcgcgtccagccatttgtagaagttcatttggggttaaatggacacggccgctatcactccttttgttgagggatgcaatgactgctgtcctagcaggcatgttgattccagcagccagtgtttctgtagcaaagactaccttaacaagtcctcgctggaaaagttcttctataaaggacttccacaaaggtagacaaccagcatgatgtgcagcaactccttgccgtagtcccttgacagcagtttgcctgatggcatcaggatactgaatgcgaaatctcttcaaggctagctcaacctcacttgcttcacattcatctaagaggttgtaatcttcaaggtattgaacagctgcatcacagcctttcctgctaaaaatgaaccagactgcaggcagcatatccttggacttaagttgccatagtgtatcggtaatttgaggaacctaacagaaaaaacacaagttaatgcagattacgatgattttctaatctttagcgatctacaaaaaaacataaataattgaagaaacaaatgcttgtgcttggaagtgtctagatagttgatgcagcaagttcttacttgggaacggcgtattgtattgatgtcgttctttgaaagaggttgaccattattgctacgagtaccatcataatcaaaaaattcacttgtatgttttcttgaattccttcgtttactagcatctcgggaagatcttattcctgaactattaagttgtaggtaattgagtgaacacttcctgttgcaattaaagaatatattcatcattaaatcattacctgctttacaaggcacatagacaaaatgcagatcaattaaatggacgagtatgaccagatctcagtagcaatatgcacaaaatatgaaatatcagtaacttattatttccaatttacatcaggaatattcagtagcaaaataatagtgaaacttaaccattaaccctataatatatgaccattctatcccaagttcgaataccgctactctaatgtcaatatcttaccaattatataaatgtttatgtaacgatattcattgtgtgttaacagaatttgttgtgatttaacagaccattttataaaatatctgttaatattaacagaagctattaattattaaggtgcgtctcttcaagagattgcaaagaaatataactaatttataaacaatacgattgagttatgtttctacaaaaagttgcaaagaaatataaatataaccaatttgtaaatgattttataagcttgaaaactgatatctaccgttaggaaagatgctgaaaattcttgtgcgatagattgcagaaggtaatgcatatattgtttatttggttcaagccgtaaggattgattaggtgctaatcttttgaagaagatgatggccatacatatcctttttcattcttaaaaagtatgttttgagaaagtttggtctaaatattaattaggggtcttactctaatattgccatttttttcactgactgtgctatatcagcataactatttaggatgaaagttgaattgtttgatgtatttcaaaaatcttggtcagttttaaatatatattttgtgtttacaatactatttatatatttatatatatatattgggtttacaatactatttaatgtatggaatggattaatgcctgctaacaaacatgattttgcatgcattatactatttgttgttgtacaagcaaagttcggtcaatatttgatgtagtagaggaagcttcggaagttggtgtcatgcacagcgttaacagtagttgcttattttcatttgttgcttatttctttttcattcttatttttatgagtcactttccgttttgtgatagtatagtgatcttttgaaaagtaaattgatatatgtaatagttgtttttggcttgacacagattttggaatgagatatcccgtgttcttgtctttgccttcacaagcaaactgacttgtgagttaaattaacaatttaaggtttgtttggtatgccgtattacaccgtattgtattttatagtattatattaaattatattttatacaatatttatatgtaaaactatatgtggtattaacttttatgaactaaacatgttgatttaaagattttaatttcttgaacatattttaattttaaagattttattgcatgatagttctaactagtatatatataacacacactcctcttttaaaactttagaggaaggctacaagcttatatagcaataacctcaaaataacatttcaaagcaaagaagaaaacaaaacgaatcgcaagaaattaagtcagattactgtgcataaactagtatatatatatatatatacctattcattcgtgttccagtctcgtcgagaagaggtaacaaggatgtcttcgtagagaaatgccaagtcaagggtactggtcgctttgatgatgttaccaactctgttttaccgtgaatctagatgcaagatgaatacaaacaatatcaatcctcctgcgattccgtatatcactaatacaagtaactcaaacaaatagaaagaacgtgaggtaaggaggtcatcacgaagtcacactaccttaccaatccaaccagccagctcatccggatttgctacagtcgctgatagacatatgagttgcacttcttttgggcagtaaataacctaacatttataaatttgttgaatcaaaatagaatcatatactaacaaattggcgctaataatattacaatattttatttttttacttactatctcctcccacaccgtaccacgagatatatcacttagatagtggacttcatctagtacaatcacatcaacatgaaaaagactatgtccagaggaaaccattcccacactgcacagagaagttacagatttacggttgtgcttaatggcagcactaaactcgagctaaagagtaggcatcaaaaaaggacaatatgtggtttatcagtagattcattagatacactcgtcatcaataaagctccaaattttcaaataaataaataaaggtccaagatgcacctttttgaaggaaaatttacaacactagtatccaaaatggattgttggttgctacaaaaatgtacctctggtacaacatgttgcgcaagatctccgttgtcatgattaaaatctgagcatctttgttcactgaagaatctccagtgagcaagccgacattgctgtctccgaatgtctcccttaaattacataataaagaaacaatttatcatatgaagtacatagaccatgacagacttttaacattatgaaattcaagcttaataataagtaccgaaattcacgaaacttctgattagataaggccttgagaggtgttgtatagagcagtctccttctcctggctactgtagcaactgctgcagcttccgctatcaaagtcttcccgctgctagtaggtgcagataccaccacggaagaaccattcaggaacgcttttatggccaacctctttgaaaagaggtcaaagtaatgcataccaactattactctttcgaaaatgaagattcaatactgaaaaaaaaaaaaaaaaacatttgcgataatttacctgaaatttatcaattcggaaatcgtagacggaagcgagctcatcgacatctaaaatttcctcgccgaactctctgacttcgttttgcaacttctcgactctctgccacctgaaatcctcgggtcgactcgagtcctcggctgccgccactgagaaatcgacctcatcgtcactctggtcaagtccttctgataagtcgccggaaatatcaccatcctcatattcttcggcggcaacatcgtcttcgtcgtcttcgtcttcatcatcatcatcatcaaatgcatcatcttcttcgtccacatccgataagtgtggttcaacagagaaggcagagctccgagacttcttcaacgaaactctgaatcgcaacgagcttggagaatgtgcgggaagcgatttagggaaacagaaggctagggtttgactgacagtagttagacgtttggaaatggaggagtggaggtagaggcgcgtggagctgtgcgacgacgataaaattgaagagagagaaatagcggtcatggcgggagagaagcttacttctgcaatttggatacgttcttaggcttatcggcttcatctttcgtgttttattattattattattattattattattaaccgaattttatcttaaaaaaagatttaactgttataaatattaataatt

SEQ ID NO: 114428 - DNA, 1084 bp, Cannabis sativa
ttatcatttaacaaaacaaatggttcaattggtaacttttgcaaaacatagggtctaaaatggtatttaccttaatttgtagtatctaaaaaagattcaaatatttatttgtaccagactttattttccatatcaaattatttagaaattttcaaaaattaatataatgtttactataattataagatagtgagtttttataccacatgctgaatttttttattggggcagattttttaaaaaatattgttgttttttatattttattaattttaaaaatataaattaatatatgcacatatttctataaaaaataattattaaaattcagaaattaataaaatatgttagcaatgaataatattctataaatatagaccataaatagtaaatttttaaaaaaattattaaaaaaaaagagtttagagtttctacagtagggtaataattttaatacagttctttaaatattttaaaacgttgtttattttagaaaaattattgtgagtggtcttattaaaaatgaatattgtatggttgtaattaataggcatggagcaatgggaggttctacaatgtgaagcatagggttgtatgcaaagaagctatgattagggtttcaatagcttcatttatgttgggaccaaaagatgaggttgtggaagcaccacaagagttgattgacaatgaaaatccttctctatatattcctttccattatcaacattacagaaacctaagactttccaccaaatccagagctggggaagcccttcaactacttctacgaaataatatttagaaaatgcaccgcacacacacccatctcattactttaatttcccacaattatcaatttttatactttgtccaccaataaaagaaaaatcttataatataactcagctcgtgtttcggtgcttggcgatttcggtggccttagctatcggatttaagtttgtgattgtggagtctgactcgagtgtggtcatcaatgctctcaatgggaaggattcttgttgggcgcttgaaaactatatctcattttgttctaagtcttctccactctttattagttgtaatt

SEQ ID NO: 114429 - DNA, 5705 bp, Cannabis sativa
  modified_base (2414)..(2418): a, c, t, g, unknown or other
ataatactttacagtgacaaagtttaaaatatacagtttcacttgtatgaaaaagagtaaaataatagtaaatactcgtgcaataatttatttaaattttatttctgtagaatttttttttaaaaaaaaataaaattacaaaataaagttacaatttttgttgatcggaaaataaataaaaacctatttgacataactattattgtttttttttttaaaaaaaaaaaagaaagaaactgataacttttttttaaaaaaaaaaaaagaaagaaactgataacttttttttaaagtgacgtgagaaaaatcgttgacgagaaataagtaaagtgatattgattaaataaaatacatgtttcctagttatggatgtaaactattttaattgtggaccgtacggagccccgagggtaccggcccgtcccattagggtcaattttctatccccaacccaagtgctaaagggggtgaggatgggaatatagcgcctttgcgtggacgtacgggtctagtttaattttttttttatttattttgtaatattattttgaattattatacatgtatctttatatatttttgtaatttataattgatttcttaaatatttttattttaaacaatattatatattttaaaaaacaaacatatattattttaattttttatgtaatttatttattatggtgtcgtttgataacacttttatttttaatttttttaatcacaaaaataaaaataaaaataaaaattttgtttttgaaaaacaaaatgtgttctataattatttttattttaaattttaaaaataaaaaataaatgtgttctgtaaattttattttttatttttattttttaattttatttaagtaggaccgagggcgggtccaagtctgggtcagaattgctagttaaagggaatgatgggagcactctcacttatacccgttaaaggaaatgggaattgggaatgatgggagcactctcacttatacccgccccacatctacatccctatattccaagtcatagtgatcatcttatagattaatgtgactaattaattactatatattaagtatcgtcacttttgttattagttatgacaaatttagcaaatatttagaatttataaagttgagaaaaattagcataaatcgcaaaaagtataaatattcagtataacgtttaagatttttgatattagatatcatttttatttttatgaatttttttttggtcaaatactatttttaatcacaataaaatattacttttactacaatactttttacttagttacaataaaatgtgtaactaaaattaaaaaaaaaatgtaattaattataaattattattcttattatgattaaaaggttcgtgactaaaagtttagttataaaattacaatttgttgtgattaaataaatttttaatgataatacttattgtgaataaaataaaattaatgataacttgtatctaaatattatatactttagttataagtaatttttaatttattattattaaaaattatgtttttaaaataatttgtttttgaatattaataagtaatttttgatatttcacatggcatgtgcagtgtattgagcggcaaaggcttgacgggcaatctatcagaacaagtgtcagaacttactcatcttgaacgcctgtaataattctatatatagtattattattaaatattaatagtgcataagtacattttagcgatgtctatttgaaattaaatagctatatttttaaaagtaactatatatcaaattatattaaacttaacattcaattataatattagtatattaccccttaaattgtacttagatacgtgaagtacattttagtatttctattttataaatagtttgggtattccttcggatattcaaatcagtttcaaattaaatgaatatattgttaaattacataaacagggatttgtatgacaaccaaatttatggaagaattccaaagtctttggaaactatgaaatacctcaactatttgtgagtatattcttttttttttttttttgaacagtttgtgagtatatgcttgattacatacaaatcaatattcatatatttatattatattcaattaattaattaatgtattttctaatttataacccttctttctttttcggtgagtactttatgaacatattaaatcacatactaattaatgttatttgtaattcatgaacatgtattagggatctttcattcaatcaatttattggaccaataccgaaaagcctggggaattatttaaagtctagaactatgtaagtgataggcgttataagtaaatactcaatatatatatatgctaacccctgcaatagcaatctaatttgaaaacacaataataataataataannnnnataataataataataataagagcacaatgtaaacgcttggtgattagcgctctacaaaaaatttcgtaaaccgcctaaaccgaataatctgtccaaatcaaactgaaaaaactgataaaatttacaaactaaaataacccaaaaaagttatagaccgcccaatctattaattgggcaggttgaaaatagatccaactcgttaaattaaactgaataacccgactttagatttttttactttttttttattatcatatataacataaatgattaaatatataataatataaagtcatatacttaattgtttgtttcaaagtcatacgtattgtgttgtactttggtggaatctaatatttttaatttatattgactttgactttgaaacttaaaaaaaaaaagtttggttagcctgcccaaaccgtccaaactattggtcggtacagatttttttttgtaaattgggcgggttgcacttaaattttagcaactcgaactttagatgattggattagaaaatatataggataaattgtccaaaccgaccgatgtacaaccctattggtaatcaaaacataaatacaagaaaagataacacaaataagaacataaccaattttatttggttcagatcctagtcaatgtgactagtcctacttcaaggccaaagcagtgtcttgagtggaattgatagtactatgtgaaaatgtgttacatactcaaatgagaaatgaactactcaagctcccattacagattaattatctctttgatatacatgttctgtctgaatttctctctagaaatctcattgtttcaactattagttgatcaagttaagagtttaaatatatgtaaagaaagtgaatgagctcaaataagttgcaacagaataaacataatctattacaaaccgttgagctaagttggactaagattaattgttgtaacaaacaagtcttcagatgcaacaagagtctgaatagataagtctaacaaaagtccagagaaatagggattgaatcctccacaattctctaccttggtttctatttcctttgagtgtaacatacaagtaaattagcaactactttgacaaacctcgaggaatcaagtcttgataccaagcaagtccaatgcaacattgaaattgctaactgttatcactttagttagcatatcagacaatttgatctccgtggcaatttttacaacgttgatataagtcccttgttaactatgtccgttaagaaatggagttcgatgtcaatgtgtttcgtccttcatgaaacacagtatttttagctaagtgtatggcactttgagagtcacagtgcacagttacatccttttgatcaaatcccaactcaatcatgattttctttaaccatagagtttccttggcagcttcaggaagggccatatactctccttctgtaatggataatgccattacatattgtaaattcaatttctaactaactatattcccttcaacaatatgaatatgtcgtctgtcaatgatcttcttttatcagggtcatcggcataattagaatcacagtgacatgtgcaatctatttgacactactacaaaaactcctttttaagtccatcaaaattggaattgataattctttttagtctattttagtgttagacataatatccaagaatataaaatgggtattttttagtcaaacaaagttggattagaaaaatatttttagtccaacattaatagactgatattaggacccacaatgaaaacttctttctagtcgagcaaagctggacgtgaagcacatgttttttttttttttaataaataataaatattattcaaatattataaaaagtatttatgtgttagataataagaaattaaatgaataataaaaaattacattttttttttaaaaaaatttctgcataaaaaaataagaaaatacaatttattattttttacaagttcatctctacattcctttcttcttattattaagcaagggttatagaacaaattttcaagagaaaataaaacagaaaatgcataggaaaacttgaagaacaacaatgagttagagtgttcaaattgccctctgtaagcacaaagcatcacctaaacactaatcttttggcactaaattctaatcccaaatgttaaacaatttctagatctgtaacaaaaaaagtttgtgtttgtctataactatacataaagggaattaaccaagcgcaagcccaaccccaaccccaaccccatccctcacattcaactccagccaacattgcaaaatattccaatgcaaacctctatgctttcgacttgtaacacaaacatcagaataacctaacaacaacctaacattaaccctatatttggtataaagaaaagaaaatgaaaaaataaaacatgtcaaagagatataaaattggtttgatataatagaaaatgtttgtttttttttttttttaatttgtttgaaaagagagagagaaagaaagaaaatcaaaatttaaatgtgtgtttaaaatttaataattttatgtaaattattttaatggaaagaattttattctaattttgtaagggttaaagattagttaagtttataaaatatgaaagaaatatagtattttatgtaattttttttttatttttttaatgttattttaatttttttaatcgaattttgttttaatgttattattaacaacagtgataactgtggaaagccaaggggagtctcctcatcatgcggctgccaatatttctacttgtatgattcttcatatataatctaaactacttatatatatgttttacaagacagtttatttattctaaaaaatgaaaaatatatatatatatatatatatatggattaatacgatccagtttcaataattttatcgcaaaaaaattattcttacttacgtataagcataaattttatacatatttgtttaaataaaagaaaacgatgctcttgcttattttttagctaaattgtctctttttagaaatttttcaagtttggtacgttgccgatcgaatcttccatctatcttactttggattgattatgtttgtgatccttttgactttatgtatttttaatgaaattattctttatctaaaaaaataaatgaaaaaacaacgagcaaattgtctagttttcattttcaaataaagtaattaactgtcaaactcctttatatttttatttgtactaggtgattgttacgtgtcaagccagccacgtagtgttagttttatttaa

SEQ ID NO: 114430 - DNA, 4764 bp, Cannabis sativa
cacattaaatttagtttagtcccacccgttggattagagatggtgtgacatgccttctttgtgtgttattaacaaggtatatagaggagaggaacttgtgtgttagtcaacaaggtaaataagtaatcgaaacagaggtaggctgcctctgtatgaaattaattgggcagtatatacacatgagtagggttaggcttgtattgtatttcacaacagtaaacaaaagaatttcttaaacaaccccgcatgtgtatatatatgtgtatatatatgtgttgattgtattcctaagtgttttgttgattgtttattagttgtgctcttctctttgagtagctctataatagtgatttcacaagggttttcgtagtccatactcattgtttcattcattagtggtgaaggtaaaccatttttgtaaaagatgcagaacgatgagattatatggcaggttatcaggcacaaacactgcagtttcatggccaagtaagcacctttttctttttcttcttctttttcattttctgtcttttcttaaagttggaatttctccgctctagttttccattactgcccatcttttaagttttttgatgagaaatttgtgaaagatggtgattggtgtttttgtgtgttgcagaattgaaactgggattttttgtcgcaatccatataatgtgactggaatctgtaaccggagctcttgccctcttgccaatagtcgctacgccaccattcgtgaccatgatggtaattgattttcattttttcttcctaatgttatgatttttcgaagtttttgctttaagattttgtttgcttactttgaaagttgaagttgaagacccaatagtcttgcccatttataatttttatttgtatgtgtgtgctgtcaaggtttctcttacctatttcatgagaatagtttactggtctcattggataaagttgttaaagtaatgaaatcaactttgagagaaggaaatatggtatcttgcagcttttggtccgtagggtgttacaacttatgatttgtgcattattatgtatatctaattatgttattgtgactgttttgcaggagtgttctatctttatatgaaaactattgaaagagctcatatgcctaacaaattgtgggaaagagttaagttgcccaggaattatgaaaaagcactcgaaatcattgacaaacacttggtattaaaattctccattaagtgtgtaatgaattcttttgatccaaaggtgtttaattgctaatttttcataagcctcttgaattcacagatgtattggcctaagtttcttgtacacaagacaaagcagcggttgaccaaaatgacacaaatgaggatacggatgaggaagcttgctttaaaaacaaggtttattttatttcatgctatcgttgtttcactttccatcacatgatatatgtcttaattgattctaatatgacattatcacgtttgaatactgttcatgttttgattagctattgcattgaaagggttgcttgctatgctaggtaatatcttttacatgatgcatctaacttgtatttctttgctcttttgtttctgtgtctaacagggagaaaataatgacaacaccgagaaaagagaaaaagagggagtctaggagagaggaaaaggctgaaaaagctgccttgttggataaggttatgaatctgcaatggtgtactaacgtttaaaaagtatgttttctccaatggatctgtaaagagtttttgtttttgcagagtatcgaaaaagaattactagaacgccttaaaaaaggagtttatggtgatatatataactatcctgtcaaagaatacaacaaggttcttgagcaggaagaattacagcttaccggcgaagaagaggaagaggaggaggtatttatgtatagcatttcctttttcataaattatatttgatgttgctattgaaaatatataatgactgtttattgattgcttacattttctcttctcttttctgtccttggaaaatgcaggaacctgagattgaatatgttgaaggttatgaggaacttgaagaagaggatgatatcgaagattttgatggtcttggaattgcccgaagtcacttggatgatgatgataatggtacagctgattctatgttttttgttcaacatttattcctttggttttattgtgcttatcggttataagactatggcaaaatgttcaaatatatatatgagatgtactcatataaagctgaatggtgtagttggagtggaagaagatgatgaagatgcagaaccactccctcacaagagagtgagaaaagagtctgctgcggcttctagaaagtttgagaaggatggcgctgttgctaaattgaaaaagaaggcaagagtaattgttgaggtaaatgttactatcattttaacttttacttatacccgatttactttctatgtctttgtggtcatgttgctaagtaacaaaatatggcaacttaatacccaagatgggtagctctctaatggttagggatgtagcttgttccaacaaggtccgagccccaggtttgagtcccttctatgaaccaagatgacaaatgctctagtttcatgctcccaaacattaatttatggctcatcaacatgtagaacatgatcatttattttctctcaatagcaaaaaaaattaccagtcactcctcagtctgttgcttagtacatacaatatgggtaggttgatataagaatactgtcgataatcgctagccaaatattcatcgtttttttgtttgtcaggttgagcacgaagaagatgggggtggaagacaaaaggcagtccaaagtattgcttgatttatttactccatggaaaatgtagctgctgtagggatgtgctttctgcgaggtctgatgtagattttttagccaaagtttacagagcaaaaagaataagaagtctcactactgcagacaacagaattttgatagttgggtcatctaattatacttaaaaattattgtcatttgaaacggatatgttctagatgctaagttttgttctatattattcccacccaacctgtattttaagagtagaatatttctaaaatgatcacatttgagtattttttttctttgttaccttatttagttagggagacattgtttgttggtttcaaatttcaatctataaacattctttgaactttgcaaagtaagcattatttttgtgcttatccaactaaattgcatgtaaatggaagtggtctttttaattatgaattgtcttttttttccctttcttttctagggttgagaatgttgtagacacacatttatttatccatataaattattcccaaatataatacacacttatatatgcgtaaaatatttgagtattactcttttatttttcctggtttatatgtacaattcattcttgcttctttctaaatccaatttacctaagagtagtagtgcactagctatagtttgaaatgataactcagcggttaaactgccatgtgtcatttttggattggaacaacaaataaatccaactttcctttgttttggtgttttaaatttttcagcatgtcattgtttttattggaaaatgtgtcttccacacttggggtcactttgtattaaatttaattgtgtaattagaagtaatttagaaatttctttataatctaattcttatgtcctatgaaaatcgagtgtaactacattgtgtaattattattttatttttattttaaatatcaattactatttttttttttatgtaattagtaactgttaaaatacagtgtaattaccactctagtaattatacagttgtgcttctaaacaacctttagatgtggcgtttgattaaaggtaatgaaatagaatagaatagaaagaaaacaatctttattccattctatcaagctgagtagtaagtacctgttttaatctaataagttatacaatccctaaaccgaaagcccaatgcagcctccaacaacatgttaatcatctgtaatccgttctagcatagcaatagagactccttccctttttcattacaaatctccaatctcatgcaaccaactcaaaacacttatggagaaaaattgttgaacctcttcaccataagaaaagtacggaaggtgaaacagcaaatgcaccaccacttaaaggaccaataccaccaaaattttggagggacaaatacatgcatatgtatagaacaatatgactatagtaaccacattaatttttgttatattggtctacattatattatactaggaatgctatggatttctatagaaattataaataatttttaatgtataaaataaaatttaaaatttagttatatacttgtgtttatatctactataatttttctatattaaatccaatctatttattaatcgtataaaaaattacttttaattcgtttatatataaataattatgtttaattttttttttgaagaaataaacttgttattataaattaattattgaagtcatttacaataacagagtttatagacggagataaacaatccgaccaaaaacaagtctcatccacccctaaagtaaacttagccaaactaattatgtttaattttgactaacttaacagttcattaaaatacatttataacaaatttaacatgtttatttattaataattttcttagggtaaatactattttagatactgtgttttcctgtattttctaaaatagtaaa

SEQ ID NO: 114431 - DNA, 2451 bp, Cannabis sativa
aagaagagtatcgacatcacatttccattagcaaatagcaacgaagacaggatatatctggatataaatttgtttcccaataataaagcaacatacagtattatcatgaaattagaatcttctatcatcaactttagagcaatatataaaagtaaaacaacgacaaaggaaaaagtggtaaatttatatatttatttttttgttgaagttgtttaattgtagatgcatgccagcatatgtttgtgcatgaaaagttcacataatttaagatgcaaggaatatacctaggcccaccattggcagtgactcatgtttcattccaacaaaagtatatgctattatatttaggaagttcaattatatatgcatcatttcaatacatatatttatatgcatcatataataatatattaatgccttatataaaatacaaacaaagtattgctcaaattaaatattattgtgtcatatagtgcatgatcatgatgaatcaatatgttcttcaatcattcgtaagttcgtaaccatgcatgatcagttataattaattaatataaacacacaacgtgtgataggccattactctaagaaaccaagcagcgctatgcgtaggaagatcggaagagtcatctttggccttactttcctgtaaaaaaaaaaagtgtggtaaagtacatatacgatcaaaacaagttgtttgagccatttcatctatatatatatatataaataatttattatatatattatacatatatttgtatatgttggcatagtataatttaatatgtttcttgagacgtacgtaagaaatattcatatataacgtaggtaggttgtagaagtagtacctttcaagcacaaaggcaaagggagctatgattagaaaagcaacaacgtgacggtatacagacaagacgaagtgactcatgccatgcttgaaggagaccatgcttataatatacatccctgcgtagccaaactgcagagaaatcatagccaaatatggcttcatcttcgtaacactctcactaatctttcccccatgtgacccaataatactattattattatctctcatagttgatgataccttaaactaattaatctagctatagtaagtactatattctatcttctaaacctctctctataggtgatatattgatacttcttttgctgcgaatgtataccaaaatgaggaatgcgtcttcttataggcacaaaattaggaagactgtatatcagtgaataacagagtaatattattctataaaaaatatatatgaatggcccactttttgtacgttgacacgtcaaacgcaatacaaattcccttatccattaagagaatatacaaatacaaaatccgtgggtttttctaagtaataaagaacccttgtgctatcataatcaaataaggcaaaaagggagagagatagtataactaattgaatctctttaaaagacaataatgttagtaccttttcttaatttttttgggggggatttgtttgttttctttatttatacatatttttcttttcgtgagtggggatttataattcattgatgaccatcaaatgggaattaggtttagtgctctccaatgtcatataggcagcttatgtggggtttttgtaaaggttgggtgctatgaagagtggataccacttggagaaaaaaaatgccaattactgtgttgaactcatctctcatcgctgattaatcagctagcgagctgtaaaaaacgtacatttatatatgtttatgatgaattatttattatctgcgtatataaatctttagctagctagtgcggatgacatggcttgctgtagttaaaaaatacaacctacttctctaattgattcttcatattactccattcattaatgtctatacaccatatttcacaattaaataaacattgcaaaccatttgagaaagaggacaccacagttatcaacaaaaattatgtatacaacagtatgtatacttaattctgaattagtcatcattaaaagttcgaagacagatctcagtgaaataaatgggggccacctcctctaaattaacagctcctgacccaaaccatattgtcactgcaagaaaaaaaaaagttatagacaccaccaaattagggcatacaaactcaacttttagtgccaatgaatatgtaagcacaacttgtcgtgcttaaaggttcgtgcctaaaaacctcaatgggtaccacaaataatattatgccaattcactaatttaacggcacaatacacgtgatgcccaattgaaatcataaactctattagccatacgtttaggcatgactttatcgtgcccaatgagttttatttttttaaaaaaaaaaaattaaattgtattttatgattattttacatctatatttaaattaataattatcaaaaactaataaaaattaatttgtaa

SEQ ID NO: 114432 - DNA, 4062 bp, Cannabis sativa
ttttacaattattttataaaaagacagtatttttgtaaaaaaattcgtgtgacagtaaaattgtaaacttttacttaattttttgtaaaaactccattaagaaacctataatcaagtaggcccaaaacagttttactccattgttcctcgttaatggacctatcttttgggtccaaacaaaaccattacccctctttatttgggcttttcccataatgggtttatactggtcaaagaatctttagaaaaataacatgtttgatcacattttttgacttttttattattaaaaaaattaaaagacactattcatgtaaataaagtaaaataatgctgtcgattttcttttttatttggtaaacaatataacataataaattaatgattataattccttaatatatttattattatgatgaaaattatattttaataaatgtgctaatatatattgtgtaaatgttttttttttattggtaaggatatatatagtgtaaatgtgttttttaagattcataacacatttcagagtaaccaatatatatatatatatatatttatatacattataacacattttatcatcaatttttcattttacacttcagtcccatgcatatggttctctaagttgaatttcttgtaaaagcttaacaatggagatttttgcaccctcgagtatactattaccactataaattgtgctcaattaatttctttgctaacaatttttggaaaccatagataatgttttttttagcaacaaacttttgataatggtaaaatataggacttttgttaagtttttatccacatatctaattttaaaataaaaattaatttaaaatttaagaaatattttttctatttttttttcatattcgttttaataatatcacttataaattttttaaaaacttaaaaatagatagagtactaaaaaaataaccagtacaacaaagtatttgaatattatttttggtactaaaaataatttgtttttttttaaaaaaatttacactgtcctatatatacacgattataaataaaagtaaactaaaaatttttcttaaatatcaaaacaaaaatatacgtacaaaaacacttcttaaagattactatatatatatatatataaatttttcttattattatcattaaaaaaaaaggtcactttaaagtttatatatatgttatatatatatatatatatatatagttagatagatcactacaaatctatatttatgtatatgaatattggagtgatcaattagtatatactcatgcgtgagtgcgtatacatacgtacgttggaatgtttgatcagatttttcatcttattatatatatgatttgaatgtatcaatatatattaattaataatatgttacctactcttgtaattataattaaacgtgatccttttttatatttatttatttcttttcgcatgcaaatgataaactatagaatttacgtacaaaaagaaaatgttcacttttactactttaattactcctattagaatagtactatttatacttttgtcactataaaaaagattttaattatatcccaaaattttccaattttttcaataaatatttgataacattttttttatttgagtgttattttactgtcatataaatatatatatatatatatattgaattatataatgatactaaaattgtcaatatattattatgtatgtactactactttcagaggggccaaagggataggtttatgattcacgatttaattatataaatatatatatagtactttgatgataataaaacaaatcatttatatttctttatatatctttatgaagcttttttctagaagctaattaattagtaactggtaatttatgactttgatcatcatatatatcctaattattataaatatttatataatttatacatatatatatatatatgtgttgtgtaatctctagtggcttgaggtactaataataaagctagcatggtctgctttttataaaatcatcttgacttatataataattattaattgatcatatatataatctctcaatatatataggtaattaattatataggcagataggtttatgattatctttgttcgaaaccatgcatcttgcttgccaatatggttttttttgtctgccattgcaaacgataatgcatgtgcatgtgtgacttaattataattataatagaggattttattaaatatatacaccggccaaatatttattataatatgtatataaaaaaagtcaccattacatttataaaatatataaaacaattttgaattattgctattaattaggtatctattagtgtctagcactttctcgacgtgttacattgcgattggttaacgatattctctaaaagctattatattaaattatatggaacctgatatttagttagactaatagcgatattgacacataagagggtactagttagggaccactagtgccctttagcatttctctattcaaaaatatgataacgtcatgtggcgtttggttagaggtaatgaaatggaatggaaaataaacaatttttattccattcctttgtttgattgcattttaaagtattatattttggtagaatgactattctattttaaaaaggaatgaaagacaattccaatgtaataagagaaaaattttaataatttttttatcaatttttttttatacattttaaattttattccattctattcttatttctattcacattctcatttctattcctatatgttcattctcatttctattttatgtaagtaatgcttagttttgttttaaatgtacttaatcaatttttaacttaattaattattataatttccaacttcgctttcgatttatcaatataaatatagcatttttatttataaatatcttcaaattccaacatagtcaataacacaatataaatataaatgtaaatgtaaatttggatttggatttggattttccaatttataattaattagagagctaactttaccaactcttgaagagaaaataagatgttattaatgcttattagctggtgagacaaggactaaaggtgaagtagtatgccatggaccaagaactaccctataaacacatgtatttatatatatatatatatatttatagttttttttgttttttgagataatgtatttatatatttatgtatataggtttaagtgatgtgtttttctagcaatatacatttattaattagcatagcaagtactttaaaatttctcttctttgtcaaattatcttacccatataattggtgcatgctttcaaaattattatttgatttttttggtaaaattatttctatttctatttcattaattgttaataattggtaaaagtttttacccttttcatcatgtatacatcacatgaccattttcaagattttctctctaataattaatttttgtgtcataaataattcatttcctacaaattaatgcatgcatgccatattatatgaacctttattaattatatattatatatatatataaataggactctagctaatttatactatatataatgcttagggttggatattaatggtttaggtaatacattttgttttctaaaaaaaaagtagcttgtatatgtttgttgactttattttaatataaaagcgctatatatcacataaagattattattatatattaatttattattatttgtaaagttttaaataaacaaaaaaaaaaaaattatgtatatataccactcaagaaattaatattaagtgtgtgactaatcataatatttttagttattttgaaacacaataaaaaattattagcttatcaaattatttatcgtttacatagtgcaattgttgactttttaataaataatataagtgatattgcttagtaggagcactcgatgctttaaaaattttcaaaatttcttttttgaaccaatacattttacactatgaaaaatatgactcttttttcaaaactccaaaaatacccccctctatc

SEQ ID NO: 114433 - DNA, 1673 bp, Cannabis sativa
actcgaagagtgcgtttgtatcagtctgattttctagaataaactatatgacaacaagatttaaaaataaaaaagaatataaagtttggatcagaatagaaagaatctttaatttaataaaataaaaatctgaatatgttttgttttgtttgcatgaactatataatatatttattttttcatcaaaatattatatatatattatatgtatttatttattgtgtaaatgagtgatagtgtggtgtggcagcgccacaaacggtgagaaaactcacgtgtgtcacccataattaaaataaatatatatatattttttattttattttttcataaatttaatttgaataaatattgaaataaatgtaaagatttttcgctcataaatgagtgggacttactttgactttcattacagtttcatgtgcttctaaaattatgatctgaccaacacatctcagattttgtagtacaatttatatgaaaaatttatagtacatcaagaaaaattggtattaatttatggtattttctatgtgttttggcatgtaaaagggttatttaatgtaatattttttttttaaaatatggtatttttaaaaattactaaataatgtattttgtaaataagttttttatttttgggccctgtattgggtgggctcagtctgctttagccaaggcccagtcctgcaaaatacatataattttgagtgcgaaaaagagagaaaatcaagaaaagaaaagaattttcattgattgaattgaagagtgaattacagaggtaagtaaaaaaaacttgttactgaaaacagttacaaaatagtaacagagctaaaatagttataaaaacctaaataaaaaaaaaactatttctttaaaaaataaaaaagtctataaatattaatttagacttagtattttacaaaattagcatgaacttgtattttttaaaagtagtacaaaatagtattctgaaatcaacctaaaacagctaccgatcaaatccttaatttttattattttattttaatataaccaacttaaaacagtttttagcacaaaaatacaaaaattgtaaccatagtcgtaacacttattagtaaaattattattaagtttattttgataaaaattaaaaattatgctcagagtattattttatattattttttaaaaaatataaggtttaaattatcatttaacaaaataaagtctctgatgaataatttttacaaaatatatattcttttatatcatatttcctcttcttctgaactcccctaactccaaccccaactccttcttcttggtatgtgtcgaaaataaactttgtagatttaagagcatcacgtaagcttttgataacaaagacctttgtagattattaggtggtgttaaaaaacacacacgtaccaagttattacttgagacacaattaaattaggattatacgagaaatactaaaatgtatcagtgcatttttctcggtgttatatcgttattggtacagttaagtaatcaagttttatataagttaagataataaattttagggttgatgcaaaatgattttaaatttggtaactaagttagtaaatgtccactttttaaaaaaattaagaaaatggccgaatctaataaattagctaataaaaattataaaaatagattta

SEQ ID NO: 114434 - DNA, 4242 bp, Cannabis sativa
ctctctctctctcaatctcaatctgaaccgtattttgaaaaaagagaagtggggtacgtgctatttataggcttagaatcaagatcttaaagtcaataactacaagaatttcgcttcacagtgagattcaccttaccacaagcaagtgaatcgatcgcctcttgaaccgaccagatgcagcgaagtcatctctaagttaaggggtccatcgccaagttatggcctctacactgttagttgaatagggcatcaatatagtgggaatccactcagctatttcttatgaaaatgcaagtatgcgaacacttttttctatttatttagctaatgactatgtaattgtatttaatatatgatgaataaaacaatgaacaaagtattttttttttatttgttaattcattgttattaatcaattacagctcacagacctgacgatgctctcaagtgctgactaaagcttgtacagttggtcttgaggtaacttcaattatttcttagtgagtcaaacacagccaacccatgaatctcgtgacaagtggacgagtgctcaacatgtaacaactcatcaagattcatgatcaagaaagtccaatagaattggtatggcaagtgaccaatgaagacacttattttatcacttgggacacatataccatagtaaacgagaactaggtatgttacaggggtattaaaaaaaattgcacacctgagtagtactttatggtaatgagacgttaagaaatattaacattactcccagtaacaaagtttcttaagacatataatattgagaaagtgttaaatgtcatacggtaacagataaataaaaccaaaaagaaaatatattggaaacattttctctatgtagaattctgtgattaagatgcacaagtaaccgaaagactccgagcagaatttttcaaggttaaatgttgcaaaatggacaaaagatatcttgaaaaaattataagaggatgacgtaacgattctaccaaataggtggcatcgattattcaaacctaaagcaagccttcttttcctctattctggagccacttggtaaacaaaccttcaggttactctctagatcgggaaaaatctaacgggtgctacaatcggaaaaattttctagctagtcttaaaggtccttgaaaaaatgtgctcctagaagaaatttctcccagaatttatgaagcaatccaaaagattaggaaatgtttatagtagacgagatttactcatcaaaagtcattttgaatcttcgtgttcttgagaaaaaccaaggagcaaaagcaagttcaagatgttcaagttctcaaagcacaaatgatgcaaaataaaaatgttatgaagaagcgtgactttcaagaaaaaacaaatcgatgctatgtatgtgggaataagggtcattatgcaaaataatgccctaaaggaaaaactatcaagcttctcttacatatccaacaaatggcttggatgtctcttgaggaaaatgaaatagagtcaatcttctccaaggatgatgaatataatttagaatctctctgtgtatttgaacaatggagtgattcagaagttgcaaaatgctatcaaacgttcactcttatatctacatattcttctttcaccctgtccatatggttcgataagcacaacacttcaatgtcattcactagtgtctattttaagaatacgtttcccgtcaaagggaatctctaaaggtggtaattctgcacaatatttccttcagctttctaactgctacaatttgttcatgtgaccattctagattattattttaaagcatattgctgagtagtcttgttagtacagaaataagggaaaaatctcgcaaatgattggtgatacccaagaattgttgaacctgaaatttagtgagattttcatttaaaaatctgagtagttcttgggctatatgtggttggcttcatattatcctttgaatagtttcatcccaaaggaattctatttatgcttctccaataatcattttgttttcagacaacaagatactatcggcttcagtgatagaagcaaattgagccagtaataactgataggctttttcattaggagaaggaagaaaaatattgtcaatgtagattagagtcttttccaatattagatcatatatccttgtcatagctatttagaataaagaaagggtagtttggagcccaaaaagtaggacgatccattcgaaatgattatttggaatataaagattattttgggtcggtcttattgtttaatgcctaattgctgaaatctcgcttttagattaaatttaaaaaaatgtgagctttggataaactgaaaaataatgaattttcttgtttggtaatagaaatttatcatctgctgagaactcatttagggtatccggttttttatgtttttaatttttgagggatatgttcgaactagtcatgtcgaaacacgctggagcgtgttccaaaaattaaaaaactcaaaattactaacattgataacatatgtcatctccagataattttttttatataaatgattacataatacacccataatctacaaaataaatttaattcatgaaatgaaaaaaaaaaaaatattctctaacttaagaaaatgatattttagactttttaaggagaataaaattatttttctttttttttttgaagaaaaatagaatttctatttttagataaactggacatagtccattatatgcatattttttttttttattgagagttgcttagctccgaccaagttctccaattgtatagggagtttcctggaagacaagaattgtgcgtggaactttgatatgaatgaatcccgtgaatcaaacttgcccaatgttagtttaaaataccattcttgagctgcctctaccaatgttgctggaaaaattctaaaccgtacatcgccatatgcgggttgcaaatccttttgcaattcaaaattctttatatatatgggacaatgggtcttcttttccagagtatgcctttcaagtaggcaatttaaattcaggcaaaagagggagcgcatatatttgagcagtgaagggcaaacctcttgctcggtcaagtttaacttcggtgagtttgggaccaatcaaactttcaactatgctcttaagatgatccagttaggcttctacccctgggtcaacttgatttggatgttgcgcagtctgagtcacttgttgtcctccttgactgccttgagtcccaaccgacacatagttatccacattaataggttgtgtatttcggggaactactccattcctctgctctctcccctaattcagtgtgtgtctgagattgaaaggttgagtccttatcctctcaaggatggattgttttagaggtcttcttgcatttttagtgttggtcggtggaatctacctctgtgcatgctgatctcttcgtctttgagagcggtgtactgtttgctccattatcattgttactcgaatacaattgactgcgagcagtcgtagtttaaccctactatggagcagtgtacgggacatattggaaatactggacttgcccattttgatcataaatggctatagggtcccaaatgtcccaaaatcctacatttggttgatcaggtgtttccacttgggggcagaagttatgattgttttgcccattattttgacctggcagctccttaccatctaccgtttggcccacatttgcatgtggcctaggattggactgtccggcacgcaaggggttttgggtgtgagtcattagaactttcagcccgtggttattctcgagtaggacatacggttcctttctacgaagaggatctcgaacaacaagaatatcttcttgcaattactttctcgtctgttggttgaactattttatcaactcggtagtttcgtgtgaccggtgattgatttcctccggttgagctcttagaatctcttcctgtttatccatccattatcttaaaaaagttttttttcgttgcgcaaaagcctcattcatagctgcccaggtatcaccttggtcgtgatgaagtgtattagtgtggcttttaacttgagccactgcttcccttaaattttacagctcggtgtcatcatcaatcgtcacctgagctccactttttggcggcactctagagcccaacctattttccccaacaccattggtactagtgtttgttgagttttgtgccctaaataaaacccattac

SEQ ID NO: 114435 - DNA, 2746 bp, Cannabis sativa
  modified_base (43)..(52): a, c, t, g, unknown or other
  modified_base (2681)..(2719): a, c, t, g, unknown or other
attcaatatcacctgttgatccaacatacttgttagtaaatcnnnnnnnnnntaaaataatttccaacatattcatcatccgctttcataaccaagatcagagagataaaatgttgaatggtcgttatgttttctttgattgtaagcttgtggtaatgaagccatggaacccgatggaagatttcacgaaagaagaaattacgaaagtcccaatttagatccagccgaaaggattggacattaaatattggggagaaacttctttgttcaagattgtatttcaattaggagaatctctccaagtggatgatgtcacccaaaacagggatatgctttcttatctccgaattcttattgaggtcagcctagcacaagtgtttcttgatgtagtttctttcacgggtgaatttgatcatgatattgatttggaagtaaaatatgaatggatcctattagtgtgctataaagaaacaaagcaatgcaggaataagagatagcaaaagaaacaaagaaagtcttggttcctaagaagacaatggaagtacacacggtagacaaggatggttttcagttggtttccaacaggaagaaactgatactggaccaacaccagcggaaacaaatgtaaagaacaaatttgaggccttaagtacagatcaagaaatgggagaagaagttgatccagaaatggaggagcttgcaacagttgccataatggataataagggagaaggggagatccctctatttccaatggatagaatcttatgttgaaatgtgagagggattgacaaccaacaaaaacatcaagaaatcaagcaattaatttattcgaagagagttgggttggttagtctcttagaaacaaaggtgaagaataagaacatgggaagcatgtatagtagtttattttctagatggtgttttacaaataataatccatggatggataaaggtcgaataatagttgcgtggcaacctagtatttactctattgatataagattttgtactagtaaactaattcattgtgtggctctatccaagttacaacaaggggagtttcatatcacctttgtttatggcttcaaagaggagaagaatagagaagagctatgagataatttgaaggaaatatctactatagtaaagaaagtctgcattgtaataggtgattttaacgacactctcaatgctaatgaaagagttagaaggaagattagccaaattccttcaatgaaattttgaaattgtgtagaagcttgcaagttggaggatttaaaagcttcgggctcattctatacatggaacaacaagcaaaattcagaagatatagtcttctcaaaaattgatattgcccttatcaactctgaatggttggatcaattccaaaatttggaagcatgtttcctttctgaagggtgttttgaccatagtcctatcctggtatctattcattaggatattactcatgggaaaaaaccttttaggtattatagcatgtggaaagctgctgatcattatgatgtaaaaaatcataatagctggaagaaggaagtagaaggcactgacatgtacaaacttgtgagcaaattgaagagattcaagccaattttgaaaacaataaacatagatggcttcaatgacatatataaggttgagatggaagctaaggagaatatgattgaatcgaagcacaagagaagctacagaaagaccctcttaatgcaacattaatgaaagaagaataggaagcttgtgcttgttactccaagaagcatgctgcatattcctctttcttagcttaaaaggaaaaaatcaattgggctaagaatggggataaaaacactgctatcttttatgcatcgttaagggcaagaagactgcaaaacacagttctctccattgaagatgccaaaggtaattggtgtgatacaccagacggggtacaacaagcttttcttgaatactacataaagttgttggggtcaaaatggaaaatatgaagaaagtccatcaatttgtggtagaccttggtccaaaaatcacagctacacatctagacatactgcaggccaagtacactactcaggaagtcaaagatgcactctttgctattcctggaacaaaatcctcgggacatgatggatttggcagctccatttatatatataattgggacatggttggcgctgatgtagaaagagttatattgtcattcctaaactcagggaaaattcttaaggaaatcaatgctaccacaattactctcatttcgaagacaatttgtcctggtaatgtcactcactttagacccatttcttgctgtaatgttatatatataaaattgcttctaaaatcatatgctcaaggcttcgattgagtctcctggatctaattgcggagaatcaatgtggctttgtgcatagtagatacattactcacaacattatgatctatcaggatatagttagattgtatgggaggaaaaactttaaacagagttgtatgatcaagattgacctgagaaaggcatatgatacaatagcgtgggatttcattgaagagatgttaggggattttggattccctcagaaattttctcagcttataatgactcgtgttcgaactccaaaattttccctatttcttaatcttgggaatattttaccaggatctannnnnnnnnnnnnnnnnnnnnnnnnnnnnnnnnnnnnnnaattctctaaaacaatgaaataaatac

SEQ ID NO: 114436 - DNA, 1785 bp, Cannabis sativa
  modified_base (431)..(459): a, c, t, g, unknown or other
aaaaaaagtatagtttttttatggtttaaatttttggtataataataaatttttttaattatttaagcatataaaatcaaaattccctttataattcaaaagcttaaagggaaaaatagtaaaaattgaatagattagtcaaatttgaagaaatattaatattaataattatttaaaaggatgttatacaaaatagtatagatagagcttctagaataactttataaaaagtatacgttaaggaacttatatatataacatagtttgaatgaatatttgtccttcatttcaaaattattattcttttttatttccaccattcatacacactattaatttgaatgactatagtgactaaacatgcacttattattcttacgtaatttgtatgtgacttctacatttcaaaaaattataataataataataannnnnnnnnnnnnnnnnnnnnnnnnnnnnataataataataataatatgttgatatatgtatacatgttaaagttgtttaatgttaaaaaaattatattatttaaacatcattttatgtgaaaacataagcaaacattgtggataacaagtctagggagcacagcatatatagaaccactaatgatgaaaaggaaacatgtgatgagagaatataaaaaggtaaatatcattttgaattttataatttgtaaaagttataaattagactttttattttattgaatagcaaaatagattttttattttctaaaatagtataaataagatcttaaactgttttttgtcaaaataaaacttataataatttaatttaaaggtgtcatgacaaaactagttaaattttctgcatatttgtgttgggaattatcttaaagttagttatattaaaaaaaatatcaaaaaattaagctcaaaatactatttgtattattttaaaaaatataacttattttgtcatttaataaaataaatggttcattctgtaacttttataaaaatataaggtctaaaataatatttacccaatataaaattatggaaatttattagctagacaaagtgacaaacattatctttagattcttttcattatattatgtcacttaagtcggtttttttgaccaattaataatcatgaaaattgatctctacaccacaaattcttgcaaatctctacacgataataaagaaagtctttatgtatccataattagattagagaccaaatttataatttattataaacacaccttgtatttcaatcttaaaataaatgttattgttcaatttgtacacaattaaacaacattaatgtagattattatatatattgaaacaataattaatatacattatttgtcaaaaaaataacaatcttatagattaattaatttaatcaggtgagacataatatatcattcttgttatttgtgtttctggatgaggacacatgtaatttccaaagtcggttccaattcaatcacttcaagcctaatagcattagcaggttcaaccaagataatagaccagatccattaacgaagccaattcttttagatgacagacaaatgactcatccagggagacaatcttccaacatagcatgaatcccatagacatcagttggagcatccgaagaagtagtttgcaagcgttcggacatctagctcggtatcacattcattaatcactagatcctactaggggtgtgcagaaagtcatccaatccaattctaaccgaccgatccaatcccaaccgatccaatagaatcggatatccaattataattggatc

SEQ ID NO: 114437 - DNA, 9605 bp, Cannabis sativa
  modified_base (193)..(213): a, c, t, g, unknown or other
ttcatattgatacttgttagtaaatctaagtcctgttaaaatataatccaacagttctgatgtaagtgttcagttgtacgagctttaaggaactctaagaacataaataatacaattgagatcgaacctaaccatttcaagattaaaatctacagacctaagatcaactagtaatattgacttggaaagatannnnnnnnnnnnnnnnnnnnnttatccaagttcaatatcagtccaatccaatgtatactctacatatctgatgacaatgccctggaaaggacataacacctctgagagagagagagagagagagagagagctctaaaatacttgtataatgaaatcagtaaaagtggtgagacttttgttgcaaattctatttacaattacaagtaagaacaaacatgatatctgtaaggtctatcgtacaaggagtggactacttttgtagtccttccggcaataaataatgcaagtaaatattaacaagacaacacctttgttacaaaccatacttggttggatcacatgaaattccttgacaatgggaactaagccacatagtttgctgaaccatgacgaatttcatctgcgtgtgcagtcggaacataaactgcatctcgcagtgagctgtgtgcacgaccataaaacaaatagaccacgacccctataaccagccacacagaaacccgcgcccaagttgcagctctgcacgtgaaatgaaagtaaattttctattagctgctagagaaagaaaatatgcaattcaaaaactgggaacagtctcagaagcccaagttccaattccaaaggacagctatgatgaataagagatattaactaaggatttgatattatctgatttcaatacttatcaattaggattgtttatttgctcgtctatatgactgcctagttatgttcaatttttagaagtcttgccttctgaatttatcaaactagtaaatctcctacacaaacaacattttcaatatctctgaagaatcaaaagatttagttggttgctttgagattgcattgtcctttcttgccaatattattgagttgttttctttttctcagctaaagcatacgaatctatcccatggttcttggaaaaagaaaagtataatgtaacataaaataaaataaaagaacatataaaagtaataattaaataattacccgagattaaccagaaggtacacattgatgaggatacaagcaataggcagcaatgggacaaacgggcaaatgaaacctgaaaaaagaaatagatgatctctgttaataaataacttggatgaatgcatttcaaaatattatggcactctagtacaaatgatatggatatatagtgcacttgggcatggctacgtagagggttgcatgacttagggaggaaaaatattgaggagaggaagactcttctcctgttgtattatatctcatatgaatggaaggatccaattatgatgagataattataggctaagcctgataatacgaaatccataataccatttccatacacaaactaatcctccaaccgctcttcttcctcattccacttcctcttatcaaacacacaatttgtgatgtggcccaaggaatagcccaactcatatataggtacacttgggcatggcataaatttatgagacatgcttaacaagtatagacatagccatagccgacttctcaagaacatctaaccataaataactgtacctattttcaccaatatctccactgcttagtagtgtacttgcatccattaattcaaagaaataccaagtataccccaccccccaagtattaaatataagtagtgagcatacctcctgcgtgtccgaagctgtggcgtgcatcatcttgatctatacaggtcagcacaacaagaccagataaaataagagcaccaccaactccacacaatgagtaccgaagaaagctggaagaacaattaacggacaaaatcttaaaagtgggaaatgccaaaaaaaattgaaaatatatgaaaatggaaaccccacaaataatgtgcaaccatttttacttaattttggggtcaaccagaacaactaaaaccacaagtaccttccacaaaaatgagaggccagtgtttacatcaaatctctgagaatcaaaaaatttgtggacaaaagagccaaatggcatccatgactcacatcacataccccatgtaattgggaaacaggaaatactatgagccaaaattaaaacgaaccaaggaattaacataccttggaaagcccaaacttgaagctgaatacgcaaggagaaactccccaatgcatgttagcataatcgtccagccagcaatttttcgccttttactttcattcataacatctgcaacaatcaataagatggtacttaaacatttttcagaagaaaccagagacataggataggaaaatcacatagcatgaaaaagaatagaatgcataattagattcctaaatctcagaacaaacaaaggtcgtaacagaaatccatgctctaacatatccatgtaacagcccatatgccaaactgaacatagaaaaaaatgatgctactgaaggaaaaatacaattaaataaaaaaaagaaaaagcaaacaaagcttcagacatagttcagtcacctctaacatagttttaacaagcgggggaaaatattatagcagcaacaaatgtaatggtcacagtaccaaaacagaaagctattgagcgcacatcaaatgcttgaatttatttagcattatagttataaagtagatgtaattggcatcacaataagtgtttgtacctaatttcataggaataagaaagcattacaggacttacagttgccaatatgtagatgtttggcaatcaaaggaatttccacggagacatctacttcatcaagtaaaggttgagcactatccttggaggagataacaataaccttgggatcttttccgttgcttttcttactactctcaccatactgcaatgcgaatgaatcaatggactcatgaagagatggtggcagtggcacctcatctggtgggacatacctgagtattaatacagatattgctaccatagtaaacgcaacaagtgtacccacgctgacctgccaatggcaaaggcatcagtacaaaaaacacaaactggaattcaaagtttaaatttgtacgtttttataaaaggaactgaaaacattcaaaaatgggaaaatacatcagactagaaattacagcaagaaactccaatctctggctaaatcaacaaataaccttcatttgaactctttcacattgtacaaccaaatagctacccaatatctaaccttatctcataggctttcaggattaacctcaaaatcttcaaaaattcttatgttcaactctaaccaggatgcccagcacataaccattatagctatactcaaaatttacatttgtagaaactacctatgaaacaacagatgctctatgactatgatacttaacaaacaatgagcattcttttttttttactaccaacatttttccagcatagtaatctgcataataggcttgcatttccactccctattgactcctcatccctattcatcagcagtacattggaggaaaaaaaatgcctatattcaattgaaaggacatacctagataactgcccaataaatggttgacgacataatccgtgataatttttaaaatcttcaatactctgaagcttgacaccttaactagatgaccagctaataataaaataataggaaaaaagaatgtgaagcagaaagaagtacaaagaaaggagagaagtccaataattacaagatagatgccagctcccttaagaagcctgaaaagaatagattcctgacatgttttacatcaaataaccgcaaaactacccaatacttgattctcccaacattatccaagttttcagatttagaagacacttgcaaaaacaaaaatgataggaaagatcacagctaatgttttcggcatcactcaatttttacatcatatcagttttgttgagttgctttgtgataaaaaaattgctcccaataaatctcaatgcaccatgatcttctctagtaccgccactgtgtgcatcttcataacaaaatgaaaaaaaaatacactacattgcagaaaaaaaaaacaaacattgcaataattacccagaaaatatgtaacttaccattcccgccaattctgaaacatccataaagaatgccaagattgcagcaccaattccagttaccagtgtgctctttataggaacttgtgtgcgctcgttaacatctgaaaagaatgatggcagcaacccatccctagccattgccatcagaattcttggctaagaaatcaagaaataacagtgttatccaggaaaaatttaaaatagaattaacaaaaaggaaagatacataaatgacaacaatagaagattcatggtaataaaccagcagaaaggagcaaatgaatcttcacatttaagaaataatataaatttaggagggcaacctactgagcaataactactatactttcatttctggattcatgataaatatcacaaactaaaatacagcctgtaattgaatagtactatacctaagcctaattagaacattaattcagtaattattttaagattagttattttataatcaattactgtatcaagatctaaatcaagtagaagaaagaagctctggaatgtgacatcatcggctatatgccggcactcttgctaaaaaaatgttgaattttttagatattcaagaaaaatgtttataaaattgagaaaaatcggtcttccttgttctatcactgtcacgtgataataagaaaaacaggaatgtgtaaagttccttattttctttttctttttctttttttttggcaaacataaagataagacacgtttggtggttatttaaagtgatcccttatgaccttctgtattcccagcatcatcttttgcaagttgcaactctatcctttctctaatactaaatatggttccatataaaacaaaaatgatcaattattgtatgataaactaaaaaatgctcgtgcttgtaaagcattgtttttcattcttccttctgtcttacagttaacgggtacattctgtatcaggacagactactgcctacctttgcattcctattaccaattttaaataaacaaataaacttaactataaatatacatatatttttaatttttggccctggcagtttaagcaataaaactcccataggccccaagtttataagtctaggcagtggccccagctgaacttatattaataatgaaaaaaatactagtttgagaaattatactgaagacatttacaacaagacactctaatatttagctagctaagtgaaaaaaaaaaaaagcggggggccttttgaactcgttcacattgctacccaatatctaactttatcccacattttcaagacaagccacacccaatacttgaaagaattagaaaataggtatttattgataccaaaaagagatattacaaagttccaaacctttcgggcagtttggtatctccctgagtaatcttttactcacttagtaatataggatagctcacttaaagctactaatattttgacaactcagcctctaaaattctaatcaattatactaatgagactaatattaaggtatataacaaaatcatattctatttccactgtaaacatgcatttctattattagttatcaaatgtacaatcatcattcattccaaccccacataattacgaccatctctattacatactatcttaattgcaaggattgagcagggaaagggaattggtatcaaaagacaaagataaagatatcttagttacgcgaaaaatcctataaatggtgtacacccatatctagctcaaaagcataatacagcatgaacaatagctagctcaaaagcaaaaaccaataaattgtgaaattgtgacagaggaaaacacattaacaaccaatttgtacctgaggaaggagagaacccatcaacgtcgagcagagtgcagtaacagctccaacagttatcacatacctttaatgacaagcataaaaagtctgttaaatttagtcacagctttcaacaaattttcaaaaattatcatagcatatctgtaaacttacgaagcccaatccatcccatggctagcaaatgcagtagagatgggagtgtcaggatccattgcattatagggtaccaaaccgacgatgacaacagagaccaacatgtacaaagcacagcagatagaaagtgatgctccaatacccagaggtaaatctcgtcgagggtttttcacctacgaaaataagaaaaataggcacttcaaaaatgtaagctcccctttattaatcgcaccccataccccaccctacccaaaaataaattttggtaaagacaataaaaaaaaaaaatactagtacctcttcagcggtgcttgcaactgtatcaaagccaatgtacgaaaagaaaactgtagcagatccagcaagcattccatcaaccccaaagggaaaatacctttagaaaaggaagatatattttttaaaacattattattcatctatatatattatatacatagaaagagaaatagattgcctaactctattgtatcctataaaagaaaacagaaaggcaaaaaagatggttgtctaaatacccagtaggaagctcatatccaacccatccagacttgaaacccaagtaagtacccgctattatgacaaatagcagtacgcaaacatttgctgttgtcactatagcttgtgctagagtactctgcaatatttaagtgatataagatgagcctaacaaatttgaggtaatggaaaacaatcaaatgttggcctcaaattaaacaagactagagcacaaacatatagcttacttccttaattcccacagacaggagcccagtgacaacaaataccaaaactgcagcaaagggatcaaccgtaatgtcaagcccagggatatattgacggctaagaaaagctggcaggttgttctgtcctccaaaaagaaatccctataagagaaagaagaagaggaaaaagaatgcgggtaaaaatagtgaaattattgcagaaaaacagtaactttcataacccaaagacaaatttaactttcatatcaacatcaagcgacagagactcagacagctgccataggaacttcatacaaaatgtaagaaaccaattgctaatatcaaaaattttggactgcgcaaaaacgacgaaacaaaatttaatagcagcattgacaataaatcttattcaaattgaaattcaggaaagaaaaaaaaaagtttagagtttaaggaatttatataccaaatttggagatattcctctagcaacagctgccccactaagtgtatattccagtaataaagcccaaccaaccaaccaagcaagtctagcaaacataaaagtaaaaaaattacaatctgaaaaaataaaccacatattgaacacccaccccattccagagaacattcatcatatacatcaaaacagaaacttgagattagtcattcctcccctccaaggaaaggaaaaatttgagattgcaccctatttccttacctatatgtataatggaagttttgtcacctttgacgtatatttcgcaataggcatttaatggcataattcaaatggtgtttataattttaattctttcaaaagtacccaattgatgaaacaaataattaaagaaaaaacggaatacccttctccagcacatatatatgaataatgataggcacttcctgcagaagggcaacgacttgagagctctgcatagcaaaaagctgatagagcagcagctattccagctattaaaaatgaaatggtcaaggctggtccagtatgctctctagcaactgttccaactaggatataaactccagctccaattgttgagccaactcctgatcaaagtatatagacgaattaactgatgagttcaggaaaacaaaactacaaaagatacaaatgttacatgtcaaactaggagagtcaagggatatctgttttaatttaagaagaatagtattagatcaaaactttgtttatcacctttgcttttcgtgatcagcactttgttgatcatctttacttttccaatggtgacaatataactagggatggtaattcatgtcacaacccgacacgacaacacaaactcgacatgaattattacgagtaagtgtcatgaaaaataggtgtggatcgaacccgaatgacaaaaacaattttttgcgttgattaggttaaacacgctcgaaactaacatgaattaatctgtttatattcagtatattgttgaaattaaagaaaattactcacaaaaatacattatagcttattcacatttgataattatttgatataaagaattttgttccatgacacgaattgccaacccctactataaatggctctcttatgtaatcaaacaacttctgcctcaaactagagaaaataaagtagcgtcccaatcaatcagttttgaactgttgaacattaaaatttgacagtagacttgggtgatagaaatgtgttaatatcatcatacaactactgggcatacattaatctaaaacaaacagcttcaaaataataaaatccatattaataaatgggaagatcgaccaattattggagttagtttaaagaaagaaaaaccaaatgttaccaattgcaacaagatagggaacagataactctttggccaattgaggtcctttcttatcattagcagaatccacctgtttcctcctggtcaagctcttaatgccacctccccaaccccgtgaaccccgtgaagatgataatgaaccaccatcacaatcatctgaaacacccatcacacaaaaagaaaattcccaacaagattttccaaagaatcacaagaatagtctctgtggttgatctcaaagaatcaaaataacttggagcaaatctgcccgccttccccaattactgatcttgggaaggcttgaaattttgaagaaatagcgggcagagctcctgggattttcttctttcttgcttattatgactctcaacttgatacgcaaagaaaaatgattggtagctttagcttgtgattaaagcatttcggattttggattttgtttaattaattaatattatttttctctttctggtcagattctccatcactgatgacctaccccctcttatcagctttatgggattccattccatgcaatttattcttactactagtggcattgcactcacgcgccaagattgtgggttggctcctaaaaatatttaagtgcgactattttaaaaaataattaatgttttaaaaaattatttcatatactatttttttatttttttttttaaatttaaagtttgagtttctaagagggattatattacaaaaacataaaaacaacaaaaaaaaattataaaaatacagtttcacggacttttaaacatttttacgatttttttgagtttatttacagaaaatacggtcgttttat

SEQ ID NO: 114438 - DNA, 2590 bp, Cannabis sativa
  modified_base (2248)..(2287): a, c, t, g, unknown or other
aaaaatcttaggtattattaataattatttctcaaatttattctcctcaaattatcctacaatttcttcggatcttgatgagctcttcacaaaaaagattgatactctgacaaatgatcaattggtttatgtttcatctatgtaagtgattaaagaaacaactttttgtttacatcttgacccagattcagatggcatgttttttttttttaaaaaaaaattgggatatagtgggagaatctttttgtgctactgtttaggaagtattctaaaagggtgagatcgatccaacccttatcccaaagctcgagaattttcaaagaatggagcagtttagacccattagtctctgtaatttcctttataaggtggtggctaagatcatctctaataggttattccctgttatggatgatttagtttcctctctgcaagcggccttcattctaggaagatggatagcagaatcttctattatgactcaagaaattgttcacaagattcaacagaagaaaaggaaaggaggtcttatggagatcaagttggatatgttcaaggcttatgataagatggaatggtcttttattcatcgggttctcttggctaatgggtttgatgagagaagctacaatctttttatgcttgtataaggtgcgtttcctattcagtattactcaatgggagtccacttaataacataatcccttaacggggtcttcgacaaggggattctctctctccttttattttccttttatgttaggaagtcctctctaagctcattcaaagagctgaacttagtgggtctattcatgggattaaaattgtgcacttagctcccttgatttctcatcttatgttcgcagacgatactatactattttgccaagccaatgaaggggaagctaaagcattcatacaatgtttatctatttacgagagatggtctggtcatgagtgtagcaaatcgaagtctattgttcttttttctaggaatctgagcaattgtcgaaagcagtctatattgaaattccttgaaatcaaatagtccaatggagaagaacaacacctgggcaatccttttgtcttttaaaggaggaaaaaacaagactatcaaaagctcaagtatagtatgtctaaacatctagaaggatataaactgaagcttttgtcttatgctggtagactaactctaattaaatcagtggtgtcatcattgccgatttatgttatgtccaccaatttggtccctctttcaatctgtcgtagtctggatgccatgatgagaaaattctggttgacaagtaatatggacaaggataggttcatgtcttataaatcttgggattgcattcgtcaaccaaaaactcatgggggtttgggtctaaggaggtttaaggatatgaacaaagctcttctatccaaacttgcgtgaagcttacccaatgatgttccaaaactgtggcttcaatgcatgttgagaaagtaatgtcgttttcaaaatttttggtttgtggagcataagtctaatgaatttagtatttggaaggatatccttaactctagagatatcattcttaatgagtcagttttcttggctgcatgtggagactctattgatgtttggaagcaaccttgtattccttggctgaagctagaggattttcaagatttaatgaggagtttaggaggtagtggccttacaatgaaaatagtggcacatatctcaattaacaatctttggaataaggagatggttttacaaatttggctaacaaagttttggaaattccatgaattctgactcctttcggtgaccaactagtttggaagcataggaaaaatggacagtttactgtcaatgatgcatattatgtggatcaggttctgagatttaggtcaaagcaagagatttaaaaatggatctgcacccgtcaatacatcctaaggttgctatcatgttgtggaaaattctgaatgaagctcttcctaccaggtctaggcttccttttttatcagaaaaagattgtctcttgtgtggtgttgtggaggaaagatgtgttcatcacttcaaagagtgtagttttgtgaaagctatctagttaagatatatttttttaaaatatttattctaaaatagaaatatcttaacttactttctagatatttgttacatgtttgtttgtttgttttttatttatttattcaattttttaaaaacatgcctattatttatttgatctaaatnnnnnnnnnnnnnnnnnnnnnnnnnnnnnnnnnnnnnnnntaatcatagtccaattgttaatagttcttataaataatttataacaggtaaattttgtaatttctttcatctgtgataaacctagtaacatgatagggtccattcaaatcatttgatctgtgtgagcctatatgtttgctttttgggcttagatgcatataggaagcccatttaagtttaaatgaactaagttgctaaaataaaaatatctcataaataattttatttaggcacaattagtatttggctgattcaataaataacaattatttaattaatcgttaaattcttctcttttgggcc

SEQ ID NO: 114439 - DNA, 3395 bp, Cannabis sativa
  modified_base (99)..(99): a, c, t, g, unknown or other
agccatgagtgtaggagctgggcgaagaatgtacatgtcctggccatactagaccaagcgggttgggtctactagtgatgtattttgaaactctatttngccgcttaggccggctgaaagaaatacacttgtaataaagtttgtaaatatttttgggatcccaactgttgtaacttttagattgtaaagtttaaattattacaagttttattttccttccgtttagtataaaagtttaaattccgcgcccttttgattagtaatcttgtttaggggattagagtttcataattatttttggtagcgtgcctaaatatttagagcgttacacattatgtttatcaaactatgcacacatgattgaaaaagacacattcattacagttttttttactcagatagcactctaagaatttttgctcaattacacaacaagaggcaaacatggaataaaataatatggatatattattattattatttattttcattatggttaatcattttaggtttgaaacttactagtaaaccttggtctaggtcaattttaaaatatgttggttggaataaaataaaacaatagaagaattattaagaaccagtttaaatcaataaaaaaaattatatacaaacaagaaggaactagatgtaaaaatacagagacataaactaaatagaaccgatttcacaataaaataagtaaaaatatacaacacacaataactcagaaaatgattgtagttttttttttaaaaaaaaaacgtaatataagctgctatgggttttgaacccccaagtcatatcaaactatcaattacactaacactgtaataaacaaagagaacaagttctaacctaaggtaatattgctcgatgtataagtcgtgcattactatgtaagaactccaaggattctgctatctggagcaacccatgcttaacctccaaaagtcctataacttgaagccaaattcttttaaaaattcatgtatcaaagggacaccttgcagataagattataaatattgaacataatgcatagactattaatagtttaggaacaataataattttgaaaatatataaaataacacaagatttgcacaattcaggtttaaatatccaagccaaaaattcaattatcgaattctaatataaacttacaaaaatagtctggatttagttggtataccatgagttgtgatgtaatcaaacaacttaagtgacttagaaacagctcgatatatgttcagtgataaaacatgcaccaaatagttatccacccacctataccacaacaagtattgcatttttagtgctctagaataacgaaattaaacatagaacatgaggttggaagatggttagatgatgtttatagctatcacaccaactccacttcttttttttttttcgttgtccaaagtgtggctcttaggatatatccttttatacagagtataaattatatttgcaaataaaaaagaaaaaaaactagattttaagcaatttgcacacaaatgatgggaatttttcacacaagtagtattgtgtttctaaagcataaaaataatttcaagacatggattccatatatagtaccttgatcataaaagatagaattgttcttcataagagtgatgtggattcaatttccacatagggtgatgtggcagttaataagagtaacatgtggagaatatttccaaagcctggatagattgttgtccagagagttttacgtaaaattaattaagtttaaactttcagcatgtattatctagacagtccatgtatgcaactatctgagcaagttctcaccactcagtaaagccaaatcctccgagcaagttagcacggctgagcaagatcttcaaggatattttccataaatatattcacatttatagtttaattaaatccctaattagtgggattgacaatcattagaaagaagattataggaaactagcttaatttccgtttttattcctaattgttttgggaaaattaattcatatatcattccctataaatagtgaaattattttattatttggggatccaaattcatatgttcttgagatctattatgctgtcgaaaaaaattgtaagtttttccaaaagattataaagaaactcacttgcctagctccttgtgatcttgataattctttgaagtaatacaagtaaaaatgggagtaggctattaccataatcgcgggatcaaacctctatagattctggtgttctcattgcttaacttcacttaattataattcataatctcaatgcttttatgattcaacgtcgttggctaaaagcgagatcaacattttggtactttcattgagagtaaaagaacacgatttgacaattttgattctctacaagtcataaggaaaaatgatcgtgaatacaagaaggtcccaatccactgaatcaacagatccaatggccacaaatcctaatgtggaaactcctactaattgaaaagatcaagtggtgacagatcctgatctgagcactcacctgcctccacaagtcccaccatcagcaagactgggagtggcaacccctgtggtagggttcactttgggtacatagaaaactggaaccactagcactcacaacactagagaagctagaccaggtattgaagaaccacgaggggagattggcaatgatattgaattataaaactgagggaagcctagggcacaaaagtactcacggtccaaatccatcaactagcgtgccccagttgttcagctagttgtcagagtttgtctatcaacacttgtagaacgtgttgcaaccatcctgctagaaacattcttgagctgtggctcgcaatgaaagtaccaaaatattgacttagaaatctagactatacttttaatccacaccgtagttaactatttataagagtgacataaaatttagagtagttcatccctatatcatgatagtgatggggtgatacactatttttactgcaagcgtacaatgttgttataccaaagttttaatactttgtcgaacccacacggattgattattaaattttactaattattatactttttaattttatactttaattaattacacaaagtaaattataattaagaaacaaataataagataaatagaaaaataaatagacaaacaacgatttttaatcacaaagtaaaaaacctagagcattgatttccctatttgaaactataaatctcaatttactgattatctccatttatcctataatttgtagtttcaagaatccgaatggaacctattaacctctctcgagcgatgatagatttaacttagaataactaacacgatatctctattcaatgttaatcaaataagcactcataaagcaatat

SEQ ID NO: 114440 - DNA, 3643 bp, Cannabis sativa
  modified_base (667)..(667): a, c, t, g, unknown or other
taattaataaataagttaaatggaaattttatttgataattaattataactattaattataactaattaataaatatggcattattgaaagaaaagatgaattatgaaataaaatggcaacattgtaactagtgaggcccactactatggccagccacttaagcttgatttttgcttattattttatctttttttaattcatataattaaatcctaaatcatagttaaaatactttacaaagaataagatggctctctttctcatccaacttaaataacctagttttcattctttgtcagaatactggtaaatgaaagctccttcctttttatttcaaaatccccttctattgttcttcatctattttgaacctttagtgatagagtaccatgccaactcatagcaagtcaactactcaatcatagtatagaacactctggttaaccaaaccgaacgagagaagatctaggttcagatcttgataatgctctacgactgaaaaaaaaaaaaagaaaggctagagatctgaacagaaggagtcattattattccactaccatcaatgtaaggtttttgtaacttgtatatgtttttttgtcatcgtattaggaaattgatatttagggtgttagattaaagcaaataatcaaacatacatgttagtanatctagatcttggtaaaataacttccaacaaaaagatagtgagttcgaaacaagtaattgaagtttgaacttccatcccagagttcccaaggtcaacctgcacacagtgcaagagatccctcccaggttggttgttattactttggtctactaaactctatgatgtcaaatttctgagcacgtgtcaaatattgatgtgcctgtcaccaagaaatttttctgggctaacatttccccccaagtaacctttagccttctgtggagttgacttgatgatgtgaatcgaactcgtatctcttgaaactaccagatgggcatcaattttgataattgtagacaattgtttctattcttcaagcatttccaatagaattagtacttttaaatcccttgctcttttgtgtgggatttttcaaaaattaagtaagaaagaaaaagaggaaaaaattatcattttttcacttatcttttatatttttctttaaaaacttgaaatttcatgtattccttgtgacattaggattaactgaatttgaatcttaatcttatttacatatgccattataaaaatcagaggaaaaaagaagatgagaaaagacctttgatctcttgattattatttattttttttcttttgaatcactaatttttccttaatcttattagcattaggaattgatgttacattttaaatttaaaagcgtattcctattttactaggaattttgaatttaaagcttaaaggagaagggaaaagatatatttttatctttttcttatcatttaccttctccattaagattttgaatttaaaagactcccaattgcttaggattaggagattgaactcacttataaataagagacctttcactcaaatctctcacactaccctttcaaatcacccattgcaaatcctttattaaaaatatagattttcatcttcataaaattttcaagtgctctttatccttcaaggtaggatttatttattttattttttctcggtgacgatttttttgtcaagaaatttcttcttctcctccttttaatgagcttgctgtctcaaactcccaaaaacctttgaatatttttcccaagacctcttaaattccaaaataccatcattgtaaattgaaaatttcttcctttgaatttacttgaacatctccttttcaaaaaataaaaagtttattaagttgtaagcaacttgaaattttgtagttaccatggcttggatgaagagatcgtagaggattgtctcataaatatgatccccatgtggcttagttcattagagctaagttaactgtgtcaaagtctacaaacttagaaaaggcgtgtggtgggaaggtaatggcagctagactccttaaagttgcaattgaatgtgatgacttgagagatcagacttttagactaagacccttgtgtttagcactcttactaaacatcaagctcaattaactcgagattattattgtcttcctaaaactgtcatccaacaaccaggatatggtagtcctaatggctctcaaaaaacttgctatagtgttttgtcgaggttccatatgaatgttggtggttacttgcccttgcatcaatgattaatatcaatagcatatttttttggagtttgtctgtaacaaattaatctaaatggctatagaatccttgctgcttttttcatatttcaccgcgtgagaaattggcctttcctaactccccccaaaataattaacttcctttgtgacctgaaaaaaagtcctactcgaaaaagaagaaagcttctaacgcttccaccagttcaacccatacatagataacattagataaattaactgtagtctttaccacttggaatatttctacactgcagttctttcgtcgagacacgtaactttccaaaaagttggccctttcaaattacatggacctctaattaacatgaagaggagagttgatgccaactgattgagatagatgcatgagagagagagagagagagatgagagaactttgtttagtactgaaaatcttcaaaaggttggactgataatgtcttgccagtgagtttgtgttgtaactagatcccttaacgaatcctggataataccagtcgagcaggatgatgaggattttcaacctacaactgtcatcttgtctgagacagtgtcagaagatgtaacatcaattcgaaacgacacaaactattcagggaaaatatctgtatgcttagactaggaagatggagatgttaactacactggaacaactctagagaagaatggggagtcagcaagcggttgatgctctatattatgaagtttgaactttgttgttttacttttcatctattgtacaaattctatcagaaaaactacttttagtaagaccaatttaggcttatcaaatcataccataacactttatgagagtttaagaaaaagagtgatatcataggtcaagccactttgcataacacatttttataattatacattgtataattgtatagtcaataataagatttttgctgtgttatttttacaaatttacaagtacacttttatgttatttataattaatgctataagacattttattgcttataagatatgttatagtacactatactataatacttttttttgatattatcttaatattaaaattaatttatttcttatatttatagaaatatatattagcttatgcaattatttgtactcacataaacaaaaacatcataaaataacaaaattgaccttgaagcaaccaaaatagagaaagaaaattcttattctttattttaataaaggtataatgtttagctaatttaggcttacatatgaaaattagaagttaaattctatcatttacatatattttaaatagaggtgggcatccgatccaatccaacctttttttccacattcgatccaatccaattagtaattgaatttggaaaatcat

SEQ ID NO: 114441 - DNA, 2540 bp, Cannabis sativa
ttttttttttttgagaaatcagcattgcttttcattactccaatatactttttacaacctatacaacacttttttaaaaacaaggcctgattttcttttctactgtttacaattcactgaaccagaatgtatcttctattgacactttgctaggccatacactttgaatctcagttttacgtacatttttaattgtctgtacaataaccttcggttcttcatttgattgttgccaaaattttgtattcctagctctccaaatctggtatatgtatatcaatgctgcccaagcagcagacaacacttgtcttcgaaaagctgttatcttcttcttctctataagctgaaccaactcagccaaggtggttgcactagtctgccactccagccaattctttacctgctgtaagcatttgctggaaaatgaacattgaaagaacaaatgctcacaattttttgcttctctagtacatagtaaacattaagaatcagtgactactttaaatctaagtaatcgatcttttgtcttcagcctattttgaatggcaagccaaaatacaaaactatgtttgggagtgtttaaacgactccaaacttctttactccagctgaccgagtaagcgtggggcaaagaagcttgtaaccttctgccactttgtatcttgattgggtgaagatagtagggtcaagtaaattcataagcataccttttagtgccacattcttcctccaataccagcttccattttgaggggtcgaataactccaccaatccgcttctttgatgtatacactatgtatccatttaacccaccaattgtcttctttagttgcaatttgccaagcaacttcaagcacggctgccgaagtgaatcaaatgcttcactcctttgaacttgcattcgggcaaaaagtgaatgcaacaaagtcttccattttctttagccccaacaccgaagcaacccaacgacaccaaatctgcacaactcttggcatgactgaagctaatgatagttttctttatctgggttcgccaaacataatttgtaggaggaaaactgttatactaggcttcctcaaaaacaaaatcataaaccgtatcaatagttggaatggcaagtttctttcccgtgctggcaaagaaattcttttaaaaaccgttattcagtctctacaaacttatgcgatgagtgtctttcttatccctttagaaacctatcatgaaattgagaagatcatggaaaacttttggtggaaaacaacaaatgctaaggggcaaggcattatatggatgtcttgggatcgcatggctacacacaagtattcaggtggtatgggatttcgtcacctacatgactttaatcttgcagtgttggctaaacaagggtggaacttgttatgctctccttcctctcttgccagccggttatataaggccaaatattatccccagaccgactaccttaatgcaaagcttggacacaatcctagcttcgtctggcatagcatttggagtgcctaaaacctggtcaaacttggagctagaagagcaattggtatagggaattcaaccaacatcatgaagcatccacggctttccgatcccaccaatccaaatgtcacttcctccgacattggccttgttaatcaaatggtgagctctctccttgatactcattgtaaaacctgggacatctcactcgtttatgatatgctcaacacacgtgatgtagtgttgatccttggcatccctttaagctctacaatggccgatgattgatggtcttggattggtgagagatcaggtgactttatggttaggagtgcttatgacatgttgcagaaccagaaacatgggcagcatggtgtgaacaactcaggtttttggtataagttatggcatcttaaaattccccctaaggtaaagaatttcatttggagggccgtcacaactcaagtgcatccagaattgagaatccactccctgctcattgaagattctgagaaggagaccaattctccatctgttgagcagtcatcactatcctttgcgatcacagcagaatccttcccatagggatgatgccggttgtccttcctatccccactgtgagatttgttgaaggcttgttgcaccttctacttattgcaaaatctttgcaagtgtccagaccttccacagatttaacacttacgagtttccttctctctggacttcgatcttgattgagagtgatggtgtttactcttcaaacttactttcttgggtaatctccctctttccaaatacacttcttctttcttggattccttctccaattgtaattcaaaatctttcgagttaagtgttgcaacatcatcctccaatacaatcacgtctctacgatacttaatggaagtcttgacttcttgatatgtgattgggagctttgccatttatttcaggtgaataaggtgctgtcttatcgtgtatgattccatgtgagttataaaattcaacaaaagcattggaatcatattcagtgcctctatcgctacga

SEQ ID NO: 114442 - DNA, 1069 bp, Cannabis sativa
acaagataattatttataatatatgtaataaaaatattattttttatgtatttttttttttaattttgtaagtataatcacgtgcggagcacgtataattttactagttctattaaaatatatagaaagaaagatattcagtgtaagaatttaaagaagtgatatagaatagatttaccagttttctattaattatttgagttttgaaagttttgtaaaacaagcactacttggatggaactatattccaaaagtatgaagagcatggcccattatggaagaagtatatatattcatggcatagaccaaatacaatgaagaaggagagaaataaaacaaaggaaaatgggacaccataacattcataaccggtttcgcattaggacagatcatgtgctgtggtgatctcgtgttacactctttagaggaaggcttgaccaaattttggacatacaatcatatccatttctcttttcgtctcaatacattttatgtatggactttaattctcttataatatcttttttctgtttgtttcatatatatactttatatatttatatatatacatataatatcttatattaaatgtggttatttaattagtttaacagattttatttttttccgttaaaattaagtgttaaaactaattccgttaaatcaatcaattaattatcttttctttgtttttttaaattttttcaaaaaacaattatttaaaaatatttaaattcaatttttttgagacaaagcttgttattataaatcaaaacagagccatttacaacaacaaagaaaataacagaaagaattttctctaatcatatacaatcattatccaacactaaagtttgtttagccaatctgtacacggctttgttagcatcctttctaacacgagagacacaaaataaagagaaatagaataattgatgtgaagcatccagtaccaaatctagaaaacaagaaaagtttgatgtagaaccattcagagaattaggaataatcaacgaattgttgtgtaccaaaagtagtacgttttacatttatcaactcgcaagcgcac

SEQ ID NO: 114443 - DNA, 3123 bp, Cannabis sativa
gggcataaaacccaacaggtttctgttgtagatgaatttcctcataacacacaagttgctatagatgaaagagctgcatctgctactacagatgcaccaactgctccagctgcacaagttgaacaagtagcacacttggatccagctattgctgcttcagatttctctataataggctttcccaagccacttcctccagaagctatggtagatacatcctctaatgctactgatccagtgatttagccaaattctaatgctactcctcaaattcctagaactcactctatgatcactagatctgagagaggtatttacaatcctaaggcttatctggtctctaaacacaaatttcatgaatcactgttgcctcatgaaccaaaatctgtaaaggatgctctcaaagatcccgtctagaatggttctatgtcaaaaaagttgtatgcttttaaagcacaaggcacttggaccttagttctttatgaggcctacgtgattttaattaacaataaataattttttagagtcaagttaaatgctaatagaatgcaagtgaaaatcctgattggttgctaaagggtatcttcaacaaccaagtatagactttgaggacacctagtccaattgttaaaccagttacataaagattatttcttactttagctgtgtctttcaactgagaagtaaggaaattagatgtctttaatgtcttctcaatggtgaccttcatgagactgtttatatgactcaaccaaaggatttgaagattctcaacaccctaaatatgtttataaattgaacaaatatatctatagtttaaagcaagtacctcgagcttggaatgacaagcttaaaacaacacttttcaattggggattcaaagcttctaaagctgagacctctctttttgtatatggatcaagttctatttaaattattctctttgtgttatgtagatgatactttagttaaggacctaatcctacttttatacagaagcttattgttgatctcaatgcaacccattttactcaaagacatggagttagtttactattttcttggaatatatggaaattcatagagattccaaaggcatgtatttgttacaaagtaaatacatcacaaatttgcttgtcaaagtttctttggaatgtgctaaagtttgctcaagtcacattaacagttctcataagctagctcttactgaaggtatacattttgatgataaaacattatattgaaccactcttggagacctccaatacttgactctaactagacctgatgtagtctttattattaataagctctctcagtttatcgatgctccaaccaatgtctattgggaagcttgtaaacgattgtttcgatactcaaaagccactctatctgatggtttaatcatctctctagcttcctgattgtccattgaagcttattctaatgctgattgggcaagttgccctgatgatcgcaggtctactggtggacatgatgtatttcttggtccatttcttatctcttggtcagtcaagaagcaacaagtggttgctcaatcttcaacacagtttgaatttcgtgtcttagcaaatacaattgttgagcttaaatggttacattctcttttcactaaattataggttattttttctaatgttccctccatttgggctgacaattaaggagctactgttttagcagccaatctaatatttcacgctctatgcaagcatattaaaatcgatcaacagttgttatcatatataaagatagatacatggaaatatggaataatatatatcacaaattttggtgtaccgatcgtaagcatttgttttcccttgcttgataattcttggaataaaatgtgatgatatatcatcaattgcaataaaaattatagggtaatgtaatatatatatatatatatatatttatatacacattgtgaaattctgattgcagaaaattattgtgtacactaagtacgtactagtaggtagtcacaattgtgcatttgtgctataataaagcgaggcatccacttatttagtgtcgcccaaaagtgagatatttatagatgtatataattcttttttttttttttacgtacatatatttgtatctgattatatatatacacacacattacacaataccaaatcaaatcttagcatgttagcttttcctcggtagtcttttttagtaacataaagcaagacgacgtcattcttacctatatatgcagtacagagctagctatattaatatatatgtagtactacatagttgaggggaaaaccagcagcggtagtcttcgaacatgttatatatatagatccaaatttgtacgtgtaatttataagagtagaatgtctagttaaactactgttgtaatcatatgaaaattaaaccttattctaattttttttatgtatataggaaggaacaaattgtaattataatagatattctactaatttttgtaaaattaccaaatagtttttttttttagggaaaaaaggttagaaatatttagtatcaatatctgtgtcattaaaaaaaaaaactgaattataattttatatgaatatgttgtatcaattaaatgcacaaaatgaatatattttatttatttcgaagatatataattttgtacattagatacaataatagtttataatatttatattattaattaaacaaatacaagtttttgattcatcaaaaaaaaataaaaataaagaaatacaggtttgtacaagtaaaaatgtacaatgtttaggtagtacatcacttaatgcatatgtacaatgttaattaatgcactcaccactttgttatatatacgtacgtacgtgtttgcttagtgatacatgaaattattatataggtacgaaaatagtgctttaatttgttcaggtactctaataattattctgagtatatatgcttatctacagagatatgtgattttgacatatattcaaaaattaattagtaatggtgtggcacatatatgctaattagtaatttttctttttgacatgtagtaaattgtactccctgaacttttttggccgttaaaaattctcttcgaactattgagattgttaaatt

SEQ ID NO: 114444 - DNA, 1227 bp, Cannabis sativa
aaaaaaaaaaaaaaaaatagctagaagccttaggctacaaaaattatatccccatccccgcctctctttttgtcaatttatttgctttcaagagttcaatggtttgaggaattcaaacaaccctccaaggtctagtttctgcaaatagcaaataaaacacatttaagacaacaaacaaggattgataattgtttgatcaataaagtttatacctaaaactaaagcagaacaacaaactagagctaataattttttgatcaataaattaattaagatacatacatttttagaagaaaataaatccatatatatcagatatgttttgatccaagcacaaaccctcaccatagaccacggagaggtggagcatccatcaaccactatcccgcaccatagatcttgaacaaatcagagagaaggggagagatatagtgaagtcgagataacaaaactaaatggagaaagaactgacttttgaggtctgcgagaaccacggtggtgccagattccttgtttctcatgcatcatcacagccatcatcgtggcgaactcgctagccggtgctagaatgatgaaaggttaaagaatagagagggcggtggagatctatgcggaagccaatggcctaacgagctctgttgagaccccagatctgggccacgggcttcctatcccgtcaccgtcgaacactttcaacgtcctcgtcttgtccccgtcggccacagcttgcaaaataagaagtaaggagatgagagaagagaagagagatctggaaaaaatttttgcaatgagcggctgagtagtagagaagaggagagaagggttttcttaggtttaaatttattaaatgagataaagaaaatagagagagaaaagagtagataataataataatagtaataataatatggtaataatgggctggttaattttgtttttttaagagactcacgtccagcaatttatgatggacgaaaattataccccaaaattaaaaaaataattatttaattaaattattaagtatataacattcctttatgtttttaagtccacacttgttggaaattatataaatttttttttctagtccatcaatattggacataaaatctttcaaaaaaatgttttaggtccaacactatttttgttggacatgaaaaagagacataaaaagggtattttgtagtagtattccgttcaagttctctagcccttgattccttt

SEQ ID NO: 114445 - DNA, 4567 bp, Cannabis sativa
tccacccgcagctgcagacgcagtatcaccgccaagttgggcatttcggttctccaccgacgaatggaggtgggcaatttgagcatcccttccttgctagacagtcccagcagccagttcataggatggggcagccggtgcataaccctgtgccgggctatgtagaggacttggagtcagccaatgcaacaggagggaggaaggttcttactcttttcccaactggggatgattgaaatgaaaagctggggtaaattacttctgctactgttgaattattgctcagtttagttcacttctatttggttttaggctcttgtgaaatctgtgtcaacttggtactttgttttactagaaattcgggtttaggggatttagccttcattgtcgtcctagttggtcttagtaatcttttggatgagatctgagtttcattcccagatccaataaagtgagttctttcttttcttactttcacataccaatgccagtttggtatgtctacaaaaatctttccatgggtgattaggattaatcataattagtgtctgcctttatgggcttctacttgtgtaattaaattgttggtagcagtctataacatacgagttcttgtctgcttctcgtggctgaagaatttggagatgatgtcactcaagcggcaatgatgcttccaaaaactcttctgtggcggctatggtgaatggtgataactgagaagagaatatagtcgtgataattggtcaactgggtccatctggaaatttcattatcatcctcatgttatgttattatgggaattggatggttcttctttcatattcagagtcttctgtgttgggaaaggtctttcaaattggtgctaatgataggagtggctgaaacctgaagcaaaacaaaacacaatgactaattttgagcttgcagatgaggataaataaagctggcaagtcttttccttcttccttttattgttgtcttgacaacaaaacaagggtacttatgaaaaccctatatggcactcttgtaactgtgtttcttggtatatataatccaggagtatgttctgttttcataagttgtgccttgtgttttgttcttagtttagaactatgtagagatgagttgtacttgttgtacattgtgtgactctttttaatagacataaaccccgcgatagatgggatgtgttaaatgattctgatttcattatatttgttggacatatctaaatgctacatgaacatgaaagtagctttattttctgtaagcacttaattactacttcgataatgacaaatcacttatatccttgtaaagattgattagtcccctttctatggatgttctcatagtgatttgaagtaagttttcaggcttagatgcgtgaatggcattgactggcatctcaaaatctagcaccagagtatagttttaatctttgttcaacgatacaaagtactatctgtccgtaacattagtgtaaatctacattagtgtatttacttgtaactatgtcagacgatatttcattaatagttcttcaaaggtcaatctgagagataccttgtaggaggtacatacatggtataagaatctttatatcttagtcgtattttatttattgtcttattttagactttgcctcacctgtcttcttatattaattatgcctaaccatgttcagcatctgaataattttgttagtggcaatgggtgtattgggtatgaagtaatcaagtaatgtgtgagaattttcaaagtacaagttttccaatcaaattccactaaaatttccttcatcataaccaatttatatcttcttactgcatattttgttttaagcaaaaaaaaaagtcaacagccatttggaaagaactaaaaagagggagagtaagaagaatgtagcctaaaaagacctgttagaatcccaagtgaaaatgacccttttgcatcagacacacatgaaagttgatagcaaatcttttaacaactcttctggtgaagtcacctgctgaggttctgttctcattgacttgtgtgtggttttaactgtggaggtaactttgaaaatcacattttaagctaagccatctttatatgaaattttccaaagggatacaatacaatcaaagtttgtttgaagagacataccttcttcccttgtctttttttttttttttttcacttttagaaatgttatgaatccgatcatcaaattagatatgatttacaaagtttatatggaacgatgactaattgctttgataacgtagactatacatacattcaatactttttacaaattggtcctaagctgctgaacctttacttcacgccataaactcttttctctttttgttatgtttgcctaaaaactttttctgattaggctgttcaaaaaattaaaatacattacaaaaaaaatgtcaaagaaaaacatggcataactttgaatatataaaaggatggagttaaaagaatgtaaatttccaaaagtattttctttttgttggacttacttgaacaaaaatacaatatggtattaaaaaaagaaaaatcaaaggcttcctacatggtgtgctttctttgcatcaagttatgtttaacctttttgttgtaaatcaaaatgtacttttctcgaaaacatttcattaaagtaaatttcgtagaatatcacaaaatctctctctcccaaggataatatgttagcattgattagaactttatagtgaatttattgttagcatattggttaatttggtagagaaaacatgtgactgtcattgcattcttacatgggaaagtccagcccatattttaaatttccctgcctaacaaactgatgcaataaacaaactaaagataaagatatggagatgaaaacgacatcctatttaagattattgctgacactttggtcccaagcaaaataaaagataaataaataagagaataatgcaaacgttgccatcatattcacgtaattggttcctagcctatacatgaaattttctaaagccacaaaaagtgtcaaagagaagcaaatggaacaagggtatgcggaaatggttatctatctatatatttattatatattcatatatggtgggtcctcatgggatataacctagaaatatctataaaaacaatgacagattttgaaaaatattcgaggaatattgattatgtgatagcggaagttgttaaaacaattttttttttttttggttttatcatcttttgttataatttatttcaatctatatatttttacaattaattaaatttaatatttaattatgatattgttagaggattggcgagtttaacaacttaaaaaagaaatttcaaataatttagaaaatattttactagctaagaagataatacaattctctctcaacaagaaaaaaatacaaaaataaaataaaataaatttaacgcatgtttaacatcataactaataatattgttttttatttttaaaaataaaaactattttttgagaataattaggtgcgtccatggacaaacccacattgttctaggtgttatctcccctcaaattcttaaaaaatttgtatatcatatacattatgctaatacacatacacaataacatattatataatatatatatttattttttactaactaaaattaaaaaatatatgtatacattccacttaattaaaaaaatatcatattcatatcggtccttattatatatacaacacctttatttagatgtcatgctacaacagttatctgaatcaagattacttggattgaataacgggcatcagtgaactgtactagtaactattgattaaggattcttaaactttaatatgttgctgactgttttattcatgacaaagtaatctcaattcttgaaataactataagtcacaacctcatatatgaataaagaattttttatatatttacatataagttattcaatattgaatattaataatttaatattcatgcatatatcaaaatattcaactcttattaataatcaaaactatctttacagacttttgaaggcataaaccctaataattctcacttgccctaaaatcaaattgggcatctcccttaatcccatattagtcatatgacccataagagaatttgttgttagcatctttatgaatggatctgacatgttatgttccgacgcaatcttcatgactgtcacatcatccctctctactatatttcttagtagatggtacttcttctcaacatgctttcctctcttgtggcttcttggtttccttggagttgaccacctgtaacaccctaaataattagacacgctacccaagatacttaagaaatcttaatcacctaaatgggattactaataaaattagcgcggaaattaaactttaataacaaatagaataaaaataaaaacttgtaataattaaagttttccaaactaaaagttacaaaagttgggatccaaaaaaatatttacaaaatactattacaagttctttttcattggccgacctaagcggcgaaacagagtcacaaaatacatcac

SEQ ID NO: 114446 - DNA, 2988 bp, Cannabis sativa
ttactaatcttttatgaattatattaaaataaagtagataataaattttaccaaataatattattgtaacgtatttctctattttcgttgagaaatgctgatgtcattcaatatcattcccagttatttcattttatctcaggctgctaatatcgataatcacattttaaataagttttttttttttgaatagaaagatttttctctttgaataagttggagaaagggatttcccgcgctcatttcttagagagagagagaaaaatggaggaatcaatagagaggttgtgcagaagtttaggttcattcagtaaccatctggaaagcagctgccatgccctcaagcaatccattaaccgtcgcgccatccctctcggtaggtaccgtattttaataatctcaccattttcattttcactttactttactttctcacctaccaaacatgatttcttctgcatatttatatctttatttaagattccgcatcttcaacctttatacaatgcctcaatcggagggtttccaccgccggtggccaacttaatctgctggaatccatgtccctgtcaactgtatcgtttgaggaactattaggtcactgtaatgaggtttacaagaataatcaaatccatattcttgaactccaagattgtctcaagcccttgggatacgtccccggtaattatccccttcccctttttatttttcaattttttttaatgtgcgtttttcattctgtatttgtttgattaaatcttcaaattattaaattgattaatactggttctgaattctgattttagaattggagattgatgatgaagatgaggttttaaacacggattcatcaactgcgcttgatacacactcgaatataatgagttcgaaccgtggaaatgtttttttggacgacgaagatttgtatccttgtataacaaaatttagtatatccgagatactgtgtctcatgttatgtacagctaaaagtttgtttgggattcaattcagtttgttaggcaaaatgtgtttttctctcttgtctttcttaattgcttgctcaatagattcgatgagtcgttgagtttgaagaatattggtctttccaatgtttgtcttgcttctttagcatccgaaggtaagttgctttattttttgtttgaaaagtcgcctttcatttttagggtgataatgattatatttacctttctcctattcgatatatgatgcagcaaataataagattgatgatctagatgtgtatatgcaagaacccacaaggttagtttacaaaatcttagaagttcattgtcttggaaaggagctttttttcttttaatcattatccatcatcttatctgtgattacttctggtcttcaaaggttataaatgtactcttttgcaatatacagacacaggtcacatgacttgaaggagccagattattcaacattgggaaaatccaaaatgaaaatgtacttagatgatggtacatattatatctttatcattatcactacattttgtgccaagttcattcctattaatctattaacattttctgccccttctttctctcatgaatttagagggaaatgacgatgctctaaagcctgtccaagctctttcatcaataaaattagtgaaggacgattacgagaatcttccttcctatatgaaaggtctagcgtcatgggaggtatgaagttctccttgttgtcctgtggtttaacctatgattgtaaagcaagtaatgaattatctgatctttgttttgagaattttctttaatccttagaatatattgccaaattatgaaaacttataactagatagtagtgaatgaaaatagcaagagaatctacaatgagattttttcattgtaccgatttaatataagaagttcatggacaagaaagttggaacattctgagttctggcaatatctcaagttgatcggtggtaataggagtacatgttttcgctaatccttcttaaatgacgggtttacaatcgtttcatcattcatattatgcatcagattgatgtattcgatttctagagaaaatatgacagttctgattatataatgatgattgcattttacttaatatctagtttctaatgatcaggacaattttgtaatgcatattgtctaaaatattatatcttgcattctgatttttaaggatttggtcactgccgtagacaagatcaattcaagcttgaatcagagaacaaatggaagtaatttctttggccaagatgaaatttcatcactggggttgggtgagtaattcttccgatctcatggtagtagttctataaaaattacaaattaacagtgaattgatgaatccccggcaaaataaaccatattcaacaacgttagtttcattaagattacactcatgagatatgcaattttgctggtacagggccaaaggcgaggtcttacctgctactgcttgtacgtatggaccggcttgttgtcgaaactataaatggtttgatttcctaccgagttttatagatgtgggaactcatatgtatgctagctgaaaatattatgcagatgtgtcgagttctattattttaaatgtgtaatttcaagaatgtaaaaaataatgtatgtggttgacacttttttgttttctttctagtaatgcattagtttaaggcatttgctagcaagtcttaactcggcaaatattggtgtgaatgtgattacatatgggattaaggaattgattgtttacccaagtttacttgcacaaatttattaagaaataggctactaggaatcaattatttgggtattataatttgggagtaaggagtgagattagcaataatgttcaaaccgcattaaatagccataatgttttaatattagttcaatattagctcttaaatttaaatttgtcttagaaaggagaatttttgtttataagaagatgtggtataatttctccaaataaaaagat

SEQ ID NO: 114447 - DNA, 2659 bp, Cannabis sativa
  modified_base (2504)..(2522): a, c, t, g, unknown or other
aacactcagctcagtttttttctatagttttgctacagctgttttttctcacagcacaactacatctgctttttttcacagcacagctgtgtcaaactggccctaagaaggctcaagctgctaaggccttttctaagtccaaggataaggcagtctcaggagctaagaggactgctttcacttttcactctattttaattggtgattcaattaggaatatcctgaaaagagtcgtgctagttctaatgttgttggttcttcatctactgataacaactcttttgtacaggcgggtgtggttgagcaactctgcccagaaaaatgaatcttttaagttggaatgcttgtgagttagggagtccccgagcattccataacctttcccttgttgtaaatagaaataatccgaagtttctttttattatggaatctaagctcttgtctggtagttgtgatagtcttagagctagattttcttttgatcaaggttttgaagttcataggaagggtcttgagggaggtctctgactgttttggaaacaagtggttaatgttaatattttaaatttatcctccaatcatattgtctgttttgtaactttcaatgataatattgatggtgatcatgttttatgtttttatggttcccattcaaatgacaaagttcatacttggaaattattagatagactttttgataagcatctcttttaccttggctaattattagtggttttaatgattatctttctattaataataggcatagtaaatttagtctgcctccttatgctatctttaattttcaaaatttctttaataaattttcgttacaacctcttcattttattggtaataagtttatttgaaagaatggttctacctatgagtgtttggattgggacgttgctaataaaattggtttaataattatcctaatgtaattcttcaccatcttaacttctatggcttagaccatagagttttaaaacttgttttgaatgatgactccatggttagttacaataaaaaaaaaagtttatgtttgagaactattggcttattgtaccttcattttttgataatgttcaaaattcttggaataatgatactcataataatagtattaactatcttaataatttccttcttaagtagcataattgtgttaatgttattaaaagttgtagttttttagttgttgaagaggatattaacgctatttaatttagcattcctatctagaatgaggctcttaaaagctcaagatcttcaatctcaacataatagtcttctttataagcatgaagtattttggaaataaagattcaaaattcattggttaaatactagagaaaaaaatactaaatactttcataataaagcttcttccaggaaaaaaaaaaataatcatatcaggttttttaatttagatgatggtaggaaggtgtcttctttttctgatttatgaaatgaagtttgtaattacttttctaatcttaatttcgaggttgttaactttattctctcagttgtagacaagaagattagtgatcaacataattagtttctggatgctcttttttctactgatgaggttaaagaagctttgttctatttgtctagagacaaggctcctggtttagatggccttaatgcttacttttaccaaaaaaattggtcagacctaagttttaatttatgcaatgctatgttggatatccttaatagtagtggtgtttatcaaaccgctcaaactgctcaaaccgcccgcaccacaaaaaaaaatacgatttgaaattctttgcggtgcggtcgcggtttgaatttttcctaaactgcgcagtgcggtacagttttgcagttttgaattgttaatattcggttcaaaccgcactgcaccgcacataataaaaatactaattttttatatttatttaggtctaatatgtgaatgtccaacccaaagcccactaattattacattattgaaacttaattttttttcatatttattttcaagccttatggtatttttaaccagtgttgctcaagttttgttgtatttgtcatagtttaattattggtgatagtccaaactacagaaaccgcaaaaaccgcaccgcaccataccattttttgcagtgtgatttctgcaattttttagtttcgcggtgcgagtgcggtttggaaaattgaaaaaaccacatctgcaggttggtttgaaaaaatggtcaaaaaccgcaacacccacattgcgaacacccccacttaatggtaatggtgatatgtttcttatattaataatactttaatttttcttattcctaagaagtctaatgttgcatgccttaaagattttcgtcctattagtctgaaacttcaaatccgaaaacaccatagacctattttagccattgacaaagcttgaaaaacttaggtgatgtttaattagaggtaatgaaatagaatggattggaaaggaaacaatttttattccattnnnnnnnnnnnnnnnnnnntaaagtattggaatgacattccaaagaatgctctatctaacattttggtggaatggctattccatttgaaaaaaagaaggaaagaccattccaatataacaagaaaaaaatttaaagatttttttatcaattttttt

SEQ ID NO: 114448 - DNA, 3670 bp, Cannabis sativa
  modified_base (319)..(320): a, c, t, g, unknown or other
  modified_base (434)..(435): a, c, t, g, unknown or other
  modified_base (3036)..(3042): a, c, t, g, unknown or other
aaattgttgaaaattgagcttaggatcttatttttaccattttggaaaatatagggtttattttatcatttaataaaagagaaagttcaattagtaatttttgtaaaatacatggcttaaaatagtattttataaaaaaaaaattgtaaaataaatttagtaaaaaaaattataaaaagacaaaaataagtctttcttttttgtcattttgtgagaattcacccttatattgatattatatgatagagtaatttgcggtaaaaatacctaagtttaactcccagttgtaaataaatacttaagtttaatttttggcggnnataatacctaagttatatttttgtaactttataagtacctaaccgttaaatatttagtcattattcacgtgttattttttttataggtatatttaaatttatttttttaaaaannaataaaaatttaatgacttggacctattaaaaattgtcacgtggcaatttacttaacacttaaccgtcagatacctataaaagttccagaattataacttaaatattattactgctaaaaattaaacttaaatatttatttacaactgagagttaaagttaagtatttatgccacaaattagatatatgcatatttttaaaagaagataactatatgtatgtagtgtatatacatatatttgtcatgtagtagagtgatagatagatgggatttgaggattagttgaaagaaagttagttgggggcttgacgagtctatgttatatatcctcctcactatcatataattcaaagtttacaaaccttccaaaagtcctgaagctgaaattcttggtgttagactggttggtgtagttctatttattcactattttaattcaacatcttcacttcacgtgctgctacctagtttgcttcttacatctaacacttatataaaattataacaataaaatagtcattgttaacatgccattggcacatacacccgtttaagcttaatctattaccataatgaaagtgacaatattttgggccttaaccaagtaaattaccaaaaaatcttttattcttccatatacactcacatattaataataatatgcaaatcattttttgttttttgtttttttgaggtaacaaagtatttggttgctttatattgtgcaaatcactttttacaaaaaaaagaattgtgaatgtccatatttaattataataacatactttctaattttaaaaaataaaatttctaaatttcatatttttttataattgtagtagacatgtaattatttttcaaataatttatatttccaaaaataatgtgcaaattaataattaattgcacacttttattttagttgaaacaaaaaaaccaaatcattagtattagtaataggttaacatgaacttgtaaacacaatattttttttgatagcttgtaaacactaatttttttttttttttttgacatgagcttgtacacactattaacaaaattgattgtcaaaaaaaagcaatagattttcaattatgattatgttatgacatttattcttttaccaaactttttgatctaatttatttcatattttaataattaagtttatgggctattgatattttaattatatattgaaaataatttttttcattctttttttggtttatttttttcacatttaagtgaatttcaattaattttagttaaataatgaatatcaaattgtggacaaaagcataaaatatagtaaaattttttaaaaaataaataagattttgtcccccgaacaatatattacacttgtagaatttggtcatctgatttgttttattaccaaaattctttcaacctatagaaatttttttgaaataatttgttggaggaagctactttggtgttatggctgcccaatttttttaaaacttattttagtaagatttttgtaaaataacccctttaaattttagttttatattttcgtttttcttatagtcactctttgtctctatccctgaatgtggtcatgactcatgtatcacaaatataattgtactaggaaaataaactgcgctttgcgcgattttgtaattttttttgtaaaatattttaagtttttagtaataaaaattttaatatatagctaactaaatattttatttctttttatgcacataaccgaataataatttttatatttatatatattgttaataattttttttactgcccattaaaaaaaatatagtttttgttatgtttaagtatttatgaaataagtactataatttaagccaaattgaagggtatgagttgcatgtacctcaataatgtgtaaaagacttttaataaaatagtaatgtgtaatatttatatttttaagtaaataagtgatatttacatacatatatttttattggtttttttagatgtttaaatactttttttttttatttttattgtcactactaaattataatataattaatttttatatagattattactattattttaataaaaaattaaaataaaatagaaaatagtaaaaattgaaataatgagaaaatttataatattaatatttttataaatactatcatcatatatatagggtatttttttaggtgagagcaccatttttgctcttatgaataaaagcatttttataatccttgattttcaatctaatgactttaatttatatatgtttatcataagagtgttgtattagatttttcccaattatcttttttaatattaaagccacatgtatgttatagatgtaacagtttttattaaattactatttttgttacttatttttttttaaagactataacagttttttttaatgtgcacgtacgtagcagttttttttgtttttttttttacaatttcttatttatgtgttttttataacatctattttttttttctctttggatcccaagtgttttgaatatatattcaatcaataaaaacaaaatatatggaatattaaaaaatatattcaatttatttaatatttattgtannnnnnnatctatttgttaatcacttcttcttctcctttatttccttacactaattgaatgaaaggttttctaatattaaaaaactgctcaatttgattaattagttcaactgaaaaaataaatttaagatttataagagaagaagtagttgcttagcaaaacctaaaaatatataggcttaatattacatatttgtgaatgatataaatttatgaatgaataatagggatttcaaaaattgaaaagtaagtctcatactttacacagttaagcaaataagaaaaaaaaaattatattttccatgagtataaaaagacaacatatttttaaaataataaagaaataaaagagtttgaggtgaaggtaaaatcacaatataattttttttaaaaaaaaaaatgtataccaaacactatcctactcaacaacacatgttaataccatacaatcaccctattcaaccaataaaaaaagtctaaaataatgctcttacatgtgagagcaaaagtgatgctcccacctaaaatttttcctatatataatactagcaaactaagccgcacttcgcgcggtattgtcaaatatttataattttttttatatatagtttactttctagtgagtgatacaaact

SEQ ID NO: 114449 - DNA, 1026 bp, Cannabis sativa
  modified_base (28)..(56): a, c, t, g, unknown or other
ttgtttttcaaaaataaattttttaaannnnnnnnnnnnnnnnnnnnnnnnnnnnnaaaaaattaaaaaacaaaagtgctaccaaacggcactttagtttttagttttttcttttataactttctttctctcattttttacttgtaagaggtctatataaacctctcctctattctattctattattagaattacttactataaggaactcatgtatttgatcatgagattcctaggtgtgaaattgaatgtaatgaaagcatgtctctcttagttttgtaggtaattcgaattggtgtgtttcaccattggagggttgtccatggatatcgaagttcagtatcaaggtcccattatttgtctacagtactattgaataaaatttaggttgtcttttatctttggttcattttgtttatagtttattagtcccaattgtttttgtggccaattgtgatcatacatatttttgttgccaagtgtgccgattgtacaacataaacaaaataaaacaatgcatcaaaaattaggaacatacatattgtcattcttggaattgaagcggaatgtctcaggcacgcttccattaagcttgttaccccctaaaaatctgataacaagatcaagttattttcattctactatatctaaaagctgacaaaactaaaacttaataattaacaaagtagaattttcatttcaaatgttcaatataaaatatcatatgtatattatatatatatagatgcttacatatgttctgttgtgtaggattgggcagtgttcagtcctcctaccaaattattaaagctcaagtctctgatgagagatattacaaaaagacataacaatgaataagaaattgttgcattaggttgtcttaatgcactattatgccaaactatagtagaagatatataattttgggtaaatggcggcaaaacccccaatactttggttttagtttcactaaacccccacaacccaaatttctgcgggtaaacccccaaaaccactattctgtta

SEQ ID NO: 114450 - DNA, 3062 bp, Cannabis sativa
  modified_base (1072)..(1080): a, c, t, g, unknown or other
  modified_base (1179)..(1185): a, c, t, g, unknown or other
  modified_base (1450)..(1451): a, c, t, g, unknown or other
  modified_base (1536)..(1537): a, c, t, g, unknown or other
  modified_base (1680)..(1693): a, c, t, g, unknown or other
ttctttaatttttaattgtatcattttcaaataacatagaaaaaaaactagcgtaaaatttaatatacgtgcctcgcacgtaatctttgctagtatatataatatatatgcatgttttcctttgttggattggcttaatttattgtttaatttatcctagctatagctatcattttaattaattatttgttgtggaatttgacattatttattttattttattatgtgtttcctttttttttaaaaaatgtcataattaataatgagaatctcaaaagtatatgtttggttttactttgagaataccctcgtgattcaattagagttttctttgtgaccacaattattcatatatattattttctttcttattattattattattattgttttagtttggattcttttttgtaattggaagtggtatatatgtatatatatacacagagaaaaatgctaaagatgttcagcaattctacttaatattattagtataatttaatattaaatctcagttattttaatttaataaatattataaaaaattattaattaaatataaaaggctatgtctagaagtgttaattaaacaacttggtggcaccccataacaataatcctcataagtatactctgtccttggactttgtgagggactaaaaagtaaaaagagaaagaggagacccttaattgaaataatgagatgtgtggtcttctaaaaaaggtatttggtcctcttcggccacttgaagtgatgacaaaactaactcaagatggtccatttgacaagagaattttttaaatcttactcccaaaattaatgattatatataaaatattggagatattaaaaaaaacaaattatgtaatatattttttaatatatttaaaaaaatattgaactagtatactaatgagattaatttttgcttttaaaatgagaagttatttttaattcactcttccatgttaaactgatataatatcaacgttgaataatgggagacacacttaataatgatgcatctaccatttttttttttttttagaattattctatatactatttttnnnnnnnnnttttttaaaaaaaaaatttacggtttgtgtttctaaagtgattgcagcgctaattgcagtaggagtttctgtacaattttttgttgcaatttaagttgnnnnnnnagttgcaataggggtttttatgtaaaatttcgtaaaaatgtaaaaaaaaaaaaacctgttttaaagtgtaaaaatgaaaaaacttttttttttgtggtgatttagttaaaaatattataatattaatattaaactattatttgaatcttgctgttaagattaatttgtaatttattaattggaatgaattagggtggcatttggtaatacttttttaattaattttctgtttttaaaattgaaaagtaaaaatatttttcaaaannatgttctataaaactgttttcactttgttaattttttaattgagaatcaaaattttaaaaattaaaaaaaaaaattactttcaanntttttttaaacaattttttttctcttaatcaatattttagactccgactagacccgaacccaaatccctcctcggcctcggcactgaacccggtctcggacttgaacccaaatccgatcttagacctagacccgacttaaatnnnnnnnnnnnnnnaaaataaaaataaactttacaaaacacacttttattttctattttttaaattaaaaaacaaaactggttacagaacacatttttgtttttcactaaaaaaacgacacctatatatttaacaattgaaatatttaggtttaataatctagaattatcaaatggtttagtaaacattttcatgtacataatgaatatagaatttatatggttcctatcaaaaacttatatatattgactaaattcagattttttttttttgataataagctagaaatgattcaattcacttataatagtcaacaaaatatatttgattttcatattcaaggaattcagttttgggagttgtgaggaaaatatagtgacatatgagaccacacttgcattggacttgatagattattcccctacaaatatatagaagaatccaaatgttacacaacaacttcattccaccttatatctcttcttcttattaccacaaaactcttcgcatatattgtacttgaagatcaccattgttttgtttttctttttcttttcttcctattttattgtttcacattaatataattatattatattttcttttacatttttaattatcctaaacatatttcaatatatcgggttggggtggaaaacccgtgaagctaatgcttgaaggaatatttttgtgattgttgttccaatgctggtgtattattttttaggacccgaaatatggctttttggaacaagtttcaagagttgggttatagtggcccaactgttcaagaacaaaactcagtaaaggaatcaaaacaagaacaaataagcagtttagaaaaataaataagtaatcaaaaacagaaaataaaggaagaacaaacacaacaattacgaggttcgaacaaatcactcttgcctagtcctcggctgctggatgaattggagagaacattgtacacagcttgttgtacaaactcgacatgcaaagcttctttacaacatgaactcacttgtaataatggtgacgtgtacttgtgacaatggtgattcaacacacatcatgtactaactatcataactcacaattagtttcatctaggtagttagttgtcttgacatgtggccaaattacaacaatcatccaccttggtcatatgtcaagtctttgccttgttgagtagtcctaatcttagtaatctaagtatgtttagcaagttagaggaacatattgtattatagtttcctccaaataaaagatctccaaaattattcctggaaagttatttgtctcccgaaaagtatgttctcgaacaattatgtaacgtccccacttcaagcctccactgggtccttccacccacggaataatggctcttat

SEQ ID NO: 114451 - DNA, 2379 bp, Cannabis sativa
  modified_base (27)..(37): a, c, t, g, unknown or other
  modified_base (1427)..(1433): a, c, t, g, unknown or other
atacataattatctagttagggttttnnnnnnnnnnntcttaattccagggtattacaaaggaactggaaggcatatctcgagtattaagagccaggtgattggcagttttgacattaaaggtacaagaaggatcctggcccaaaatcatatcattagagccactattcttgagattttcacattaagtatattcgcaaatatggaatcatcaaaatattggtggagcttagtaagatcccaggcaccagaaggggagataaagaaagatagatttgaaataggaggggagagaagaatatgatttgtaacgaaagcctgggagccaatgatcctcaatagtgtttatattcataccatcacccaccttttgaattagcccttgtttcattaagttacgggcccaaagaatactatgtcaggagtaagaagggttatggccaggagtagcttgaagaatagaagagatagggaaatatggagctttaagagttaagctgagcagggaatcaggacatttaaggattctccaagcttgtttagcaagcatggcctgattaaagtgacttaaagacctaaaacctaaacctcccagcaacttagattgacaaatagttccccaatttttcgaatggattttgcgagtttcacctgaggatccccaccaaaatttagaaacaagggattcaatatccttgaaaagttttatgggataacgaaagcaagacattgcataggaggggatagcttgaaagacaaccttgataagagtttctttgcctactttagagaaccgttttttatgccaagaatgaatgatagtggaaattctgtctttaaggaaagtaaaagcaggatatttcgcacgaaaaagacattgggtaagccaagatacttagtgataaaaggcctattttctaagtgaaatgtgtaaaagaaaagagcacgaatctcagagtgtgtttcgggtgagaataatattgatgactttgcaaaattgatcacctgtccagatgctctataatagatagtaagcgcatgatataaagcatcacaagaagatcgatcagcagaacagaacaagatgctatcatctgcaaacaagagatttaatatgggaggggtattccaagataaatatgtgtccttgcatgataggaacatacgagaaaattaacaattgagaccgggtctagtcacataagttgtttgaaaacgttgtgctccaataaaaaaaatgacaccaacaattacaactccatatcaaaaatatacaaggacaaaaataataattacaaaataatacaacccaataacaaaatacaataatattcataaaagagaaatttacggcaaaacccccttatgttttaatttttatacacttaactcccttattttttttgtggcaaaacccccttatgtttnnnnnnntttgcaaatttgacacaccagttaaatattactgttaaatatcaactgaatgaccactgtataaacctgtatatatgttaacagtaaaatctcgaagtagatacagtagtaatctagttaatatttaacggtaatatctaactgaaacctcaaatttacaaagaaaaataaacttaagggagtttttccacaaaaagaaagataagtaggttaagtgcataaaaatttaaatgtaagagagttttgctgcaaatttatcttcataaaatacacaatccaatataagtaaattcaatccatactatctaattcgtataatgaggatattcgcacttatgcaaattggattggattaaaaaatataaaattttcacttgtgtgaattaaatattgattaatatgtaaacataatggatatatatatctatttttaaaacattatatataagaaataataatttaaaatctatccacataatacaaatatatatcaaaacatagtaaattaaatgtatattacattcttatttataagaaaaatataatctaaaaaaattaaatatgtctttatgcatacaatttattttcttcttcctttaaatttgttattttttgttttatttagtttaatttattgttggaggtataagacaagtaatttattttattttgctgttagtgttaagctatttttagcttacattttgggtcactttttatagttatttttcttctttattattcttttgggaatataattatgcttgttttctttggtttcaggtctcacacttggaatatataaattgatcaaatttcaaaaaataacaatctatagaatagagaaaattttacaagaaaataaagcttaaatttgactatgtgctgatcatattttgaaaaagtcaaaacatagaagctttagatctctttttcatctttccaa

SEQ ID NO: 114452 - DNA, 3720 bp, Cannabis sativa
aaagttcgggagaaaaaattgttaattagcctaatatttttgaaagatgctatactattagagcgtttttagaattaagagtgttaaaattaagaaaaattatctcatatactgtttttttttttcaaatttattgtttgagtttctaaagtggtttctccaatagtttttatgtgggttgctatacggattttggttgcgatttaagttactccgttaattgtaacaagggtttctacgtaaaattctataaaaatacaaaaaaaaaatattttgaagtgtaaagataaaaaatcttttaaaaataatataaaaaaataaaataaaatattatattttgaaatgatatgaaattttttatcactatcactctaaaagttaaaagaagaataaagtaaaacaccaaccaaacatattatatgggacaatctttatttattcttctttaatattaggctttaccacactctttaccatattatatttattgctcactccatcatcatcttcgaatccttactattattcttttcctctttcttgaaaccttcctttggttctctcttgtaatttaaactacatataataatatatataaactcatttttccttaattccaaaatccaaattaatatttgatttgttttaaaaagaaaaaaaagaagaagaagaagaagatgatatgggaaacctgttctccatactaagtagagagaagaagagttcatcatcaaattccagaagaagccataaaagtattgaaaagagtactaataatggaaatagtattggtttagggcgtaagagctctaattcttctaactctaaagcttatagctttttgggatcaacttcgtccattagcaataaaagtaagaaaaaatatggcttcattcctgacactttcacttctcttcctcaggtacactacttattctatttttttataattttttatttttataattaaaatccttgtttttgtttttttaaatttgtttatgggataatagtaatgttaataattgatcaattcttaaattttatgatcatgtgaaaaaagaaaaaggggaagacttttaaaaacaagggaaagttggaaaatattttggataagaagagaaatgattaaaaagatttttaagaggagatagttggtagataagagtaataattgtattggtataggagtggtagaaccgtagaagatctatccaagtactttttttgaaattagattaaagttgacccacaaacgataacttccaaagtcgtccttgaaaattagaacgttatcacactttttttttaatgataaaactatcactcatagtttcaaaataatatttatatatttatataaaataaataaataaatacttttttttgttttttttgaatggaaatacttttagacattatgttttaggaaaagttattattggaacgtttgttttaataagtgacaaattagtttttatattttttaaaatagtttaaactctgaattaaatttttattaaaataaaacttaataataatttgaataagaggtgttatgataaaactggttacgtttactatattttttcgtgtttagaattattttcaaattgattatattaaaaaaaatatattaaaattgagttcatagtcttatatatactaataaataaaggatttatttatttttatttagtaaaataaatagctcaattaataatttttgttaaaatatatggtataaaatagtattaacaaaaaaaaattatattaattattataagaaaattttatggtgaaccttaaaaatggaacattattaacttattatttgtcagaaaattttatctaagataataaaatatataaaattgatgaaatattattttaaaataaaaaggcatgcaccttattattacattgcaaatagcgatatattgaaaagagtgtatcatcacttatgactatttatatatcgaaaacatcaaagggtcatacattcatatttaaagggtatattttgaactcaactcactgactttcttggtcattgtgatttttctatttaaaaactattataaaaaaataaaaaatccacacataataaaatatatgacaaataaattgaaagagatttgaaaaataagacggatattaaataatatgtttttcttttttctttttaagaacatattggtcaagtttggttaacataaaattcaatacaaaatatcttcttatcaaaaccatttttcacttcaaaattgttcactcgaaaaatagaagaaataaattgttaaacacaattaatattgtcattctttgaaaggataaatattattttggactttgtattttgtaaaagttattaattggatcttttattttgttatataacaaaatagtccctgtattttttaaaattatacaaataggaccatgaactgattttttttcaaaataaaacttaataataattcaatctagagatgttatgacaaaactagttatattttttgtatctgttcctgttagaaattgtcttaaagttgattatattaaaaaataaaattgttaaaattgagctgggtcctatttttaccatttaacaaaatagagggtccatttattattaaacaaaacagagggtccaattggtaacttttacaaaacatagggtccaaaataatatttacccttttaaaaactatctaaacttttgtgttgcttattgcattaatagatagatgattccctatcagttttaaaaattttgacagtacaaaaattacagtataaataatttattgtacgcatgattttatgcgtgtaaaagtaactattttaaactttatttttagtattataaattatttgaaatttttataagattgacaaagaattatgtgactaccttaaaagctatcataaaaaattagaaaaaaatatacttgagtatactttgggagcatttggtatgggataaagacttgatgggaataagaatataaaaattgaattaaaatttaatgagtcgaccaaggaattgatgtttgtaagtaaatttaattttttaaattaaaatagtagtaatgttaactctcttcatcgtatgagtttcatatttcatcaaagtctattgtcttcaaatttattatctccaactcaaattcacataataaataccttattaggttgtgtttgattgaaagaaatgaaaacataactaaaataggaatgacatttaaatattttaaaataaaaccgaatgaaataaaagttatttatttaatttctattctattttattttattacctctaaataaacgccactttaagaacatgttgtaccagtagaggacaagaaagtgtaccgtagacctaacgaaaggatatgaaatacttttcttatagcagccattggagtttgtccttgcactaaatttttttctttaattccaataaacgtattgattcttttcttacacctcttcttcactttttaacttttatttatttattgaaagagatttttatgttgttttgtttagaaaaaatagaaatttttattaatagataaattgaacaaaatctattatataaaaatataatgggtaaattgcggcataaatacctaatgtttttgattttatacacttaaatacttagggctcgtttggaacgccgtattagatcgtattgtattgtattgtatt

SEQ ID NO: 114453 - DNA, 1440 bp, Cannabis sativa
gcattgtgtggatggtgatgatgatgatgtgaaggctgtccatacgacttgttcagattcacagacacgaacttggtcccggctccgggattagccatctcacgggtccaacccaaactctaaccctggcggattcgaattccgaccaacgcatcaaaatgataccacgagaaaacaaagacctaacctccgctttctcccctgtccaatattcgcttcgtcgattatcaccgctctggatcttattggaccctgtagaaactctctctaaccctgatcaagagggagagaaaaaacaaacaaacgaaatcaatgaatctcagactataaaaccgatctcaggatctcattaattacactgtacaatcttaaataccacacgctaaaagaattatatcggagtgtagttttcggcaattagggtttcactgcttagagcttcgagcaagagaaagaatgagatcaaaagaagatgataagagaggttacctccggtggcttgagatagaatagtgccggcgaaaatgagcgcagcggtgcgaaacgtgttcggaagtgtcggagaagaagccctactgtgaccggagaggtatgagagagaaagtgagatatagaggagagagagagagagagagtgggagaaggagaggattaattaactaagcacgagaggaaagtagggaaactttctagtatttcttgtttcgacctctttactttactttatctataatttcagccaatttagtttcttgtcttttcagttatgcccctttatgtacacgtgtggatcacatacactgctgagagagactgtaacccacccaagacagtagatgagttgttcggatctcaaaggtttttttctttttttttccttaaaaccaaatatctttgcttttgagaaggttaaaaaatattaataatcaaatttgacaatattaataagaaaaattaaataatttagcaaactccaaatctaaccaacaatagtgttttttttttcttgaaatgaaacaaacaatagttcaaataacatttacaaaagttagttgtgagatactgagattgtagttgttttaagttaaaacaaatgtgagtgactctaatttatgattttgtgtggtcttcttaagttaacatgtgtaaaaaaggacattttacctttaaaattttgttattgtttggtagatataatttgtcctattcgagttaatgaagtttctccattagtctaagatgtgatatcaaaggtatttttattttgaaagttttaggtttttgaaatatgaaaactaactattagggcatggggtgaacccacatataatcgagacggagagtggcctttcctgaaaaaaaaaaaaaaaaaaagaaaaaagaaaaaaatatatatacaatttaattaattacaacatatatttataataaaagataata

SEQ ID NO: 114454 - DNA, 3863 bp, Cannabis sativa
tttctaatcttcttctattttatactgcaaaaataaaagataaaaagtgtaaaaatgctccaaacacaatttaaaactcaattaaaaatatactaaacttaatctaaaattaatacaaaaataacctaacactgatccaaatgatgtattggattggatcggttccaactattggatgcattaactggttttttattggattggattggatccattcaatccattttagctacaccatttaagttgattccattaaaaaaaaatatatataaaatataatttaaaacctataatccaatatacataataaacatctcatgtgtgttattcttctcatctaaaggtgatggtccaaacgttctttcatgatgtgattaggtctctgtagttcaaaggtttaaaaatgcctcctaaaagatctggctgattagatcgtgatcgaggtcgaggtggaggtcaaggcgaagtctgaggtagtggccggtgatggaggtgttgatgaaccatcgccaacactacaagaatggaaggagtgttttgctaaaatgaaaaaaaccattagtaagcagaacgaagaacttctttagctgagacgtcaattggcaccgcaagttcaaataaagccaccagagccagaaaatagggacccaccaactgcatgtggtggtatatcctggtgcagatgctagacttaaggtattagcagagagatttcgaaaataacatccacctgagttcgagggaggcatagatcgagttgtagctgaagagtggatgagtcgcatagaaagtattttgaagatgctaagggtcgagggaaatgattgagtgaagtgtgcatcgtacattctaagaaaaggtacccacatttggtggacggtggtgcataaaacagacaaaggatgtgaatactattaattgggatgagttcaaaaaaggtctttaatgaaaaatattacaactcagcagttaggtgaagacaagaggacaaaaactggtaacgaccaccgatctaatggaaacagtgggtgaaatattccaaaatgccccaaatgtacaaagcgtcatctaggtgaatgtggggaaaatgcgtgttataaatgcgaaaaagaatgtcatattaaatgcagctgtccattatggagacaaactgagaataaaaaagaaccaaatgaagacaataaatatattccaaccagaatcttcgctatcaactaggcaggtcagattgatgacgagtgctgaggtgtgggacattgattcttcactatctagaaatgtttgagtataattttgggactttacagctgtgaccgtgatcaacatgccaacatacagttatttggctcatggattgggcttcgcttgataagcccaaaataatgtattatatgtaaataccctgttagaggcaaagagtaactaagtatgacctctattactctataaatatgcattgaatcttttatgccaaagggatggaatttcttaaaacacaagcttgagaaaagaacagagtaatcatattcatcagcctatctcaaaataattctgactcgtgggtactaaggctcattaacaccccaaccacgtagtgttcttcatatttgattcttttaatctaattttttttagctctaatattaaataattcgttttccaaaaatttcggtaagtattttagtacattcactgaagaaagcagtgataccatcctagattacatttagtaattatggtactcacctaaatctattatggtcttcactatacttaccctaaaaagggtgatgttgatcccaatgctaagatgaaagatgcaaaagatctaactgaggcgactagttgccacaagaaggatcataccaacaagacacctatccttgaagttcttatggctaaagatgatgaatcaggagagaatgattatgatgatcttggagatgatcatcaaaacatgcccaaggatggtaaccaagacatgcacgctaactgtgatgctgaaaaaggagggcaattgagtcagatcctatggttaccatggccaggaagctgaaaatagtcaaagacaaattatcattacaagagcaattttctttgttaaggcacaagaaaatggcagagaatagagaccgtaacgaatcacttaccactgcacgcaaaaccactcatacggctccaaaaagtaacactactgggaaaggtgatccttataatcttggaacctatgattatcaaggactaagggaaatgaaaggtaggtgaaacttcaaagaaggctacttaggttgaatagcaaaagaaactcaaatctgttatccaacctcaaaagaaaaagagaggaaatcttgtaattgaacaaaagttatattttctcattccatatccaacaatagctacacaactatatatttacagactttcacactatttgcaaattactaataagcctatatactatttttatagtcttacactttccaacccttcaaaatcaccttgtcctcaaggtggtaaaaatgcaaaaatcaacaaaataataacagcaaaattaaaatacaactcatttgttattaatttagagtttgtacaatattagattttttgcaaaaatttacaattttacagtcatacaaacttttttacaaaaatactgtccttttataaactaccgtaaaataacaaaacagaacaattaaaataacagtagaacaactaaaaaataattgtagaacaacagtaagaacttaacatagtacacaatataaaacttacattgaattttttgaaaaaaattctacccacagtaaaaaagttgaaaatttcaatatatgtggtgtaaaaatcccttattattttctattgaattctcagcccaagcccaagctcaaaatgcttaggtcaacatcatcttcttcacccaatgactaagcataaacatctctcttcttaacttggactacctatacctcttgatccattttaaattatatagaccaacacagctttatgccaatccaatcacacactggcggagctagcccaatagtttagtaagggcatttattttttgaagtattaataaaaaatatatttttattaaaaaaaagtcaatttagaattagacccatcaaaatctcttaattaataaacaaaccctaaaatctcttttctcctcaattaaatccttgcttagtgaagatatatatgctcactttctccttaaatgagatttggaaaagtcttctcccgaagaccaacactcgttcaaagcttctattcaacctattctatgaatagtatgagatcataataagaaaaccaaaatctagttgaacactctaggtttttacaaatgaaacactcttcttacaaagaaagatatgaaaatatgagaatagaagagataaaaacgtttggctgctctctggatcctatttatagaatatagcaaccctagagacaaccacaaacacgatttcccagctgtacaaaactttcataaaaaaatttctgatttgcagcattagaatcgggtttcgcagtagcagatcagaaccagaaagaaacttttcaaattgaaccaagatcacgaatttggacttcaaatctcacaaataacgataatttgatttgttctaataaaagcaaaatcgaaatcatcaattagaaaaagggaaagtcaagtttcccaaaattagacaactttccataagagaattttttctcttataagaagtttcaaaacaaagaaaagtccaaaattaaatgctcaataaaaatgcacattaattaaaaaatattgggaaatttacatcatttactaacttttccaataatcttacaattatactttgacacgc

SEQ ID NO: 114455 - DNA, 6475 bp, Cannabis sativa
ccccaaccacgtaaaaaatcctcatttcgctttcttacagctctttactataatcatattctaatagttgccgaaaatctcggtcaacatctcttttgtcttgttttttttcttcaatcagtgttgacttttatttatttttctttcttttttttttctctatctttttctctttttcattgttttcctatttttttttctctttctctctttttctatctatttctctctgcaacactaatttttttttttattttactatatataatattaataattattagtgaaaagctgtaaaaaagacttattttattaataaatcaaacagttatacaaagaggaattagttgtttggataaaacatatcataacagaaaactgttattaaacgaaaccaactaacaaccaataaccgactatgtctaagactccccctcaagatgaagtataaagattggatacactcatcttggacaacaaagatcgaaattgagtaggaaatagggggccttactcattatatctgcaatattgtgccgagaaggaacatagaacaaaattttattttgttcttgttgatttgttcacgtactatatggcagtctatgtcaatatgtttggtgcgttcatgaaaggctgcgttctcagatatgtggattgcagcttggttgtcacaatgaactgttgttagttgtggtgaagaaataccaaagtcagttaggatgttgtgcagccatagaatttcacaggtagtgttggcaagtgaccggtactcagcttcagtagacgacttggagaccgttgattgcttcttggatttccaggatatgacggactggcctaggaatatacagaaaccagtaatggaccgctgtgtatcagggcaggtgccccaatccgcatctgagaaggcttgaaggtggaacaatcaatctgtaggaagttggtgctgaaagttagagtggaacataagtccctggccaagagtgcctttaagatattgaacaattcgataggctgctttgaggtgtggttgtcgagggtcacttatgtactgactgagtctattgatagcataactaatgtcaggccttgtgatggttaaaaacaagagttttccaatgaggctggaatatgaagtggcatcgttgacacgagggccaacatccttattgagagaaaggttagcatccattggtgtggaaacagcctttgaaccgaggatgcctgtttcattaagaagttggagagtgaaaggtctctgagaaacagagatccctaccttggatcgagcaatttagagaccaagaaaaaaatcttaaatggccaagatcctttagctaaaattttgaattaaggaatgctttaaattttgttacctctgtgtcattggtgattgcaatcacaatgtcatcgacatagactagaagtgcaaggaagctagatggagttgattttatgaagagtgaatgatcatatgcagattgatggaaaccatgttcaatcagggtgttgcttaatttggcaaaccactatcgagaagcctgcttaaagccataaaggcatttgtgcaaaaggcaaacagggttgggggcagctccccctcatggacataacctttggggagtgtcatgtagactttttcagcaagatctccatgtaaaaaggcgttatcaatgtccatttggtgaagagtccagttattgatggcagccaaggctaagaatagtttgagggtattgaatttcgcagcaggggcaaatgtttcagtgtaatcaatgccctgttgttgtgaataccctttagcaacaaggcgttccttgtatctgtcaatttcaccttgttcactgtattttattttatagacccatttgttaccaattggttgacaacctggtggtaatgagacaactgaccaagttttgtttttcttgagagcaaagaatccagcatccatggcttttaaccattgaatgaattgagatgcttgtttgaaagtagtaggtacaaactcagtatatgcatgaaaaatggcatttcgaaaagcaacacttaatttgtcatagcttagatatttaaccaaaggatgtttagtggaggactgacaaatatagtctttgagatgggcaggagtagatgtttttctacctgccttagtaatggatggttgttgtaaggctgtggaaggtgcatcaggggcttgagaattatcaggtgcttttgttggtgtgagattattagaggcaggtgctggtgtggagtcaacatgtgcctttgatgatgagaagtcagcaagtgcagagctagtgtgagatcagcagatgtaatttttgatggaggtccagcagttgtcaagtgttgttgatcgacaggttgaaaaacaagagtgttactagattgagctggagttttggtgcattgagcagggagtaattgatctaaagtttgtgttttgagggatccttttagaggaaaaatctgctcatagaacaccacatctcgagagtggaaaattttattagtagcaagatcgagaagtgtgtatgctttcatgccattgggatagccaatgaatatgcatgcatgtgcacgaggagaaaatttgtgcctagtgcttggtaaggatgaggcataagcaaggcatccaaaattccttaaatggtcatatgatggtggtttattgtgcatcaattggtagggtatcaaaagttgtaataatggtgttggtgtgcgatttatcaaatagacagcagtgtgtataagatggggccaatataccaaggctatagaagattgaaaagccaaagctcgggccacatttaggatgtgttgatgttttctttcaacgacagaattttgttgaggtctctcaacacatgaattatacacttgaatgcctttttgaacataaaaggatttgatattaagttcctttgcattatcacacctgacagattttatgtttttattgaattgagtaaatacaaggttatagaattgtggaattaaatgttgcacatcagaattggattgtaacatatctgcgtggtcatccataatggtcaagaaatatctataaccttcaatgctatgaacatgaaaaggaccccatatgtctaaatgaattaaatcaaagctagaattagcaatgttattttgggaatgaaaaggtaatcttttatgtttagctaaatgacatatagaacatggggaagcatcaatatgttcagaatgtaattgtttattaagcaactttgttgtggacatggaaggatgtccaagtctaaagtgccatgaatggacactgttataagaattattgtattgattacaagaagaagaaataaaagggctgtgagatttgacagattgcagcaagaagtataagttgccaatccgtttagcagtcacaatcctcttcttctgtgtaccctgtaatatgcaagaataattgttgaaaagaatactcttagaggtatgattgagaaagctagatacactaaagagataaaattggaatgtaggaacaaagagtacattcgatgtatgaaaatctggtgaaaatttgatatcatttgaattatgtactttgattgtcgatccatttggaagtgtaacagtattagctatagtattcttatgcacattagaaagaagagaaaaattacaacagatgtggtgtgaagcacaactatcaacaatccataaatggtttttagagttgttaccagagacattagatgcaaaagcatctgtggtagtaggagtaggctgcaacttctgcgttaggagtgaaattattgcttgaatgtcttcttgcttggtaaggttggcaagaacaccatactgatcaacagaagtggatgcattatggactaaaggatgatcagttttccttttgtcaccataaccaagggaaaaccaatcaagaagtagcatttttcttttaaatgccctggtttgtgacaattagaacaatagggtcgcatttttttattgggttgaggattggtagatgttgcagaagctgaaggattctgagcaagggcagcaggttgttgactggaatcttgaacagaagcgagaagtgggaggtgaggatttttaagttttctttgtctttctccatggataaccatggaaaaaactttagacaaagatggaaatgaatcaattagaaggatttgtgctcgaagagggaaatgggattcatttaaccctgtgagaaattgtaaaacctattcttgattcaagaaagccaaattgtcaatagaggcagcacaagtacaaggaatctgtggtcttaattcctgaatttcatcccacatgcatttaagttttgtaaagtatgaactaaccgaatcatcaccttgacgaagagtgataagtgtttctcgaagctcaaaaattctgggaccattaccttgatcaaaacgagaatggagttcagtccacatctcagccgaagtattaagaaacatgatgatgctcttgatttctggagtgacggaatgaagtatccacgacatcaccatttgattgcagcggagccagtggttatggagaggatcttcgatcggaggttgaggtaatgttcctttgagaaacacagtcttgtttcttgctccaacagatagttcaaaatcgcgtctccagacctggaaattgtgatcagagagaggaggagtgaccaagatatggccagggtgatcccctgaactgagataatatgggctggagctatcttcatgagcgggacgaagaagacgattctggttagtagagttttctccagtaatcacaggggctggaggaatgatcggatcgtcattttgtggagcatctagaatcgtagaagaggaattgggcgggggattttggccagaactcctcgaaccagtagctcgagttcgaaccatgttgaatatcaatggcagaacagggtgtagacgatgaagaagaagagagaaaaaaaaaattcttaagcagcagataccatattagtgaaaagcagtaaaaaatagttattttattaatgaatgaaacaatatttatacaaaggggaatgaattgtttggataaaacagatcataacagaaaactgttattaaacaaaaccaactaacaagactaaaataacaaccaataaccgactatgtctaagaatttttcatttttttccttttttttttctctttctctctttttctatctatttttctctgcaacactaatttttttttttattttaatatatataatattaataataagtgcacttttttacatcttttttttaatacttttcacgctctcacaaaaagtttattttattatttttttttaaaaaaaatacaaacatttattctatttctttttctcttttttacatttcttactagtcacacttaaactacttcatactatttttctttaattaatcacattttataaaaaaaaaaatcttaactagtttattttaaccattactaaaataaaattcttttactttcacatttttttcctcatatttttcttaacacactttctctcttttaacaaaaaaaaaaaaaaaattaaaagcactcttcctgtatctttcgcacttttatatgattaataaaagtaatttttttttatgttttgtagtttatttagaattaatttataaatgatttgtatactttaataatattgatatctttaggagtgtgtataaatcaatccaatccaatgacaatcgaccgatctaattacaaccgactgccaaacattagatatccaattgtgatcggatcaaattggatgttatttttaaatatccaattggatcagatcggatgttagatggagtatctaaaaatctaatacatccaacatccaattgatccattaatattttcatttaatttgaacgagtaattagattttatattgttataagtaaaaaactacatgtatatatgaaaattaacattaaaattttgtttttttttttttgaattggatggatccaattcaattcgatagatactaaatctaaaatattggatagatctgatctgattcgataaatactaggtctaaaatattagataaactagaattaaaccaaaagatatacatgaatacatctaatagatagaaccgatccaattcaacattcgttcgatgatagatcaattggatgattgaagctaattggatcagatcggatggtaaaatttagggaaatttgtggcaaaagtcctcaaaaagttcaatttcatagagataagtctccaaggttaaaaaatagcggcaataatcctcaaggtgacatttttcgtaattccgttagtccttttttttaactgagtcgttaatcatttaaaaatgtcacatgttgaaattttattggtccaaattatattttaattaaaataattttaaaaaacaaaatatattatttaaaaatcataaatttttttttttt

SEQ ID NO: 114456 - DNA, 1716 bp, Cannabis sativa
gttaattgagttgcaggttctcatcatttggtatcagagcaagccgaacctggtggatgccgccgacgagaatggagaagaaagtggaaggaattgaagagggactcgatagtgtgaagcaggatattcacaatatcaagctaattcttggtgagttcaaggatactcaagaacgaacagtcacgggtctagctgagcagatccgactatgcttgaatggtcaagcaaggatggccgatgagatgtgtgcactccgagagagtcaagcgccgacgcagagctccggccgacggtctgtaaacgaacgaccaccttctccggcagtggtaggatcgactgggcgagatggagacggagggaggcgttcggagtttcgggcaaggaaaattgaactacccgtgtattccggcgaagaccccgatgaatggacttacagggccgatcggtattttgggttgcagagattgtcgccggcggagcaactcgaagctgcgatattatgcttggagggtgcggctcttaactggtttcgatgggagaattccaggcatacgatcggttcatgggaagaattaaaggtgatgctcctccgtcgatttcgttctgctcatgagggaacaatttatgatcggttctttactctccgtcaaacggaatctgtgcaagattatcgtcggaagtttgagtcgttggctgcggctatggggacgatgggtgaccagggattgcaagctgcatatgtgaacgggctcaaaatggatatccaaggcccattacgcctactgcatcctaatgggctaatccgagcaatggaactttctgagtccattgaagcaaaccaggctcttgtgaggaattttaaaaccgggcccaatagatcatttcaaaatcggcccagctctttgactattcctgagtcacggatgccacacgtgacttcttctcccacatactcgactacttcggtcaacagcaagtcgacttcggcatcatcttcttcctcaccaacgagtttcaagcgcttcacagaggctgaattgagagaaaaaaaagaaagaggtgtttgttttaagtgcgatggacgctggtttcggggacacgagtgtaaggaggctgagttagtggtggtagttgttcaagatgaggcccaagaagacaccccggacgattttattgctgaaatggtgggacttcctccggcgggaacagcgacagaggcccaaactgttgaagtttctctacattccgtagtgggattaactcctccgaagacaatgaaaatgttgggatccattcatggacaagacgtggtggtattgtggatagcggggcgactcacaattttgtcactttggatttggctaccaaattggcacttccagttacaagtaccgaggcttacggagtgcaactcggcagcgggcaagcaataaaaggtacgggggtatgccgtggtgttcctttgactttgcaaagcattaatattgtggatgatttcctcccgcttccattgggcaatacggatgtgattttgggagttcaatggctgaatacgttgcggaaaacaacccatcattggcaagagcatactatggaatttaaccttggtaaccaacgggtggttttacaaggggatcccaccttacataaaacaccagtttctctgaagtcattaatggctaccttacaaactgagaagattggtgtttgggtgga

SEQ ID NO: 114457 - DNA, 976 bp, Cannabis sativa
  modified_base (103)..(112): a, c, t, g, unknown or other
aatgatcagaatttagaccttatatgtgccatatttaagacaataatagagtctgtaattttaaaattagagaaaaattacagttttacaaacattgagtacnnnnnnnnnnaaaaataaacattaaatttataccgcttaaaaacataaaactttgggtacttatatttaccctatataatatatattctaagtcctaaactataattaacaagtaatattaataacgactaattatatgagatcatatatctaaaataacaatggcatataatcaagatcttaatgattaattataggaattaaatgtcaagcttttttttagaatagtcaatgtggaggggaagaacaattagtgaatatttgaaaattccaaattctattgggattataaggctgcacatattccttcaactgtctttatattatacatataattaataataacatttcaaatgtatttataagaccaacctccataatattatatatatatatttatttataattaatttcatctttgaaataaatgtactctctatgatctagaccactttttgtaattaaaatgtttaattaattaaattgattaaccaaaagatagatcatcatgaaattaactctggttttgttggttgttttagaaaataatatataatggcataaaggaggttgtcaatatatacaatgacataatttatttatatatattatgccttcaaaatcactttttgtacctttttgaagggctttcaaactagctttatttaggtttgattattataaatttacaacataattaattaattaattaaaggtttaattaaaaagctctcattaataagtcgaatagtgcatgctatgtatattaatgtgctttatgaatgatatgtttggacttggatcactacaagaaatgtcatttttaccagtacaattcgctactgcactggtaaaaataacttttaccagcgca

SEQ ID NO: 114458 - DNA, 4794 bp, Cannabis sativa
  modified_base (4750)..(4755): a, c, t, g, unknown or other
gatcacattgtcttttgagaccacaaggatgacaattttagatgtaatcaaaccactttactttgttggattatgcaggttgtcttgattgaaaatgatattaactcacgaccattttcctctcaagttcttgcatgcttgccacctttgccatggtcggtgtctcctgaagacttgtcaaatcctattcggcaggatcttcgacatttacgtgtatttagtgttgaccctccaggtatgccaacctgggtgaatattaaggtattttcagagattagcaccacatatttaatgacatactttggttgtgcaggatgtaaggatattgatgatacactgcattgtacagctcttccaaatggaaattttgaagttggtgtccgtatcctttgacttgttgatattgatagtgtttgtgttagcttactgaactgttgttcttatttcatgcaattcaaagacagcacaaattcttgactttactcaccatttttttttggctagaaaccacatgctaatcctttatgttgtgttacctgccaattcctactgaactgaaatgaagttgtgcttattttgtgaagttaacccttaatgatgtcctctagatattgctgatgtcactaattttgtgcacccgggcaccccacttgatgacgaggcttcacaaaggggtacatctgtctaccttgttgaacgacgaattgacatgcttcctaaacctctgacagaaggtatttacttgtttatttatgtcatgagttttaatatgatgatacaaaatttaaacatatgtgtttaaacttaaacatgatagtatccctattaaggacagagaaataccttgatagtgaatacaaggacggagaaatacaagtacctctattaatgataccgaataacgacatattgataataaattgcagcgtgctataaaagactgaccattatgaggacttatttcttacctaaacctcacacagatgtccatctattttgcagatatatgttctcttcgagctgatgtggaaaggctagctttctctgtcatatgggtatgtccaacttatttagttactcttttatatctgtgaattttatttccttttcattttaatataatgtgatgtaaattatgtatttttatttttttttatatgaagttgaattttgtgcgttttgcagttctagatttattttaatatatgattaataatagtattttcccatggtctcaactgctggcctatgtagtcatgtttttttcaaggtttctaatcaactacttatttttctaattattaaaactaaatacataattatgtgtgatggatggtggatagaccttgacttatcatcaggtggtgcttaaaaaattaaaatatctctacatgctcttaatattaatggcataaatttcaggagatgacacctgaagcagatattatttcaacaagatacacaaaaagtgtcattaaatcgtctgcagcattatcttatattgaagctcaagcaaggatggatgataggtgattttctgttctgacatatgtaatgtagttatcataaaaatgtccttcttctagtggttctgatccatttcatgcttagaaacattgtttatttccttctcaacagttctattttttattaatatatataactcttgagtgctctcaatcatcttgcagtcgattgatggacccattaactacagatttaagaaacatgaatgttttagccaaggtatgcacatattgagatgatatttaatcagatttacgaggtaaatgagtgtgatttgcatttggatatctgctaatatttatgcttttgtaatgctgcagataatgagacagagacgtattgaacgaggagccttaacacttgcttctgccgaagtcaaatttcaaattgacaccgagactcacgaccctcttgatattggtaagtttaatgtatggcaattgactatgtggttacttgtaaaaatagctaagattttcttgttttggtaaatttctcatctgttgtgaatcatttttgtaggcatgtaccaaattcgagaagcgaatcaaatggttgaggagtttatgcttgctgctaatgtctctgttgcagaaaagatacttaaagaatttcctttgtgctctctattaaggtaaactggtttattaacttgctcattgagatttctacgatgagacacagtaggtttaagtttaaatttttaaacgttgtgtgaaagattatttttcattgctcggattgttcagaactgtgttcttttcagtcattcctctggttaaataagaatttgtgacatgttggcttaagttgttcttatttcattaatcttatatgttcttcgctgatattggtcgtgcgtgtgtaggcggcatcctactccaacaagagagatgcttgaacctttgctgcgtactgctgctgctgttggactcaacttggatgtttcgtcctcaaaagctctggctgattcacttgattctgctgtggcaagtcttatctccatatgcaataattcctcccaccacactcacacatgtgtacactgtagtttaagcttttgactaattactttaaatgattttcagggcaatgatccatacttcaacaagctgattcgcatacttgctaccagatgcatgacacaggtaatatatataccagttgatttggaagcaaccttgaatttcctccctagagtgttttttgctaattaagtactgtgttgctttcctctggattatcatatgcaggcggtatatttctgtagtggagatcttagccctccggaatatcttcattacgggctcgcatcacctctatatactcattttacatctcctatcagaagatatgcaggctagtaacaattctattgccataccttttacatgcttgatcatgagcgttgcattgtttgaactttgaatgttaaacattcctctcctgcagatgttatagtacacaggttgcttgctgcctcacttgggatatacaagcttcccacagtattccaagacagaccgcaactaactagtattgctgacagtatgggccatctttcactcaactttttgctgctacttatcatttattataatattacccaaatagctgactttctaaacttgttttctatgaatattgagcttaaaaatgtctttggttctcttgaatttccatcagatttaaattaccgacacagaaacgctcagatggcaagtcgggcctcagtagagcttcacactgtcattttcttcagaaaacggtatgtaccatgctattatttctttgttatctgttttatgtttgtgttgctcacatgatctgtgtatgtaacggtgtttggtggcatgcacgcaggcccacggatgcagaggctagaatagtgaaaataagagcaaatggatttatcgtatttgttcccaagtatgttgttgtcatagttaaaagttttgtatttggtttgttgtattataggattttgaggataaattttgttattttgatattttgacattaggtatgggatagaagggccggtgtacttgaaccagaaaagcgagaagggaggaggagagtggttcgtagatgagcaggagcagaagataaaaaagatggatggtaccctttcattcagtgttctgcaggctgttaatattcatttggaggttgtggagcctcaacccaataggccgaaattacagcttacccttcatatttaaattattctttttcaattttgtgtcttacacttcttagatgagtgtcatttaatttgggatacatttatgtgtgatttatgctgctgctgctggtgtgttatttaaattgtacagtatgattgaacttatttattgttatatttcaacaatactcaacaatcaatatatacacaaatgtactcgtatattatccaattgaaaatgctagaccatcaccaaaccagatgttgataagtgtgaggaggaaggagaaaatgcactccagcagctagtgactatgaaatatggagttttgtgcttttattataaggtcaaaaatctttcaaaggtttattctaataaatacaggttttactggataattacattagagtttttggtggttcaattcttttcacaatcattttacttgcacttgatccttcaaagtttaaattttggtggtaaaagtctttaaactattaaattgttagcaaatttaatgtgttatctggttaattgtcaccgtaaattatttatgtgtatactcttctacatgtgacatgtttatattagtacacctaatattattatttgaaaattaaataaaattataaaaatagaaaataaaatatttacaaaataaaaaaatattaaaaattttaaataataatttaggtgtatcaatataaatgtgtcacgtgttgaaaagtacccaatattaataaaattgtaatttcctctaaaatagttttgtccatacaagttttgttagtgttgtataagatccatattttaaattgaaacaaaaatactggtttctgggcctaatagtcttggattgcttaaagggctgagatgtaaaatgatcctaaatttaaaaattaagttagtaaatgtccattttaaagaaaaaattgagaaaatagccaaatataataaattagctaataaaaattaattaaaaatacattttactacatattattttttttaaaaaaaaatatataataattaannnnnnttatataatttttttagtaatgcatattattatattgta

SEQ ID NO: 114459 - DNA, 5016 bp, Cannabis sativa
tattttttgatatttttttaattaggtagttaaattaagcatataaatttaaatttgtgatttcattattcgttattagatcaaaattcgatagttatatatatatatatttaaccaagaaaatagatcattcattaactttcggcaagtacaatggaattaagagcagccgaagcattaagctcagtaaaaatacaatctgacataaaacaagattctctagaaacacaatgagcagccttatttgcaaatcgcttaacaaaattcaaagaaacattataaagagtggagattaaagagcgacaatcatccaccaacattccaaattgtgatggcatctgaacagaactgttaaccgcttgtaccaccatcaaagaattagactcaataaaaataggagaccaacttttggttttgatccaagataaagcttccttaaccccaattagctcaacgatttcaggcttaactgaaccaatacgacagcttgaaattgcctcaataagattgccatctgaactgcgagctacacaaccaaaaccaaatttatgttcctggtcaaaaatggcaccatccacgttaaccttaatcgtatttcacacaggtttacaccaatgctcactaccgttattagcctcattaactaataacgcactcgatttttgggattgaggaacactccaatgactaaggacaatacgcgccgatcgaaccacttcactagctgaacagtttttttgattccaaagcaacccatttcgagcattccatatcccccaaccaaccatggcagcttccatagcagcagtagctgaattttttgccataacatcaaaaaaccagcaaccaaaactctggtttatagcagtaggtgaaggcagaattgagacattccaacaagcttgtgcaaatcggcactcaagaagaacatgagaaatagtctcatttgcaagattgcagaaagggcaagcaagatcaacataaacatgttttgagttcaattgtaccttagtaggaaggcaccccgagattgctcgccaaagaaaatggagaaccttaggcggaactgccagctgccacatattcttccagccatcaacctcatcttgcaaagaccaagcacccttatttagttgatgtagcttatatgtactcctaacagtgaataaaccagaaggttcctctgcccaaaaccacttatccacatccaaggtgtcactaagttgaatagagagaattaaatctctatctcgaggattaaaaagatcatttaatatatcaatctcctaagccttattatcaacaaccatgagagaagatatattatgacccacaagcccttgatgtgttgaagttacatatggattacaagagtcaggcagccacgggtcactcaaaatactgacattgtgaccattcccaattgaacgccttgccccagctcggactaagtcttgagctttgaatatactccgccaaatgaagctaggattttgtcctaatgtagccgataaaaagctcccattaggataatacctagattgataaattctgctcacaagagaagtactattggacaacaacctccagccttgttttgctagaaaaggcagattataatcccgaagatcacaaaaaccaagccctccaacattcttgtgacgacacattttgttccaactaaaccagctgatgcctctacttgaagaattggattgagacttccaccaaaatttagacatcatactttcaagatcagaacaaatttctttagttaacaagaaaacactcatagcatagcttggaagtgcttgagcaacgaattttataaggacttcctttccagcttttgataaaaaccgagtttcccaattaaaaattttcttcttcattttctccttaagaaatccaagaatcgcatttttattgcggcccatgatacaaggcaaccccagataaagactattctttgaagcctcaaccattcccaacagattacacatgtttgaccgaacagccacaagagtatttttgctaaaaaatatcgaagacttagcaaaattaacttgttggcccgaagccctctcataaacattgagaagatgaaggatattgttagcttcagcttgatttgctttacaatacacataactatcgtatgcgaataacatgtgtgacacaactggagcacctctagcaacacggatacccgaaatctgacgggactgttcataagctcttaacaaagaagagagaccttcagcacatatgagaaatagatacagagataaaggttctccttgtctcaaccctctcccaggataaatcgatcccatagtatgcccactgtgtgtaatattatacttgacagtacgcacacaatacatgatgagagaaacaaatcttctgctgaaccccattcgaatcataacagctttaataaatggccattcaaccctatcatatgccttactcaaatcgagtttgagggccatataaccctctttaccaactctcttccttttcaaatagtgcattagttcaaaagagatcatgatattatccgaaattaagcgccccagcaagaaagcactttgagtatcggaaataacagccggtaaaacaccttttaatctattcgccaacacttttgagacaattttatagagaacattgcacaacgagataggccgaatatcatccataaattcaggttgtttttctttgggataagcactagattagtgtcattcaaagatgggaaaaatgaacctgtttcgaagaaactctgaaccagcaacataacatctgaacccaccacagaccagaatttttgataaaatcctggtgtcattccatccggacccagcgacttttcggggtgcatttggttcaatgctttcctaacttcattctcagtagtcggctcaagaagttgagaattttgttcccaattaacagtagcagaaatactattcaacacctcatcaaacaccagcgtggaaggagtaaataatttatgaaaataagagctaacaacaacagcaagctcaccctcccaatccgtccaatgaccattagcatcacgcaatcgatgaatgaaatttcttctcctgtagctagaagctaccgcatgaaaatattttgaattctgattgccttctcgcagccaaagctgcttacttcgctgcttccaaaaagtttcacgttgcagcaaaatattttgtaaagataattctgcctctttatagttctttactgcctcagaatcccgaccatgtttccactttttcagctcctttttgcatctattaattctttcttgaaagttaccagagtaatctttgccccaattaactaaaattcactgcaatactttattttttccacaatgtgagaaccagaatagtgataccaagcattttccacaaccttaaagcacaaaggttcttttagtcatgcattctcaaacctaaataccttattccttcccacctcaaacgtgctggtaagacataattgtaacgggcaatggtcagaagtagtaacttctaagttgataagtttcatagcagggaacaaatcaacccagccttgattcacaagtgctctatcaatgtgcacttcaacccaatctgaggtacctctacttcgctcccaagtgaatggatagccacttaaatccacatccaacaacccacagtccactaaagtatcacaaaacctatcaattaaccaattcggataaagattacctccctttttatctgcttgagacgtaacattgttaagatcaccaataatgcaccaaggaagagatgacttctcctttaagcctcgaataagatcccatgtatgcttccgtaaactcctattaagttcaccatagagacccgtaagtctccaacttcgcccatcactctcagcaatagacgcatcgacataattaatactgtagccaagcaaacgatcctcttcttcatatcgccataacaacgccccccccccccatttttcccctgaacatccacagaaaatgcaccctcaaagcccacagccacccgtaacttctcaacaacagctttccttgacaaagtttcacataaaaaaccataattgggtttcttttggatcacaagatccttgatgaattgaaaagcccatgtgttcccaagcccatggcaattccatgatattatactcataatgattggtgggcctggaaaccaagacccacctttaatccattttttaacccacttgactcctcaacattttgctccatatcatcatctacaaactcacccacttcactaccattcaaaatatccatgcgtcttcttttattctccataatacatattaactcattatccaccattattggcttttctgaagcaattttcctcccagcatcatcaatagggttgacatattatcaccaatattttgcccattactgccttcaatatgcatccctgaaatcatgggattgatattgcctccagaaatcaatgggtcaacttccatgattttagaagtggtgactgtcgtaccgccaccggaattgctccgatgagtcgaactactccccataacgttttcctcctccctaccaaaacatagccattgcgccccaatcaaataattcttctttctcatttgcgctttcatccatatcccatatggtttagtaatttcctcaagtggctgggcaaatttctttggacaaaatcgctcagaaggtccaataataccgcagataaaacagaaagtgggaaggtgctcgtacttaaaattagtccaaatcgattctccattctccttacacaatttcatatgacgtttcaaaggcttctcgatatcaatcgttgagcgaacacggagatagtccctccatatgccattaaaattcttcggatccgtcttaacaaaagacccaataaacgcaccagcactacgaacaactttatattggacattattttaccataatcttagatctactcacaagta

SEQ ID NO: 114460 - DNA, 2167 bp, Cannabis sativa
taacattttgttgtgactaaaaagcacatttagtcacaaaaaaattaggttgtgactaaaaagttgtcactaaaaataacagttttttatataaaaaaagattaacataatttttgcatactattgatttattttttatgttagcttatatggtgagaaaaattatttgtcatatggaaataaaatagttaaattatattgtttcaaaatttaaataataaataatatctcaaaataataaataaataaataaataatatttattttaattttttgtaaacaaaaaaaatgcctcatttcaaattttgtcctaggcctctccacaccttgagacggccctggttgtagtccacgagttattagaatatttttatttgaagaataaaataaaagaattgattttgagataaattaatttttcatattcattgaatttgaacaaaattaattatgtgatattttatatatgattagattttaatattcattattcgatttgatttcttaattaattgttaaaatattctgataattaatataacacagatattgatggaatatctcacctataaatatagggtctcggtcctcgagctcttcactcattctgtgaaaacaataaaattccatctaaagagaattgagagagcgaggaagcccgaattcccataccaaagctatcacagggattgaagcttaaacattaatgactggaggtatttcggtcctttcatcgcatatacattttgatatgtctgtagttattctacattacatatcatttatatatgctttattgttcatattatattatagtctaacacgagtcacttgtacttatagtgggaatgttcgcttgaccagaaaatattcaggttaaagtataagagctcactttgtgtgtgactctaaagtcctttttcattacagttccaagtatttataagaaaaatgaaggtcagaggagagaaaggacatctccttcggtctctaagcactacctatcctctgtggtaagagtttggtgagataagatttgtctcatgtgcgactgactgtgtaatgcacaactgtcactttatttgcttaagtatatgggttgtcagaatagtatgacttcttaatgatgttattcctacgttgaattagtcatctatagtaactcactttaaaattcgtgttatgcaaataattgaattctggataacctttgatccaagagatcatcgcctctcggatggccaaagagtgatctcttaattgcctatcttgacattgcaaacctgctccttgacgagtcttacactttgctagtacaaataagaagttactatgtaatgagcgttaatttcttcgtaagtggggcctcttagcctcgtggagcctcttacacttgccatgtattttggtaagaaataagctcaacaataatagtttagaacttttttgaagtagactcctaaaaggttattctggtttacaatgccaaaaaacatacgcgcatacaataaaatacgtagatgttaaattacttaaaattttctgaaaatttacaaatagtcttaaataactataatatacacgattataaaaaaaaaaaaaaatagactaaatattatgttaaatatccaatatatctcatcaaaattgagtgaacttgatttcaattgatagttctactacaatgttagttaaatactataatattttaaattatattattaatattataaatacaattctataataactttgctataaacatgagttggacttttgacccaacatgaatctgacactagtccggaaggcacgagcatgactaggtacgcgaaaatacgagcttggtcacgatacgtaagtacgaatagactagcttgaaagacacaatacgcaacaagcccgaaaaatacgatataacataataaaaaattctaaaaattattatgtatttatcaattataaataagttaaaataataaaatttaaatataatatttaatattataattgtataattaaaactattaaaacatgtaaaactacaattatatatcaatttatttgtagagtaggatataaaaatttgagtatttatcaataaatattcaaattctaataatgctaataattttgggattatttcacaaaaacataaaaacaacaa

SEQ ID NO: 114461 - DNA, 1660 bp, Cannabis sativa
  modified_base (27)..(47): a, c, t, g, unknown or other
tgacctttattaattagtaaatctgannnnnnnnnnnnnnnnnnnnnttagggcacaaaatccaacaaaggggtggtcaaggaccatggattaagaaatgtatgccttgaaaagaaataagacatggatcttagtacctcttcttcctcactgtaaaatagtttgttgtaaatgggttcataaactcaaatttaattctgatggttccctacagagattcaaatcacgccttgttgccaagggattccaccaacgccctggagtagactttggggaaacttttagccctattgtcaaggttgctacagtcagagttgtgctcactctaacagtgacttgagtgggaagtgaggcaaattgacatcaacaatgccttctttaatggtgttcttgacgaggatattttcatgtcacaaccttctggctatgaagatccccaatatcctcaccatgtttgcaagttaaataattcattttatggccttaaataggcttcgaaagcctggtatgaacaactgaagcacacactgatagaatggtgctttgaaaattcaaaggttgtctcctcattctttttttccaagcatttaaggtttgtgattatggttctggcttacgatgacatcactgtcactggtagtgactccaaggaactcaatcacttcattgcaaagctaaatgaaacctttttttctaaaggatctcgggatattgaactattttcttaggattgaaatttttcgagacacgactagtgtttacttatcccaagggaaatacattactgaattacttcaaaagaaaaatatggagaatacgaagccaagtgttgcaccaatgacagctagaaacacattgtccttacatgatggaacaccattgtctcaaccaactctatacagaagcatcatcggggcactgtaatacctcaaccacaccagaccaaacatttcctttattgttaataagctcagtcagttcctaaagcaacctactgatgtgcattggggagcacctaaacgcatcttaagatacctaaaaggtattatacaccatggtcttcacattgccccaagtgatagtctctcactaattagtttctctgatgctgattgggcctgctgtccaaacaatcgaaagtcagttgcaggttattgtgtttactttggtgaatctttaatctcatgttcttctaagaaacaaattgtggtagctcaacacagtacaaagttggagtacagaacattagctcaactagtagcttaattgacatggctacaaagtttacttgctgaaatgagattcaaaatgcagaatgtgctagttatctggtgtgataacttaagcgcaagtgctttggctaacatgtttattacgcaagaacaaagcacatagaactcgatatttactttgtgagggataaggtcctgcagaaacaacttaagattatatatgtcccttctcatgaccaaattgtggaccgtttgacaaagggactcattccaaccagttttcaattcttgatcagcaaactcaatgtagttccctcaccattttgtttgaggggtggaactaaagaaaataaatcaagccataatgatgacactaatgatggttgtgctaatgataaggacagtatgagaaaaatagtgaatgaggc

SEQ ID NO: 114462 - DNA, 1712 bp, Cannabis sativa
atatatgaagttgttggtaattaaggtcttttgaagtgactgaaaatttaagaccattttgtgtattaaaaaagagagagagaattgagataaaataagaaaatatttgatgttattgtatatataaagttagtatgattaatgatatatcaatcgttttttgaaataaagaacaaaaagacctaaaatttaaaaatggtaactaaaccaaaaaaaaaaaaacaattttattaaactgtaaaattgattaaaaaaatgtccacaaattttgttgtaaatacaagtttgatccatttgtatttgatgcaactacatgctattaagtacttataaaattatataataagagtaatataaatatgatcgattaaatatacgtacctaattaagatgtgcagtaaaacccttttaaaagaaggctcaattattgtccttctcattatcatcagcttccttaagatcaacattgagttggagcagattttgaagctgactgtgaagagaaaaatcatttggtgcatcatcattagcagcagcagcagccctagaagaactcgcaccatcatcaccacgacgattgccgcggtagaagggacttgcggccgccatctgccaatggaattgctccataacttctggtgaactcatgggtgcagttggtcccctaactcccacattgttgtttgcatcttgttgttgcgaaagaggaatattctcaaagtaaaatgggcgcaactcaggattagtaggcatgggagggacactgttatgatcagggtgcgggtgaagctgatcgaattgagctgggtgagggccaatgtgagtggctaggtcatttgaggtcgagttgatcttggatcgggtttggttaaggcgattatggaggatggatatgaagcctatgaccccatagactgggtcacggatgcgtgcttgtgcctcatagaataaggagttcacagctgccatgcgctgattagggttaataccatttagaatcttgctgacgttgcttgcactataaaccctatggatggtggcaaacttttgtggttcgtaatgaggaaagtagggggcgtatatgcatccctcgttgcatttccttctcagaaacttgcacgctgaacatgctaaaggattgtcttccggtggttgatcgtcttccagttgaggatcgtcttccggttgaggatcatcttccaatggaggattgttttcgggtggaggattgtcttccattttttttcttcactttggttgtacactacaaaagaaagaaaagagagaaaaaaaaaatagaataaaaatatattgatccaatttagttaattagatcatcattgttattaagtattattagtgtccaacattttttataagtggcgttccataattaaaaataaataaataaatttgacgatttgcttgaaaataaattgtgaaaaaaatagtgaagataattaatgataattatagtttggattcaatgaaaatataattttgttttgctttcacaaaaaaggaaatataattaatctatatctagagatttttgtttgaatactcatattgtttggaggcaaatatttctactcctatatatgttattgtaaatgaatttgtttcttaatctacaatatagcctttcactcaaaaaattgcatgtttaaaaaacatatataatattttgcaaatatatatattaaaactaa

SEQ ID NO: 114463 - DNA, 3664 bp, Cannabis sativa
ttatccttctcctttcttgttgcacttaccttttttttggatctgatcataaggttttaaaggtgatccttagggatgaccttaatggtaataataagagcaagggttttcattttgagaatcactggctcactgaagctgatttcttccagactgttagcgactcttggaggaatacccaactcagtgataatcgtgagcaagcttgttgtgttgatgatattatttcttggaataggagcagcaatagttcgaagtgtttgatcaataaaatccagaaagagttagatgaattattatcctctattatttctattgatggtgaccatttgggggttatggcccttcaagtttcctttgatgcccttttgtacaaagatgagatttattagaagcaacattctagggctaactggcttaaggttggtgatatgaacacttagttctttcattacaaagcctctgttaggaggaaaattgatttcatcgggtccattactcttgaggatggcacctctgttggtgatactagagtcattattgataactttattagctcttatactagtctttttacatctcaaggagttgattgggatgctatttctggtattttgactaggatctcttgtagactcatttcctctgatcatgtttctttacttgaagccctgaggaagttgaggtgaatgaggctttatttcattgttcttgtgataaggccgcaagcttagatggattaaatgctcgttccaaaaaaattggtctattttaggtcccgagttttgtaaggatgtcctggctatccttaataatgactctgaggtttctttaattaatgatattgtcattgttcttgtccctaagaaaaaattgcctctaaaatttgtgactttaggcctattagtttttgttctactctttataaagtggttgccaaggttttgtccaatagaattaagcttgtatagaacactctgattgcccaaaatcaaagtgctttcttttcaaacagtctaatttttaataatatttttattgctaatgaggtttttaatgctctctatcataggaagaaggggacaattggttgggctaccttgaaacttgacatggagaaggcctttgacagggtggagtggagcctcattaaagctattctctatcacttaggtttccctcgtagttttgtttccattattattaagtgtatttcttcagtttcctttaaatttctcattaacatgtatttttttttttttgacagttttgtttctactaggggaattaggcaaggtgaccccttgtcccctactattttttgctggtggccaagggtctttcagcagccattcatgtcagagaacaaactaaagattttgctagtattttaacttgtcgaagagcctctgttatctcacatttactttttactaatgatagccttctatttactattgttagctgtcttctattttgttctcccccaacactagttctggggatagagagtttttttgtgatcagttgggtcttggcaatgatggttttgttagtaagtacttaggtgtcccttagtgtgttggtagaattatcaaatctgtctttcattacttggttcaaaatgtttcttccaaaatgaatgcttggaatgacaagtttttctctaaggctggtaaagaaactctggttaaagttatggtataggctattttttcgtatgccatgtcctgtttcaaattacctgtgtccactttgtgaaaatcttgagagtcttatggctagcttctggtggaggcaactaagaagaagggaaaaattcattggaaggggtggtcgaagctttgtgattctaaattctttggggggtctggcgtttagatctattccccatcatagtcaggccatgcttgcaaagcaggcttagagagttatgtccaatccctcttctctcttggctacacttttaaaggctaaatactttaaacgaaatgactttcgcactacttcaaaaggtcattactcctctgctacttgtaggagtcttctttagggaagagatctgcttctcaagggccttttttggaaagtgggcgatggtaaatctattttgcagtcaactcagattgaatcccacatttaaaatcccccaattttttgaatggtcctccctctcctacccttatcgtgtctttttttattgatgagagtggatgttgggatatcactaaacttaatcttttctttcctctagatgttatggaggctatccttcaagtcccaattgatctttgttttgttgatagtctcatttagggacatcattcatcaggtattttcactgtaaattttgcttaccacctagctaagtcctcttcctactcatcttctccctcttttttcaatccctcctgctttaaaagttggtggaaaaatgtctggacattaaagatccccccaatatcaggcattttatttgtaaaacttttaatcatgtcttatcttgtgcttgaaacctctacaagaggaaagtcttagataaccctactttttctttttgctcttataacatggagactatctctcatgcctttttaaagtgttccaatgctaggtccgtgtggaaaaagtcttcttttaaataattttatcttgcaaatgttaattgtgatattaaagagtttctccttagaggttttgagaatttgtagaaggagaagttaggtctgttttttgggattatgtggatgatttggactaaaagaaatgctttttgtttcaaaaaagaacaacatgctacacagatgtaaaaaactatatttttggtttgctgaaggattacttggaagcccaaaagcagccttcttgcaataatgactgcttagcaggggaatcataacatcttgagcaatttagtaagaaattgtttatctattctggacagtcttcctcgggttgttacaaggtaaacacagatgctgccttgaatgaaaagagaaggaaaattggtatgggagttgttattagagactgtaacaacattatggctgcagattttcctctccaaaggtaggagcagtctctcccatttatgcagaagctcaggccctttatcaagcgcttctttggtgctctgtagtgtgtttgttgattactctgatagaggtagactgccttcagttagtcacaaagatcgagcataaatggaaggaccattcctcgcttttagatttggtgttctagattgttgagtccttgtctttattttttaatatgtctctgtatcatgtaccaggatgtgagaatgttttggcacataatttaactagagattcattaggcttagatgaggatctggtttggaggaaaattcttccaagctaacttgtaataattgtaactttgtacctatttacattttttattgttgtaatttcctaaaaaaaaaaaaaactaatgctaataaaataaaaacaacataacattaagttataaaactaaaaagaaagacattaagttaaataataatttaatagtcaaattgatcacttatgaatcttagtcttgaagaatattaaaactccttaaagtctaagtggaatttatcgccccatttccgtttgtatctgttgcaaattccgatttgagaataaaattctcttta

SEQ ID NO: 114464 - DNA, 11453 bp, Cannabis sativa
atctaaatcctggtaaaatatttccaacatcccgggcatgtatctaaagtgattatgatttcacatcagttgtcatatgacatgatcaaatcaagtattgagtttgtcgtggtcaagcttaataatttttcattgcaatcaaatttgttagtcaaaattagagctgcccagctaacagattcagagtaagtgaaaacctaagaagaagttttaactggttaagctaaagatttcacagtgtcagttaataggatgctattgtacaaaactcgagtttgtgttccgagaagtaaggaacttagaaatgaaattctcaaggaagctcataccatgccctatacattgcatcctcgcactaccaaaatgtatcaagacataaaacctttttgttggtggtgcgggatgaagaaggatgtggtagaatatgtatcttggtgcttgacttgtcagtaaattaaggttgaacactaaagacctataaggttattgcagcccttgactctttctgagtggaactgggaggatgtcactatagattcgtgattgggttacctagaacacgggaatgttcaattccatatgggttgttatggatcaatgtaccaagtcatcacattttctaccagtgaaaacaaccttcacagtggatcaatattgcaaacttgtatgtgaaggaagtagtaaggttacatggggctccaaagtccatcgtatcggatagagatctaaagttcacttcaaagttctaggaaagtctctaacgcggcatgggtaccaagctgaagttcaatacatctttccatctttaaactgatggatagtctgagagcgaaattcagatattagaggatatgttgcgggcctgtgtaatgtattttgaaggctcctagagtaagtatttaccattggtagagttttcatacaacaatagctatctaagtactatagatatggctccttatgagatgttgtatggaaggaaatgcatatatctaattcattgggatgagactggagaaaagaaatacttaggttcgaaatcagtacagcaaaccaatgaggcaatagagaagatcaaggctagaatgcttgcctctcagaacaggcaaaagagctatgcagatccgaaatgcagaaatgtagagtttcaagtaggagatcaattcctacgagtgtcaccgatgaaggggatgaaatgttttgggaagaagggtcagttatgccctaaatttacagggtcttttgagatactcgagaaggttggattagttgcatatcgtttagccttgcatccatcactatcatcagttcataacatatttcagtttccatgttacaaaaatacatctcggatcctactcatgtgttgagttataaaaacctagagctccagccaaatatgtcatatgaggagcaacgagtacaggtccttaatagaaaagataaagtccttctggttaagaccatagcattggtcaaggtactctggagaaacagtaaggtggaggaagccaccttggagttggagttcaatatgagggctcaatattcggagttattcaggttagattttgaggatgaaatccttttaatggggggataattgtaatcaccgcttagtttttatatgagaatttgtagatgattagggcttaattccaggattagacttttaattattatttatgcaattgtgaagatatatttgaattctaggtttgctaattgtgttatatgtgaaatattataatttttatatttcatgcccggtactagtggaatgcgatgtttggcctgtagagtcactttattatgatttattactttagaaatagtgggtattgtagatagacatttggaatgtcaggtgtattcaagattatggagttggaccataatacccctaggtttcaaggttacttcttaatgaagtaaatgttattaaagtcattttggttttagtttaatttgtggaataagatggatatttatttttagcaataacctatagtttgtcttttatgagtatgtaataggctgagtattagttagattattaaggaaaaattaagattaacatcacaaaaaactttctctctcttcaaaccctctcactttctctaaacctctcatagaactagtaggaatcaagcttttgattcacaatttctgggtgttttagtaggattctatagggatttcaagatttaacccaaggtaagctcatttactctcctctctttgattttctcatgaattaagctaggtttgttagttatttttgggaattcaactactttttgttgtattgatgctagagagtgatttttgatgttggtttaaagatttttgagctgttttaagcatgaattattgctagttgttgagtttagacaaagtttgagctttagaactcaaacttttctctttaatggtggcgtctgtatttgagggttatacatgtgtttatcacttggaatatgttcattgtggcttaattaggtgttctggaaggtttgatttgatttgggatagaattgagttgatggtggtgtttttagggtttcctacaagaaaccagttaaccgtttccccaagtaaaaccctgagaaccgatttctgttttgggaattcggtttaccagttctagtagttttaaaatccttgttttttttaatatttttgcaatacttagtgtattgtcatgctctccatcgatagaaaaacttttggttttgattttaagtccctgaaaagtgatttagtgtgtcacttatcagctttatgaatgttgtgacttaggggcctgtaaaccgttgagcagcagttccactcaggttgaccgacacacctgaattcaagatcgaagattagtataatgacgtgcatatgtgattacatgtttagcgtgcatgtttatgaatgcatgttagataatatattgaaatagcggtatcagtatacatagagttattggataccgatgaatgtatatttggcataagtactattgacgctatcacatatgtacgactagagtaccgggtataggctgatattatggtcaatagtactatcgcataaatattctagactcagtatgcgtgggatgtgggatagggttatgattgggtgtatgggcgtctagttgtaatccgatttatgttatgattattcttttcttactgagtttgttgactcacaattactctttacatgtgtagctaaggtcaaagctaaggttgagcagcagtgagtgcgagcagatgaggattgtacatattgggggtggttagacctagagtgttcgatcttcgagatagcaggctgtattttgcttagtccctaggtgacaacttttgtaactaatattttgtattatggttgtaacttttcaaatacgggatcccaatttatgtaaagtttatttattttaattaaaagttaattaagtaaagttttaattaatcatattttccaacaagcccgttgattagcaacgtatggcacagttagctttaaatcacgataacatgcctaacctagtagggtgttacataaatcgagcttttcctcatgtgggatctcttcaattctgaacgattcatgttgagtatgtatatcatgttgcatgacttcttctcatctgcgatcttgactgcagtgttgtaacattctgtagagtctgactggactcctcttactaatcctacacctgcgggtgtagggaatttcattatgagatggtagattgaagttatgatcttcatctccttcaggttagggcgacctattactacgttgtatgcataattttggtcagttactatgaaatcaaccatggacttcactgttacgggtgttgtatcaagagttattggtagcctaatcatccttttagatcgattgtgtcctgagaaaatccataaatgctcaaagtttctagtttcaaatccttctcatgtagtcccatctgtttaaaagcctgcaagtttaaaaggttaacataactaccattatccacaagtatgcgaactacaatgtcacctccaatgttaacgactatgaccaatgcgtcgtcatgaggatggtgcacccatctcgcatcactttctatgaaagtgatgtcgtcgcattctttcttgaataactttgctgacctttcgcttagattgtttacattggttaatggtttctccttggcctctttcgcatatcactgatgtgctttctttgaatcttcaccaacatgagatccaccaatgacggtcaaaatgttgcgaggagctctagagccactcgcatctcgtgcattgtctgtcctatctgcttggggattattttctccgttatttttctcgtattggctgaaatgtccttgtcgaattaattctttgatttcatcatgcaaaaaccaacattcaagcgttgtgtggccaatatctttatggtacttacaatatttttttgggttcctcttgtcatgattgcctctgataggtggcagtttgttgaaaacacccttgtgttccttgatggcatatatatgatcgcgagagacatagaattctgtgtaattgacaaagtgcagacctcccttctgctttggggaaaattccttcctagttagggacttggcaagcttcgggctttgtcgccttgtagggctacatctcttcaggctacgcctaagactatgtcccccagaccttgttgatcacagacttttggacctcgttcttggtactggagatctttgtttctccatgctcttcttgagctctacaaacgagttttctattcttttgtggggctctatcatagcaaagaactcgaccaatgtttcagggtgtcgtgcctatagttccttccaaaagtctgttcttggtaacacacatgtaataagcatgcagacaagcgaagactcgggggctttctccacttttgttacttcaatgttaaaacacttaaagtaatcttgtaaagtctcatctatgtcttattttttgttcactaaagttgtgtatggtggtttgtatgtcatggttgcttgaaaatgagtcaagaacaagtccatgaatgtctcccaggttgagatggacggttcaggcaattggttgaaccggtcgtgtgcgttatcctccaaagttgcggcaaggatataacacttaaccaattgaggtacctgatcaacttccataatagtgttaaatttatcaagataatcgataggattggtggtacctttatatttgagcgactcaaagattttgaaaccttagggaagcctggcttgtcgcacttcttcggtgaagggtgatgttccatgcaacttgtatatgggatttctctgttgctcgatcatcctcaacgctcgcagaagattctcttgattaacccctcctaatagtatgggattgctggcaagtgcggcttggttacttgttggcagggcagctactactgctatgttcgtaggtaccaccacatcattgatcacgactggtgcaagcggtggattaactgtagttattgcattatttgtattcgcaagagggataccttgatcgaccaaaaggggatcacgtggttcctcctcgttattgtgattccttagggtctaggattgtgcacaaaatacttcgttgaggcgatctcgtaggtcacctctctacacattataccttcctcctagtctcgtgaacaccattcttcacctcgtgtaaacactgggggagcaactgttagttctcgaggaagaggaatgagacacaccaccgtttacctcagtttgtggttgtgcacgattacacgggttgcgtcgttcaagatcttcctcttcttgtggtctttcttccctctgattgggctgtcgatttgtattaggaatagcaggacctctaccacgtaattcgtaaacatgttgatttaggttgagtccaacatggtcattctcacataaacgttccctgcaattaagggtattgttagaatattcattacgatgcctagtatcactagttacttgattatcagtgcaatgtcagtttgggactcgtggtggacatcgggcttaaacccagtctcttcctgcaatttctgcttgcaatgcccatatttgttcctgaatagtcgtgtatagcaaggttgtcagttggatgatacccttggatgcagcgaggggtgtgattggtggaaaatgccacacgatagctgctgatgttgaggtttctccagcatgtcctgcaaacttaggaaataggttgaggggggtcatttagtacgccccactcctcctatgacaacatcaacatgggttgttccttctccaaaaatgggaacattgggagtcccaatgttgaaagatccaatgttgttgttcgtgtttatctgatctgtagccatttcgattctcctccaaaatctcagaaatattttgttcccacagacgacgccaaatattgtcagaggaaattagacaacaccaattttatgtgagtattcaaataatgttagaatactcaaaagttgatacacaggtactcacttagaatagcgagtactcagactatagactactaaatagacaaaaacgaacacaaaattaaagagaagacaagattattatagtagtccagtcagagcttggtctgcttagcccacatttggtaacgatttcagcttagtttatttgatttggattacccctttatatagaaaataagtgccctttaaaattatataattgattggtttagaaccgtttttataacgaatgacagtatttaatcaaaataaacgtttaaggaataaatgaagaacaatttcatccgttcttgaattaagtgcagcaacgtatgcaacttgataagttgcgagttgcccgatcatattccaacacatgagctcgcatgctccattgtgttataatcacaagatggcctttgggcctattttgtctgaatgtctacattcatctttgatcgcatagtcgaatattctgtgttgaccacaaggaacttgcgagtccttgacgagttgtcgaacatattagtcattcgaaccaaacctatataaagaaatgatctttagtagtcacaggagagacatacttggtcatcgcatataatttatatatgcgcgaccgacattaactcctctagctcttgcttattcttttgactatgcgaggcatagtatgcgactagaccttgtctcgatcaaatcttctcgcaagtttacatcaagcgaggttagctctactggagctatttattgacacatcatcctttttcattgggaactaggtccacgtgtcacttctttacgagactgtactcgtatttctagacgaaaaatttgcactacaacactacccaaactgcaatatcatgaatagcgaattagaggccaaggagtggcgattcttgttctcctacgtacttgcatgtgatttggtgggagcatggaattttcgtcccatatgttcttatttcttgtccttttgttgctcgatcgggtttgggaggtcaatgcttggggtcctttggtgtgtcaaagtgtgcatgaacctatttccactgccttttttcattctctcatcgtctcaagcctgctgattttgaaacttttagcatggttctttggagtttttgtgatgatcaagtttctcaaaagtgattgcaaaattgtgtttgatggggttaacagtttggcgaatcgtattattggatcattgctttgtatatatcagtatttaataatttattgtctcggtttagtgttggctcttgtttcatgttttcagaaatgggaatacaacagcccactcactagctaaagctagcatttattttaatgatgatatgtatttggatggtttaattcttatgtgtattgtctattatggattttaaatataaaaaaataaatacatataattattagtaattttcccctaaatcttttttgtccttaacaatattttagctattgaatcttctgtgcgtttggaaagtcatttaagaattaaaatttaatataattagaagtaattacacaatttaacctgtttgttcgaccatgcatataactacactgtaattatgtaattagagatgcttaggaggcctcaattactctctccaattccaatacatcctataagctcatatgggtgtgattagtaattacatatcaaaaataattttaattatttatgatgtatttggaattgaaagtaaatgtgtaattactagaatggtaattacaaagtctaataattacaatacattttaaaatataagatgtgtttggatatgaagtggtattacatatcaatttctaatatctttttttaaaaatagttaataattaaacaagaaaataatattttttagtagttaatatttaaaatggaaagtttagtgattagactcaattcttatgggggctacgagaattgaactgtgtaattggaacccctcaattacctccgattacacaattacaatgtattacattgaccaggcaaatattttaaattgcgtaattatttttaattacactgtgactttccaaaaacacccttaatacgatttagtcttttatttttattttcttttctcatatatataattttattttttgttctgtgtatgatgctattttataatttttcagtgtagtttttcttgaattatttgtcaggcaaaattaaattctggggcccctatatataatttaattattgtcaaaatgatagttttaatgctttagtgtaatggtaaaactttaaaaaaatcttaaaagctccaaggttcaatccttcatagctacacaataattttttttaaaaaaaataaaaaagtaaagattaagaattgatccattagcttaaagttatatcttttaccactaaatagcctcttagcttaaagttatacattttaccactaaactaaataatatttgttccattcaaaaaaaaaaaaattgttattttttcttcttatttaatattttatctatctattaatatattttttttaaaattttggggccatgagtggtcgggggcccgaggcgcacgcctagctcacctaccctcatggtcgaccctgttatttgtaaataaataaaaaaactaatatatgatatatgattttttttaacattattttttgagtcctcttttgaattatatatttaataaatttattcatgatttatcataaattttgattgatgaaatacttaatttttttattattaatttttaatcattatagaaatgacaaatactcaaacttctaaagctggaaaatcataccacaaatggaataattcaagacatatggaatgcaagagcaattaaataatgataaaaattattttaaatatttgttacaaaattgttatgaaatttaagttattaatagataaaatttattttaaatatctgttataaaatgataaccctaattattattatattaaatattatacaatattaattattctgtaattacaaattttattgtcaaacatgataatagaaattcaaatacaatataattattaatttcatagttgtttcaaaacacatccttaaaaaaaatttcattttttttttttgtaaaaataaataaataaataagaagaatggtaatgaaatgaaataataattggaaatagtgttacaatatatattttttaattaattttttttaatgaacattaaaactagaattattatttttttgacataaaactagaattattttgtttctattattgcataagttccactaaacacgtgaataataattatagtaaacttgccttactatggtcaaaagtacaaacaaaacaaagtttttgaccaaacaaaacaaaagtatagaaatttcattccatttcaaagttcttaatttttttcaaatcaaatgtggtaaatgtagaggaattgttctagagtcaattttttacgatgatttctttgtattaatttagaataattaatttatgataggggaatttttaaaaatatatttttttatgttttatttataattttataacttaaaattttcatttataataatatgcttttaaagtttaaattataaaagcacatttttctcaataaaaattaaaaaataactaaaagataataataaatcaatcgcatgataactacaaatcaactatatataaataaactataaaataatttaatgacaattataatataattacaaaataataaaataataatttataattttttttattgaattacatatttttataaataaaaagtttaaaacctaaaaataaaaataaaattgtgttaaggtattttttttttttaaaaaaattcatttctttacaaacaaaaacttttgatagctggatatcatcacggctaatcattttccatttttcatgtgaattagtaggtagcaacaataataaagtagtaatatacattaagaattgaagagtatagatttgtttaaaaagaggggacaaaatccactaaagtagtaaaaatgtttgctttggataacaaataactaaccatatcaacattagggattcacaatacaacctcccttagaaagaaaaaaaaaagggggaccatggttttagttttaagacaacaaattacacctagggcctagctaatcaaaagttcatccacatttttttattattataaagtttctatatataaatatacaaaatttaagtgaaatagtgatatagatcttagattgatctagaaatttgaaagtaattgcagttgaatgtagtttttcttttttctttttagttttttaatgtcatatatgtacggtccatttagtatagaagactggattagattagacagctaattttttcaatcttgtgtttggacacatgatggaagtttgaataactaatctaactaatctcatttatctgggaatatttatcccatctatttagaattatttattccatccaatagggtagaataaataatttcatacatgtgatatttttttatcgtttttttattttaattttgttaatatattttactttaataaggattttaataaaataattattacaaatttatttatagttttttttatcaaaaacgtattcattaaaattagtgaaaatataaaattttgaaatatctaagcttttaaaatttaaaaatattaattaaacaataattacttaaattatttttaagagaaacaatataataaaattaaatattcctcttaaattattagtaaatttatatcattaatttagaaaactaatatttgtattaaattagtggttaaactattatttaacataagtaattttttattattcaaatatttttattttactattgtaattatttattaaatataaatatgataaattattttattata

SEQ ID NO: 114465 - DNA, 2356 bp, Cannabis sativa
  modified_base (2089)..(2091): a, c, t, g, unknown or other
attactttctgcttctgcagacgcatacagttttatattttcttatgtataattgacatttgtaaaaatacggtttttcatgtaccttgacgtttaatccatgacaatgtttttttttttgtgctactcaactctcttcttgagaagattagtaatggcattaaaagaatttatgacgctcaactaggggtgtgcataaatcgattcaattcaataacaaccgatcgatctaattacaaattaaatgagacttcgaaatattagatatccaattgtgatcggatcagatgttatttttgaatatccaattggattagatatgatgttggatggggtgtccaaaaatccaatacatccaacattcaatcgaactaattagtattttcaattagtttaaatgagtaattaaatttatattgtcactacaagaaatgagacttttgccagcgtatttttatgctggcaaaagttaggtattatgctgacaaaacaaaatttacttttgccagcatatttttgcactgacaaaagaggttggcaaatccttgttggtattggaacttttgctagcgcattagtgaattgcgctggcaaaaataatatttcttgtggtgtgttatacgttaaatatatatatgtatatataaaattaatattaaaattttacttttttttcttggattggatagatccaatccaatccaatccataatgaacctaaaatattggatggatccgatccaatctaaaaaatactatgtataaaatattaaatattaaaccaataaatatacatgacatacatccaacggatagaactgatccaatccaacatctaatggatattggatcgatcggatgactgaaattaattagatcggatagtaaaatctaacatccaatatataattggatcggatctagataggcctaaaaatattaaatgtggtccaatgaacgcgcctacgatcaacctatatgagtaaagcgtatgatcgagtaaaataagatattttgcaagatatatagggtgaagcttggcttgggaagaaatgggtaagtttagttataggttgtgttactacaccagaatatgcctttatgttgaattggaaatctcgtgggacggttagtccattagaggattacgttaaggtctgcgcattatatccatatcttttcttttttatgctgaagctctgtcttcattgatttgtcttcactacaaaaaaaaattacctttagttataacaaaatttttgtgactaaaagtgaaatagttgtgactaattaaaaattattatttctatgttgtgacttaaaaggtttgtctctagaggtattagttagaaaaattataatttgttttgactaaatacttttttagtcacaatacttgtagtgactaaaactaaattagtgacaactctaaaaaatactatgttttagtcacaagtaattttttgttatgactaaaagtaacatttagtcacaaaatatctacattgtgattaaaaagctatcactaaaggtagctgttttttataatgcctggagagaggaaatgagacttgatgggttttcggtgcactcggactcggcctaaaatctcacacttatcgtttgcaatgatagcctcatcatttttgccagccataaggctgctaatactacagcattgtgcttcaacaatataaaacaacttcaggccaaaaaagataaatatggaaaaatatatcattatgtttacttccaatattcaagatgctaattaggatgtatttttttttcttagatgaaatatcaacttcattgaataatttagcattctgaatacaaaagatttaagagttcaccagaaatagaaatatcaaaaatgctacgatcagattgataccgagaatgtctagcaacataatgtgctactcagtttgatgatcgtctaatgaaaaataaattaacatttgggagagtagataacaaaagttggaagtctttgattaaaaggccaaaagtggacctcattgcttggttgcttcgaatagcttgtactaaaacaagactgtccgtctcaatttgaacatgttgnnnattattggtctttacccaactgagagcatctttaatctccatggcttcaatgacttcagctgcatatctttcgccatagaaaccggccagtgctgcaacaaggtgaccaagatggtttcgggaaacaattctaaaaccataattgttatcgctttcaaagagtgcttcatctacattaatcttgattgtgttttatgtgggtctagtccatgactcagcgccatcactgatgctttccagacagattgatgacaacaaaatttta

SEQ ID NO: 114466 - DNA, 2073 bp, Cannabis sativa
gtagtaagataaggttgataacttccacatttggattagatcacttaacagattgtttttcatgagaagagaactgctaacagaagatattgaatttcaaagtttggtaatatttgacattcttagacattagaagagggtaaaaatgcagtgatttttatggttatacttcatttatgctattgatttcgtatgagtcgtagttcttaattctatgctatgttgaatgtaatctccagacaaggaaatctttgtgcaagactctttggttttcagtttattcataaactgtgtttacggttcaaatagttgtatatgtgcttagttgctaacttgatacactaatggcatgattatgatatttaaagtagttaaccagtgcccaactctatatttggctgagataataattgttgtttcgtgtttcaagatacttggtgatggagagttaagcgtgaagctgaacataaaggctcgtgcgttttcagagcaagcaaaggagaagcttgaggctgttggctgctctctcactgtattacctggacgaaagaagtgggtgaagccatctgtagcgaaaaaccttgcccgagcagatgaatactttgccaagaaaagagctgctgctgctgctgctgaagccactaatgcaaccgaaccagcttctgcttgagcgatcacagttcatactctcttttggtagagcacaagtagcattttcattgctcttttaaggcttttcattctttcttgtagtttttgagtacatgctattgtacatgtttttttttttccatttttctttgtaagactaaaaaatagtaaggatgtttttgcctccctctaaagctgtaaaagtgtattgttttcatataatgccaactgaaaattctatactggttgtgttgtaacaaaaagatagaacaacttattgtgatcaccactcaataaaataaaattcaacccgaaattaacgaaatggacacttagcttttacgaggttctgatacaatcggttcttgagctggactttgctccaagaactcggttttagagagagagattctaagttttgtcattcaattcttaagtcttgacatccttttatagctttagcataggagctgagtttaagagcaacggttttaaccgccactccagctgaggtggcaaaccgattttaactgattccatctaacagaattgagcttagagatttcaaccaatcaccatatgttacttgacttaaattggtaagtaatcactctcatcttgtaatagcaaaagaaactgaaaatactatgattataacttagctaaacaaaactaaattctagcataattaacttggtttttatctttgtattgttgatttgatagagatggaccctcttttggtaaaactatcataaaataattaaaatttgtgttggaatcagattcaaaaagatgtgcatatattgaccaatagaagttgttttttcttaaaaagaaaaaggcctttaaaaatatcaagtggtgcaaatgcatatgatttagtgggttggcttacacaccacgctccatattgggcattagaatgattagagaaggaaatataaaaggggtgtgacgcgtgtaaatttgctttcattgtattttgtgtcttttgatttgaatttacttcttttcaaaactacaactaattctttttcttttgcccaaagttcccacttacacaacaaaaaaatactaaacacttatggtgcctaatattcttctgaaatataatattactattagtataatttaatattaggtcttagttattttactttaataaaaattatagaaaatagtattgtaatattgttattgggcaccagtagtgtccaacattttcaatagatagcgtctcaggatttgttagcgatattcttttttaaaagttatattcttaggcggctcgtttgatacgccgtataaaagtcgtattgtattaattaataaatatcactatgtttagattaagcaatgtattgtattaattattacgaccaaatttttttaatgcaatgtatgttgtattatttaata

SEQ ID NO: 114467 - DNA, 4700 bp, Cannabis sativa
tgacatactaaataagtaatgaattctatttctttattgataattgaatggcaaagattacattgaaataaagttttatttaggacacaaagcccaacaaagtaatcggtaaatggtgattttacctaagttgtagctttgtcttttagtgggtttagtagtgaaccttagcattttctagctaaaatattgtaattaaggaaataagataatgttaagatttattcatttttcttaaaatagaaaataaacacatttttccttcaagctctctctctatctctctctctctcactcactttttcagttctaaaagaaaccagcaagaaccaagtttttcttcactgatttctcatagaattcaacttgaattcaaggagttttggaagagaaaacctaaggtaaagccctagtacatttctctttgagttttggtagtttttctttggttctagcatgcaagttttggaattaggttctgtatgaatcctatttgttcttgggttgttttttgagttacatttgagttatttgaagcttgtttggtgtgattttgagatctatttgagttgctgagaaattttaagttcatgaactcaaacttggctcaacaatggtaattttcaaatctgtgagttttggatgttgttattgattgatttatgtctattgaggtgtaattaggtattctggagcttgctgtgaagtttggggcagaattgagagagatttgaagctctttgagattcatacagaaaaatgatccaccatttttctagaaacagtgaactgctttccccggaggatcctagaaaatggtttaccattttggggatccagtttaccagtttgggtagttttgggagccttaatttttatgttttctcgatatttagggtattaccacactatttattgataagaaaacttctaattttgagtttaagtccctgaaaaggttttagcaagttttttacccattttacgtaaatgtgacctagggtctctattcagcaagtgacatttccattcaggttgaccgacacacttgaatctgtaaacgatgtaagattagtataaaatgtgtatatgtatatgtgtaagtatgttatattcatgctgtattatgtgatttatatactaccaacactagtacggttgttgtatggagtgcattggtacactatataatgttaatgggtatgacacagcgttagcaatgctagtataggatgagtacaaagttcatgtggtacaacactcaattatactccaagtgcgattcagccctaccgacactagtacgggacgcgtacttaaagcatgtggtacaaaggtcttagttgcattaagaatgttcttgattatttgttaagtcttatagaaaggtgtataggcacctaaatacaagtcagtgatatgttatgtgttttatgcttttctttttgagtcatcaactcattgatatgtttacatgtgtaggtaagggaaaggcaaaagctgagcatcagtgagtctagagcttgaggatgattgtacatatcaggatggttagacctgaagtatttggtctcgggataacacgggtctttattttgtagtcgaggagcgacacttttgtaaaatgtattttgcataatgctttaaatcttaaaatgagatcctggcttttgtgtaaagctatatatttataaaagtttaaagtttaattaaaagtttaaatttggcacaattttcaaagaaaccctttgattagcaaaggcatgcacattaattagaaaatcactgtagtaggcctaagtaagtagggcattacgattcggtattagaactaccatgttgtttaccgaagaccgtcaagatatgtacactcatcgtcagagacaaggtcaactcattgttcagtaagtctttacttttttaataatttatttgattagaaaagcatgataggaagcatgttagcaatatgttagctgagtattgcattgcctaaaattccatgtatgcagtaattggattgtatgtgatcgatgtctgacctacctgacttatgggttcgcatgctaagtcctataatatggatgcttgatgaaaatgagaagttagggaaatatggttaagactggaagcggcgggaagttcaaaatcctccacatcctcatagacgcggcaaaggccgtggtacatttcaaagaggtggttatgaaaatccaccacagcctcatcaggattgggagtaaaggtttgaagaaatataagcccgaattaatcaacaagatgaaaaaatttagaggctaaggcattaggatcctcatgctatgcctcctcagcaagtgtcagctgctcttgctcctatattgtcagcagaataacctgttgctggtaaccgcatggagcccttgtatgagcggtttcgtaagcaagcgcctctagcctttttgggagactgtaatgttatgaaagctaaacaatggttgctatcatattttttgtaccttgatgtggcaatagaatcagatgacacgtgtcccatatttctgatatctgggcggaggaagatatccctagcagtctataaatgactaaccagcatctgtgatagttaggtatctgagcaggattgtggagacgatgtccgactaggtacgaacatgtttatgtcgaatgtcatacaagagatggcgacttcaaagactaatctcgttgtgtctagactcgaagacaatccctataatcctgggattgagtcaaaggaaaatggaaacctgtcctagtttcctatttcatatattgtaattatagaatcattgtattttcttattttttgcattattagcaaaagggaaaccatccctcaggcattaagtctctataaatagtgacctagcctcactatgaaagggatcgagagaattgctacagatatatactctagagagaaaatagtgatctaagagagttactcagagatcaattgtaagagctttcaagaggaagaacactttgttccttctcttaagttaatacaacacaaggggagtaggctattaccacacttacggggtcgaagctctttaaaatctagtgttcactttaccttattgtttaattacattactcaatcaatcaatttattatttgactcactgtcattggctagaagggaggtcaacattttggtgctctcattgagagcaaaaacacaagtcttttgtcttaagttttgacaggtaaataggatggttgtacaaacccgtagaggaggcctcactgatcagggcaacccaatggtgacagatcccaatgtgcaaactcttggaaacacgaaaggaccaccaaggacaaaccctgagcaggtcactacacaacctcctactataggccacggagtgacttcccctctgactgggatcacactaggcttacaagaaactggaaacaccagttcggtagttgatcattccactcccaacactgaggttctgtccacaactaatactcaaagataagttggagatgacaccaaaatccaaaatctgtgagaggcactggggctcatgcaagtcataataacattttgcatcatgatcaagaagacctcctggcaaccataaatcttgcatttgacgaatagaggcatcaattcatagaatggaggaatcgagagatggagattatgaaggctcaccaagcagccattaatgattgtactaggcaggccaccatactgttaaaaagggcctaccaagtcaccaatcaaaaaccagctactgcatccagtattcccttaggcggaccagaagagtatgcagctgggcataccgcacaaactcacagtcgttagccgtacaatcaaaggccacaggtctaaattgtgggccaaacggtagacgaccagatccaaaggatcctctttccctgtatacattttccagattggcattttgaacttgggggataattcaaggacttcaatctctagggagaaaggtgatccgcctggtcggtcaagtttaagatcagtgagttttggatcggtcaaggcttgcaccatgtttctaagttgatctagttgtgcttgcacaaatggatgaactttttcggcctgttgaatgacctgtgtcacattgggatctctttgaactggatcttggatgcgatgcctgggtggaaaactagtggaacatttgttcgtccaggccccttcttcgatttaggtctgtccttaggtcatgtgtaacgcccaacctatcgaatactgaagtattaggtggcctttgcatctgacttgtttggccggcaggttggccagaaatttcagttggggtaaagttggtgtgtataactccacccaagggacagtccggcagcatctgggcgtctaatgtttggcctacaggttagacctatggtcgtggattggacggctgaacaatgtgggtttatgcggtatgcccagatgcatacccttttgaaccgcccaaagggatactggaagcagtagccggttgtttattggcgacttggtagcccttcctatcagtacggtggcctaccttgtgcgatcaccaatggttgcctgttgagccctgctgtccccaaaagtgagtgttttaatatttatactcgcaagtgcacgaatcgtttcagaatatagtgttcatataagtgcaaggtcgaacccatgggagttgact

SEQ ID NO: 114468 - DNA, 5940 bp, Cannabis sativa
  modified_base (5869)..(5885): a, c, t, g, unknown or other
attttgctcccctcgtggctaaaggtggtcgtcgtccagtgaagaagaaatcgaaggtgtctttgcctaaaaaaattcaacttcaatagccagaaaggaaagaagaagtcaactttaagacaattgtgatgaaactgtaaacaattatatctgttgcgagtcatctaacataaaactacaaaagaactaataatttcacatatttaatacaaacgaatattacagtcagatcgcgtatttgacaattctaagccttgtttttataacactatgatattatagtagcaaaaccattattcaactaatgtgcaacttaatttcaactaaaaatgttaaatgtaaatgtgtatctataagaaactagttgtcagtatttttttgttactgatcgataattagttgtatcttaatagtaatatgtggagaaataactcttagcaaaatgtttatgcaactgtaatgcaactgttatgaaacattaaaaatcagagcagtgtttccacgtacgtaactctgtctacatatttattcatgatttaatatgaacaaattcaccattaaaaattttaaaaataacaaaattgcactgggataataatttaactatagtattgatgtaatttttttttggattatacttgagttggattgtttgagaactccagttcaactttttgagacctacatttcatgtatctaaagattgaagttaggacattagttttatgcgaattaaaccagatttctagttgaattttagtttcgtagtagtttttttacactttttttcatgaattcgaaacaacccatcttttgattgatttcggtcaatttctcacgtgaaatcaccggaattaatggtgattctctttctggttgggtttcgtttcggatgtattgagttgttgggttggtcgatcgaatattatgtgtgtgaggttatttgttttgttccgtgcgactgaagtagtagaagaagtggtattttggtaatatttagtattaatatttgtagggccgacatttattatttttgtaatataattgtcatttttgtatatatatataaaaaaaaaaccctattttttaatataaagatatattttactattacttaataatatatatacatatatatttactattacttaatttgaacatattttgaaataaaaaatatatttttatcgttacaagtatctaccaactagattattgttgactgtgaatttagtcaactgacgcggagctgactaggatctaattttatttatgactgtcacatgcagaatgataataaatatatagacacaagaatttatgaaggttcgatccctttgatcaggtaatgacctactccccttttgttgtatttacttttgagataattccatgcagattacaggttgaaatcttatactttctagctatgactctctttcagtattacaatgagaagaatagttatgagaagacttctgaagtggtgaggaaaaaaaagagagcttaatgccttagtgcttttgagctcttaagtgcatgtgcagaatgaaagaaaattaagttgaggtccccttaacgtagggttaaagcccttttatatagtgttaggattttacaagttgttattcaagatacataacagatggaaaatattcctagaaatagggcagttacattctgacgaagctttcctactttgtgggcagctcaagtcgtttctgaagttgtaagagtggttgtagatgatttgggatctttcggaaggcttatgggaaaaacacaattgttagagtgtaatatgtgtgcttggtcagccaaccatatttggaggttgtctggtacatgggctttcttccctagccggctagctagtggtacggccatgatcttgcaatgctttgtgtatctctgttttcactagtgattctgataccaggatgaacttgctttaggaccttgaaaatgtggatcttgtaagtctccatgctcttcttgtctgaatccaccttggaaccctgggatcttgagggacagagggttgcacggcactagcctgattggttagagctgacctatctctcatgtgtcttctgcttttggtcacgtggaggtgcaacgtaaggtgggcaaaaattgggataatattttcccccaagtccatgtctaaacatctgtcgagatagggactttacactatgcctggtattgtgatgccctttaccgtgcaggtatgcctggcaaaatattggtctttttgggtgacgtgattttatgagagttaccaactttatgttgatgtgtgggaaatcgtgtgacggttgtccactttcccatgtttaaactcttggccttctctttcccatgcatgcctactctgtggcattaacttcccattaaattttttgggggaaaaataattttccagaacctatataagtgcctcattttctctttttcatttctcacttttcaagatttctctctgaacaaaaaaaaattctctcaaaaacttcttaggagccgaagctttgtgagcccaaggttctttgtggagtttgactttcttaaagcctacactcgtcgtgcagaccatgacgatcttatccgtatcttctcaatgggtaagttcagagcttctaccactgttgagtttcaagctattgaagctcttgattttcacgctttaaagtagtctttatacattgtgatctgttcaatagctttatgatgtagaatgcatgactctttgatgaaaaagattgaattttacgctttgttttgagattttaaactttggggtttgaagaacacgaacaactagaatttgaatgtgtatataggacttgtttgattcgattaaggaccctacctggtactttgggtctattagagaccatgtgcagtcatttagatccatttataaaacctgcctagttcttggtgaaccagtctttaggctggccagttcttggggaaccaattttaagctggctggctcttggcctttcaaatcaaggctgctcagttaatactcatagattctggtcggttaacctatatttttatccatgtctattttataatctccggttgttcacctcattctacctttctgcacagatgaacctgtgtgcctattggggaggtgacaaccagatcgatgaggatttacttagtcttctgtacgaagactattgcttagccagtgcctcctttgagagctcatcgagcagctctttgagtgattttgaagtgagcagtggttcttcagaacctgagatccagcatcaccattattctaagtgaatatatggtgaaatctatgaaagattcattcgggaatcgacccaagggtggaggtagttccttcccaagtcttggacttacatcgtttagcaaggtgtgtccgacacatttcttgttggatcggcatcttttgtgtttagagatcttcctgtagtagaggctgttacaactgttgccaagtacttcgagcaacatcaagcattggctaggactaagcaggcatatcgccaagctgcccttacttgtcctcatattatcgaactcatggcaagaggaagagtctgccaagttgagcaggttgaacaacctaaggctgaccaggctaaggagcctatggccagtcaagaagaggagctagaagttgattaggctgaacctaagcgtagcctagggttggctggaggcatcctagcgagtgacgcagtttagggtaacccttgggctcttacaacaaggttgaagagcctctaactagcaggggtcaacccttaaaggtcggggttgaccatattgaggacgaggttgttgggccttagattatacaacttggagagggagatagatgtatatctcctcattctacatttcctgctgccaagcttgacaacattattgatagtggacttgttggtcaggtctgatgcattgggcccgctccaagccaagtggcttaccatccccaaccaaactagatggcatggtctggtccccatcctgagtaaggggcagtacttcttttgcatccatattttagagacatagctaacttcttcaagtagtgtccaacctagatcacatcgaaaggcgtaaagtatctatcaacgatcttcgtcctgtacgctgaactaggttggttgcagccttcgcctttcaaggtgaactattactttgagctaaaatctagtccttgtcaaaacatgactggatacttctattttagctagcagggataccagtggtcgggcagcaccaatgatacaaccatatcaaagatcaagggttacgccaaaagttacttcatggcttatggcataaaaggtgtctatcagttctttcattgagtccctagttacagccaaccgatccccacactaaagataagggatagggctaaccacatcttgtctcttcttgctactcgacataacatctataagctggcctatgaagagaactataggatgtacgacatgtaccctcctagtaagggtgttaaggcttcggacaatcctcctaaggatctaggaaatgctcttgttgagaaagagaaaaccaaggaaaagaggcctacaaatgagaaggagaagagtaaatttgatgacgagatctttttgcctgagattactcgaacaaagactaagaggactgagctcctcagtggcgtctggcacgtgggagcactgctggtgattccccaattctaattaggcctaaaggacaagggttagtgagacctgcttggcctgcgccaactagataaaggcaaaggcaaggctactgtgattgaggacaaccctagtgagtcttcttctgaagatgaagggcctttagatggttttcctggggtagaatatcccgaggaaactgatggtagtaattcttttactcttacttgctttttgtgtttattatttgtattctgaccttgttgattttctcttgtagacatgacttccaagatgaggaatctattgaagcaactatcgagcagcccatctgacgggtagaccaatccaaaactacctggataggggttgcctcggatgcgacccagaccactctgccttttcctccttttggtccacctttggtcaaccagcttgtgattgctgatccttctttgaggtctacctttcctccaaagttacccagtaaaagccaccaaagacaaggtcaagcagcttcttccagcatgtaagacagggctaaggaggttgcccagagttatcttgaaagatgtcttcctactgttggttattagcttcgtgatttggacaacgattccttggactatctaacgtctagtgcagtgaaagatgttgcctcgatgagtttttctgtatttgcccaacttatgttttttgtgcaaccctttccatacagcttggtcgtacaacttttctgtgcagcttttattaacttatcttctctcattatctcaaccttttctaaaacttggtcaagcccatgcctgagccaaatacacaactatgtctttcaaaaagaaaatgaaagagaaggatgccaagcttgctgagaaggacgccgagcttgatgaggttaatacacatctaggggagacagataagaagttgagggagttgcatgaccagtatgatggtgtgggtcagctccttggtgttcgtaatcaggaggtgactgatctaattgcagagttaccaagctgaggaaggagttaaatgcagcagagaacacatacaagttaaaataagaagatttggatgttgccttaaaggatcaggaggaccttacaattgagtatcgggatatgtccgtaaagatgttgtatgagtgttacatttgttgggttttatgcccnnnnnnnnnnnnnnnnnaatataatcagatttacttatttagattagaaataacatttaatattgcatggtt

SEQ ID NO: 114469 - DNA, 2842 bp, Cannabis sativa
  modified_base (2781)..(2798): a, c, t, g, unknown or other
ttcatatttagggtattaatcaacatacttgtgagtagtaaaataatttccaatatttttttaaaaaaaaccaaataattatatcaatttttcaaacattaaactccaagttaaataaataaatttaattaactagaaacataaattaaaaataatgattattagtgtcttattacttaattaattagttgattttttttcataaacataattagtagttttatagtttttcttatttttttagaaaattgtttttttttaatcaaaacggaattttgttaatcaaaacagagcaaatggtacataatttagcatccacaagataacaacaaaaacactttcttacacattacaaatgaaattaaaaacttattggtctctcttagagaatttctttccgacaacaagtaataatttagattttaacgctactctaattaatttatccacatgagatatcataaatacttttagttaaaaaaaatacaagtattctagctctaccaaataaagtataccatgcaataacactatgaagcaagctacgatctcgttttgaattcaaccacatcaacctatttgggtaagacacaggccaaatagcatttccaaaccaagattgagtaacttgcaggagatgcttggagaaagggcactcaaagaggagatgagtatgacaatcatctccaatatcacagactcaacagaatgtagaagtaatagtgatgccctcttgtcatcaggtgatctcttgttaataagttattatgggaggtttgccaaaacataaatctatgttgtgaaatgataagcgacaccaaattattttacaattatcaaccttagcatatggagcgagaaataaattataaagcttgctaacctaaaatttgcccccttttccagcattcaggattgattcttgtgtgaaaacatgtctaaaggagtttacgccgataccagcttacatcccctttcttaccaacaatccaaaaatcttagttttttaagtagatggcattgatctatttaactcaaagaacatcttgcttcgtagaaagagtcgaaatatgccgagcaattgaagctttattccacttgtctctttcacgaaaacccaaaccaccatagatcttaagcttgcaaataagatctcatgaggctagatgcatcttactagtattatcctttcacactccataagaagtcccaacaaagtttatcaacattcttgactaccttctgcgggagcataaaaatgctcatccagtaataatggatgcccaacaaaactgagtgaatcaattacatctaccagcatacgagaggtgatggcttgcccaattatgaagtttcaattgaatcttcttaagaaaaagattgcaatccactactttctattttattggcctcattatcacaatgggatttcccgaatggctagtttaattgcttcatcaaccctgccaaagtaaatgtgtgacttatttgaattagcttagaggcacaagcagctcctaaaggtagcaaaagttttttgaattacatgaatgacttttggcgtccctttactaaacaggatcaatcatcagcaaagtaaagattgactaactttaaagatttacacattggatgatacttgaaagttgaactatgggcagcaaaaagtaataaacgagtaagatattccattaccaacacaaatagcaattgagagatgggatcccctgaccttaaacccttttcccctagaaatctaccatgcacacaaccatttaggactaatgaatagattgtcccccttaagcatgtcctgatccaaacaatgaacctgacgggaaaaagataatgcttcaggagtgcctttaaaaactcctagtttatggtgtcataagccttgtttaaatcaattttcatgagacatcttagagacatgcctttcctattgtacccacgaagcaaatcctgaagaatgagaacattacgagcaatggatccattcttgatgaaggcaccatgttgattaatgaatttactacacatcatttgcagattcatttgtacagtacgtattgtaacaattaatcgacctataatcaatagctttagaagccttttcaatttaggggattaaagaaaaaagtatgttattcagttgtaaaaagatttgtccagtttcaaagaataacaccacaacttttgaaaattcttagtaaataatcttttaatagaaattcataatttaacattattattcaattaattaagacctaaaaatagaaagtaacaagtttactatcattcttaaatttaaattcttctaaactaatacggcgacttacaattttattagagtatctatattatattctggttgttgttttagtttgaagaatattccaactaatttgttatcgtatttgataagtgacttgatggttaataagattatgattttccattaaaaaaattcttctaagctaaaattatttacttcttttgaatttttttaaaaatctgacattaattctttttcagtatattaaatattcccataattaaaatagatgtattttgttcatattaaaaataaatgtaatcaatattgcactcaatgtatgtttttatacaaaggattaagattaactaaacaagagaggtgaaggctagtattgaagctaataaaataataaatccaaaaacaaaacaaaaaaaagttggcatgtttaattttattactattttaattttggctaaatagtaattttttcccccgaactnnnnnnnnnnnnnnnnnntgccccctgaacttttttggctgttaaaaattccccttgaacta

SEQ ID NO: 114470 - DNA, 4654 bp, Cannabis sativa
  modified_base (74)..(81): a, c, t, g, unknown or other
tacaccaaataggaaactatattaaagtataccagccgaaattatacaaagaataataaaatatttttgtcaannnnnnnngccaaaaatggaattaacaaaattgttgccttataattagttaactattttttataatatttattaaaataaaataagtgagactccaataataatttacaccaataataatattacaccttaaaagtgtagcatttctatgttttaaagcatttcatgtgagtgctcatacttctaaaagtactccaataataattactcttgaaatttgctctaatattcattattatttaatacatcatttattttaataccatttcatgccaagttttggtattgacttggcatcaatattaatttttagtttggcacccaacatgtcaaatggttagcttcttctaagtattttgccacatgtactttctccaagcaccactattagaaatgggaatgctttaaagaatgttggatgagatgaaaatattttggatattttttaataaatgcttatcagagaataaaaaaaaattgacattctttatatgatctctttcctatttcttattattattttttcataaaataagaaaatttaattatttaatatgtatattaaataataatatccgataaaataaaagattatatttttaagtaatttaaaaatttttaacactcttaaaaaataccaccaccattatcttcaccgatgtgaattcgccaacataagtgaagattggaagatttttccacataaaataggataaaaaattaagtgttacaaaagataaataataaagggttttgcagcaattaactaaagtttctatagtttgccagtgtttacaaacttaattcacaattagaactcctactaaaacacattattttacacttatctttggcataattttgaagtaaaagaagaacctaagtgtgtcaaagtttgcaagtcaaattgaaggaaaatcaagatcttattatcaaataaatgcccaataattacagaataaatttcagatataaataaggttgcagatctgttcatcatgcagccaaagcctcattcccggtcgcaacattttcatcgacaagtacttggtactgaagatcagcgtttccattctccaaagacggtaaaggatgagaatctctttcactagacaaacagaaaatgaagcttcagaagtaatggcaaaactccataaacaaacagctttctaatgataaaataacttttataggtgccaactgccaacatacatttgagtctcaacaatgaccaaaattagtagagctcaactcactacaagatgaatttgttacttatattttaatttccttcatcatctttatcatgcaaaagtttaagttactttttctagtcaatttttaatactcgattcgcttaaaaagtggaaactttagaatcatggctttaggaagataatatttcaatctgttatgtcaaaccaggtaaaacagttttacctgtctaaatacaagttttaattattgtatataaaattttcgaggaaggttagaacatacgttactgagtatatgatgagcccaataactacaattgcgaaagatagatagtataaccaatcaacctgcaaagtaagaaaaatataattttggttaggtttgacacaactggcaatgcagattataagctaataagattgatgatatgattggtacctgttgatgatagaaaaaaatgcgaaaaagaactgcccacatgtcagcggtgagaatagagagattaaacattgtagaaccacttaactgcatcagaggaaatggttagagcaagtatttctagttaatgactttattctaaggttcatatatttttagtggatatttattttggccaattttgattgcattaaaacatagtattttcaataaagaaacaatcaatctgtataataatcttagttctgagaattgatgagctactgcattggttaatcacagcaatttttattgcaatcaaccccaaaattctcataattatgtaaagctagtttcttttatattcttatgaaaaaacggaccttgagaacatatggagcgactgcgtagagaataaagccagaaagagtatagacaacaaaagctaatacctgaagacaaaatcaaataataaagaataggcgaaattaaggaaagtgtgttctgagaaatgaaaaacattttcactggttttaggcacaatcttaggaaatcattgtgcttcttatgtatgtttgctcaacaaataatgcagagatttcattatcaattctttagaagaagaaaaaaagtttgaaacttcagttacttacaatatccggtgaccagctgactgactccaaattctccagctctaccaaaggtctaatttgatgttaagtaataaaagcaataactaaggtcacatatattatcaacagtggtaatatattttgcaaatgctgccataaaaggatacattgcacaaataagtactagaaatccatagacacccatcatgccaactacttcaacgcaatctttcttcttcacacaaaattcctgcaatgcaagagcaaccaagtctagctcgaaaaaggaataacaaacttaatgctcgcaaaaacattataatgtttaggtaacgaattctttagagacattcacttggtaacaatacaacttacaagtgagtagcttcaggtgctaataaatgactaacctccccaacattgctaattgcaaagaaaagagtccccacgatgactagtgtgtcaccaagtagaggtttcgaaccacctacgatgatgaataagtgggaaaatgagataggtagtgctgtctgttcaaatatttgaatatttaatcttgtgttcttgcacactaaagagttactaaaaaggatctgttaatgcaatgaaggaagaactgattcgaatacttaaaacaacaaacttaggcagaatggaataatagctaaacagatcaaataacaacctccaccacccactcctgaatcagagaagagcacacaaacaagacccgctacacatatggctgcaccgaagagttgccataaggaatatcgagtgcctaggaagatccatgtaagcactatggcccatgctatagttccacaatccaataattgcacgttagtatttgatgtgagttggtaagctttgttaactgcaacaagtgaaaaacatgtgacagtcaaaaaaccaaacaaaatctagaaattaattgctatattttagagccatactcactatcataaaccagatcaagtcatttctacaaagataaatatttgtaatttgatagtaatgaatgaactctgaaccacttcactattgactcgtattacttcatcctattcaatgactactagcaaagtacaaatacttaaatacttaactagatttgatttgataaaaggtaccaactaagctcagaaatggccaaaagctaaactaagcattagtgagaaagtttaacatcaccactcactaagataagtcccttgggcatcagctaaccccaatagaagataccaataccaagaaacctgcataagcccacgaattattataacaacaatggaacatacccaacaaaacaaatgagttaatgatcaattaaaagcagaataggcatgattccatgagtcaattgcttgtatttttggagttaatggatcttaaaaataatgcttaaatgattcaaaggacatgtctatataataaaaataaataaaagggttatatatatctcatattttacatacatacctgtaacccctggcgcctatacagcaagatacttccataaaccaagcccaaactcaagtaaacaaaaatgctcaatgtaagaggcacatccacacctgcataaatcccattacaggaaaaagaaattggggaattggtgaacaaagaaacagatgacaaaatccaaaaatctgaaaagggttttcactaaataaagttacctaaactggcaatgaatgatgaagtgaagctcataagtgctaaagtgcaggagaccacctgacccaagaacaagaggtacaaggtgtttttagtttcatggttactccaccaactgctgttaaacacagaccagttcatacccaaactcttgtagatatcaccctctctaactccaaaaaagtgtcactattttatggatttgtggtcctaggagggagggagggagaaatgagaagagggtgttctttttcttattgtgctcattttcagtaatacttactttcactaaaagccactgggcttattttttaaactcaatcattattggaatacttcgttgtcacattttactttttctggctgcagtgtcacattattcttttttatttattcattcatttaatttttaaataggcaggatcacatcaagataacatgttatacaagatccgaatccacaaaaattctgtccagaaattctgcccatttctccaatgtagatctataatctataatgtggcaataatttggattttttattagagaaattttaatttttggccttaataatacaagtcatatcaaaatttataccctcccttaatttgtacaaatttagtccattaattaca

SEQ ID NO: 114471 - DNA, 2771 bp, Cannabis sativa
tgtcattcattcatgcggataagcgcatttggtacctgtttaatttgttgaccatttggaagccagggtaccattctatatccattttcaaattacccgatacccaatgatcattatctagagcataaggtataaatctgtattgcatcaccaaatatgtaaatatatttagcatgtctattactaacttggaagactcagcaattttgatgcttttttgtaaacttggatcattatgatatgttatgtccttgccacaactttctggtcctctgtagaaggagaatatcattaatatagataaaactatgattctcgcaacatatttttacataacaccaggtcgaacttttaactaagataattttgtgaataggttcaagaagtgatggatgaggtgggtaatcctggaattcctttgagtgtcatttccaaggctgctgaaatgcagcttctttatgctgttgataaggtactcctgggcaataggtggttacggaaagcaacaggcattcaaccgaagttcccttatatggtcgactcctttgaaaagaggtataatcttttttacaagtgttcattttaagacaatgctattgcttatgcctgtcatgcaattcctatgtcatagtgaaccatattttgtaaattttattgcagaacggctgcttcttttttgagagcctctgagtcgacggcatgcttaggaaactctgagacagaaaataattgtaaagaacttttgcatcctagtactacagagcttcaagttagaaatggcagttcttcagagcttcaagttaaagatgatagtttgtcagagcttcaagttgaacatgatggcgggacagagcttctagtcaatggtgatattcaaaacaagcaaggaaagagacctggttttcgtcttccttttagagattggtttaatcttcctttctcaaaacagaaccatcagaatgaggtatcatctaaagaacaaatgaagcaaaagatgcagccaaatccatttcttccaaagattacgatggtgggtatttcaacaggtgactcagcacagatgaacaaagcaaatttaaaaaagacaatggatgatctaacaaaagaactggagcatcaagatcaggaaaacaccaccggtagtaacacttcctggaatgacgaaatcacagccgaagatagagatccactctttgtggctaatgtgggcgattactattctggtgtggcaaagactggttcagctcgatgggttcgtggagcaaacaactaaagagccttactaacagcccatatcatttttgctcgagtgtgaatattcatttctcaatatagaaaatggaagaagaaaggtctgcaacatggatgcaggctgcttgttatattccttgatttattctctgatctttgttgtaaaaagatgttgaatattagagatatttattctctgatccttgttgtaatattagcaatgaaaaattctaagttttcccatgtagtttcagtgttctactgtcatttttttgacaccttagcttaccatgcattatttcttaacattaacaaaatgcaccaacatattatgaggtttagtttcttccaattgttgtgattttgcatcaagtacaactatagggactttgatataagatgatggagatgttcagtactacaattcctactaaccaagttaatttataatcattcaaagcaataaaatctaatgtacaatgaatgtaactagtgtcatatattaatggagatggttcccttggtgctgtgagtgagtggcctctctaataatctcctagtttctctctcaagaaaagaagctaaaagaaagaaaagagtagtggaatcttagttgcctctagataacaatctttgcttttgttttgataacactacaaagaaaaaaaaaggtactttcatgaccatcactaaacatgtcctcttgccaaacttaatgacactatcttgaccctcctcttctttaattttcttcctcatatatctagcaaaatcactaattaaaaacagaattgtttttcttcagaagatcccatgataatgacaatcatatatcatttcatcttatccaacttttaatcctccacaccaaatacctatgaacctaaagttcatccataaacatttgtacattcttttttttggggggtttgttcatttcaacatcaatctaatcttatccaactttgaagtaggccagaagagcataacctagtccaaacaataacccttttttttgggagcaaatggctcacatggagtcaaaatggagcactatttttctcttcgtacacaagtcactgaagtacattatcatacatcttagtgtaacatactaatagtatacaaacttaataagttgttttgtaagattaatttatgatttatgacttactaacatttttctctggttggttcggttgaaaattgacaaagcagaaaaaagaaagaaaaggaaattgtatttttactatctatgtttgaaatgatcaaaatcaactctgagccgaccaagaaaaaaaaaagttcaagattatcaatttggatttaagatatttatatatgtttgtaagtcatgcatataaatatttatttcctaaattttggacatttcctatgattctatgagatcatttgattagttagtggtggtcccgtgattacatttgaaacataaatatttgctaaattttctacttcattcccctttatattatcacactaagggctcgtttggaacg

SEQ ID NO: 114472 - DNA, 2345 bp, Cannabis sativa
  modified_base (46)..(48): a, c, t, g, unknown or other
  modified_base (166)..(173): a, c, t, g, unknown or other
aaaatgcttgggccggccctggtctttagatacaagttgtcactannntagttttagtcacaacaagtattgtgactaaaaatacatttagtcccaacaaattatactttttgtcactgaccttttagtcacaacatagaaataataatttgtaattagtcacaannnnnnnnacttttagtcacaaattttattgcaactaaaagtaagattttttataatgaattaaaattacttatttatctttactaaataatttatattaaattgtaattgtactttttttttccttcctcctttcttaccaaacagcttaagagaagcttattttttttcctctattttctatccttcgttatttttctttccattcaaccaaacatagcgtaaatgttctaactttttcatttcatttgatgagattgataatagaataagatttgtagggtcatctcggaaataccagccaaaacagtgagtaggggacctttttacacgtgtcaaaattctacactaaatacgtggtcccaactccctatatatgtacacacacattataaacaaaacagtgtcttcaatttcgattgagaacttgttctttgttcttgttttattttggtttttatttcttttctcgttcacaaaataaataataataataataataaaaacactaatccattgtattcgatggctgaagaagataacataagggttagtaactcttcttcataccctccaccgtttcgccaacaacaaacagaggatggtgactcggccgagtcggagcaactcaactcagaagtagttgactgggagtataattcagtacctgtccttgactatgacaaggatattaattattatggtactgatgatgatgatagtggttttgttgttgatgagatttgtagagattggggtctatttcgtttggtcaaccatggggttcctcctactcttttgagccaacttcatgaccaagccaaacagatattttctctcccttttgaaaccaaacaggatataatgactacccctttgtcttatttctggggtactcctgttctatccccatctggggtagctttatccatgaaaggttctcatcaaaatagtagttgggttgaaggtatcaatatccctctctcccaactctctaaaattccacctcaagatcatcaccctacccttaattctttcaggtaattatcaactaaccttatacttatcaaattatctccattatttatgtactaattaaataattttttatttttttaactgtctttaattgttaattattataattattttactgaagcttatataaattattattggcgacaatgccgaaggaacataaaaattgtcggcatgtgaatctcacttttgtttaataattaatgggtataatattgtaatctcataaaataataatatctggatataataaaagaaaaaaaaaacgtcttgtagtaaaataagaatatttatatcatgtcacaaatatttcattcaatgtatatttttttttttttggaaaaaaaagggaatattaatattaatattaaaaagattaatcctgaaaaccaatatcaaaattaacacacgtggtggtgtagtggtttggattgttttgcatatagggtccctctttttattagtgttggaatccgtaggatgagactttaattcgggccttaaaaatgggacttgtttgggagcaacaggtgacagtgtacccaagttaccggctatggttccctgcatgggaggaatcttagctgacaactattttagagactgtatataagttccaaaattgttttttaattataacataattttttgtaattaaatgtgattttataattttttgcaattaaatgaaacttttggtcacaataaaatattatttaactaaaatatagtatttagatttaagttattattaatttaattttacatacaataagtactatgatttaaaataaatttagtcacaacaaaataaattaatttttgtgatcattacttttaattacagatttttttttcataacatatgaataatgatttataattagttacaatttttttacttatttttttttttttctgtaataataagatgtacaccacatgatctttttctcaagtagtattgagattatttgtatatttggtgtattgtaaaaattacattttgagtcttatattttattaaatgattaattaattttgggataattatataaagtattattttaaaaaaaatatatatttttatgtttaaaaaaaaaattatacatttttacgattttttatagaaacaatacgaa

SEQ ID NO: 114473 - DNA, 1737 bp, Cannabis sativa
  modified_base (29)..(32): a, c, t, g, unknown or other
  modified_base (59)..(67): a, c, t, g, unknown or other
aatggcttaaaaaaaatgtaaccatgatnnnnacaataaaaatgtaaccattgaaaccnnnnnnnnntatatatatatattttttgttttgttttaacatgttgatattattggtgtagagaatcttgttaatttgatcttcactaaaaaatattcatattcatttgtaagattaattataaatcatagagtttaattttattttttaaggatcatagtgtttaatttgagagtgtattaatcattactctaatttattacgaaaatatacaaatatttatcacatagatattgtaatgaaagtatatataatctatcttagtagattcttgaatagaaaaaaaaaaatcaaataattaagtcactactcaattattatcctttaaagataaaacttttaaaataataaacatataatttttgttaattgatatcctatgttaaatttgtactaattattctaattaactcacaatactcttatgatacgtttactaaactttgattgaaatagaataattaattgaagaaatcaatcgagttaaaatataaaataatcggaaataatattttattttgttgtttactaaactgaccggaaaagaaatcagaatcattttattttgtttacataatgaggataggtaatcgaaaagagttaatttgattaaattgccattgttagaacatgtaattattttttatttatatatttttgaagggcatatttgtctttttttatttttaattaataaaaatataattaatataaagtaaattaaggaaaggaaaatgtattccttatgaaaatgggagagaacctttccctttattttctccttaatttgtgtgggtctactaatttctccaatttcaaaatttagtaaacaaatgaatgagaatcaatcccatacaattaattcctattcccctatagatataagggcaattgtaatggtacaacttagatttaatgttaaatcaataccaaaaaaatactattttaatactattttttttaacaattaccatcacaatactataaattatactaaaaaatatattttttattattttaatatgtaaatataaataatacacataccaattaagaaaatttaattattatttaaatattagaaaaaaaaacaaaacaattttagtgtgatttacaagatactatatgtaataatttttagtgttcggttggataaattttaataaaaaacaatattaaatttaaaattttaaattaattacacaatattatatatcttctttaatatatatgaaaaaaatatatctatacattaccttatataaagaattaatttaatttatttgctatatataaaatagaaaagaatggtggtaagatttcgtaaaagaagggattaatgttggttgaaaactctttatccaaactctctttattattaaagaaaataataataatagatattttttttaaaaaaaaaatttaagtttgggtttagattaattgtggttgggtgaatggtaacgacacataccaacttccattcaaacctgccacgtggcattattcatgcacctcattggaccccactcactccctcctatctccccaatcatatttcatcaatttatctatttacaaaattaagatatatctattctatataaagtctgcctatataactgaaattcttggtttatgagaaattaatgggtaattttttatttttatttaataaa

SEQ ID NO: 114474 - DNA, 3545 bp, Cannabis sativa
tagcattttattaaaaaatactctacgctcactatttattaaaaaaaattatatgaatataatatgtgttattttctattccattttattctctcataattttttttttgtcaaaatagtagtctcaattattgcagccaatgtgtatattttatatttgaattttaagagtgaccactaatgacaccttattatattttcaatttttttttctttctttctagtagctatattttcaaaattctattaatttaaatatggttttttttttgtcttctttctagaagtatcatattatgacttgtaattctaaaaatcccttaatctagtgggcttgtattgtagtttttaaaatatgtgtactccactcacttattaatgttttcaacttttactcttcttaactgcccaattcaatgccttacattattactttcaaaacccaaaatatatactcaatagtttacataatccaaactatgaagacaaacactatgctttcatttattaatcatagtgggactggcactagtttgaaagttcaagattgaaactttgacttattttcattcactttgagcatgtaattcaatgaaagcgaatgatacttattccacacatatataggaggtatcgaatgatacttatttcacatatgtctaaacttaaatagattatttttcagtatataatgaactatatgtacattataatttaatttgtttattattatatataactaaaattacttaatattagaaactgtgtgagtgtattttcaatttttagtttttaaaattgtatttttttaaaattgagaatagaaaatagtttttgttattcaaaaaatttaatggtgtttgacacaaattttttaaaattatttttagattttttcttactaaaaaaattaatattttaacacgataccatgacattaacccatccgaattcgggttcgagtatagtttacttctaggaaaagcaatctgaatgaaagttctatatctctctttcagctttttaaaacatcttgaatcgtccaattctgagctatattgagagagttataatcaaaataccatcagacatcgcaacaaaattttagaattgcaaccattttagaaatttttcttagaatgccgcgacattcaaggatatgccgcgacactcactgttcagcgaaaaaatgggaaactttcctatttttggtctataaaagattttggagctaggttttcatataattcgaacttagagaccaattttgagcatatgaagataactaggattagaagacaccattagaggactccaaacagtgttttttctcatctatctttatattttatgttttaattgaatctttgttgttttagaatgactttcatgagttaattttctttaaggattattatgtgaactacttaaatttattttatggattaatgtagttattcaatttcatcttttttttttcttatttcaattccatgaaatctgatttaattttgcaattattgactgatcacctataattgttaactataaattcgaataaaaaattttgaaaagtgagattttaatatacattgattgttatgaatgtaaattgatttaagacgaagtatctagattatttgtataattttatgagttgctttatttaatgctttctttgtgataaactttatcatagggatagagagagcttttacatagattggatcttaataagattatgaactacttaattcaatttgtcaattgaataggaagaagataaattgtgcaattgctttaagaagtaaaataaaaaatagttgggatcataataatccttgtttttctcattattatttctctaggttttaattatttattttgttttatttacttatctccaatatttttattaatcaaatagaaataaagaattaattaattggtaattgataatcaatactcgtgggaacgatactctactttatcattatattacttgattcgattacgtatacttgcgtattgaatttacctaacagttagggaggggcaatgatgctggcggtggtggcttaagatcacatagggaaagtgctttgggctagcacaaaagcgactaccttttgctaatgctcttagtggagaagtcgcatcttgtctgttggtattgaaatttgcttatttctaatatttttattaatcaaataaaaataaaaaaattaattaattggtaattgataatcaatcctcatgaaaacgatactctactttatcattatattacttgatttgattgtgtatacttacgtactgaatttagcgaacagttagggaggggacaatgatgctagcggtggtggcttaagatcacgtagggaaggtgctttgggctagcacaaagcgactaccttttgctaatgttcttagtggggaaatcacatcttgtttgttggcattggaatttgcttatctctaatatttttattaatcaaatagaaataaagaattaattaattggtaattgataatcatcctcgtgaaaacgatactctactttatcattatattacttgattcgattgtgtatacttgcgtattaaatttagcgaacagttaaggagggacaatgatcttggcggtggcggcttaagatcacgtagggaaggtgctttgggctagcacaaagcgactaccttatgctaatgctcggggaagtcgcatcttatctgctggcattggactttgctacagagaaagggtgcaattattattatggaatgtaattttgacatatttattaaagttgttaaggggttaaatccaagatggaaaattaagtactgtgtaactcattgtaggagctttattttttgggatgtaacttttcaaaagtttctagacattttaattttattgctcacaaattagctaagtgagcgtttaatcaaactataattggtataattgaagcttcttcaatcccatataacatttttgtaatagccttatgacctaatttatctcatctatgttatttacacattttttcaaaaaacaaaaagaatttcaacttatatttttacgggcatatttgcagtgaaacttctttattatttgtaacggttacatatatgatctaaataaaaaaaaaaatagtagtaaaagtatcttattttacgattttgttgcaaccgtatctttttttggttgttaagtttcaattaaacccgttaagtgctaactcaaaaatatgtggggatatatttttttagtttatttaatacatagtctaataatatgtcgctatgtgtttctaagttgacatttaatgataaaaaaaaatatacgattgcaaaaaaatcataagatacttttactgttacatattttatttaagatttaacaattataaatattaaaacagtttcgtcacaaatatacctcttttaagtaaacaagtgcaatgaataataaaataaaaataaaatgcgagtaaattacactttatactctttttatattgtctttttttattttta

SEQ ID NO: 114475 - DNA, 4162 bp, Cannabis sativa
tgttatggcatacattagaactatccttcggcatctcatgagtaaacttgtgtaacaatttaactaaaagttttatgtttcaggatgcatatctgcggatgaaagtgggaatcgtctgttcatttctgacagcaatcatcatcggattatcatatttaatagcaatgggaagattctggactgtgtatgtatgaaaatcttttgcattcaagctaaagtgcaatgtggtttgtgcgcttgttttagcatatcaagttactttacaactccctatacaactacttgtctaaaacagctaaaccagttcaaatttgaggttttctaattttcattctaaccaaagacatttgaagtatgtatatcagctatgtataataatctgcatgatcttgtttgtatttatgaatttgtgattcgttaaaaacaagttgtgttacctggtttttctatgtttttctttctgttaattactacaaaattgcttgaaacatagtcttagatatgcgcttgcattgtttattcgtcagattggttcttctccaggctttgaggatggtgaatttgaatctgctaaactgatgcgcccagctgcttcattttatcatgatgctgaggattgcttgtatcttgttgattcagaggtattttgttaacttctatcactgttctagcctcagtctataacaaacatactttacaaatttctcacttaccaatttgctttgctgaaatttggatcaactaagaatcatgccatcaggagagcagatttgagcaaacggattctagaaactttttctccagcaagcaacattagtaagagtaatcaattttggaactgggtcagggagttgggtttgggaagtgttgcagagcccgaagcacatgctgctgaatcacttttgttcccttggcatatgctatattcagatgacgataatttgttagttataaaccgaaggtaaagaagttataactttttattattttttttttaaaaaggaaacttcttattcaaacagcaatagggaaaatgagtgttgtcattaagccagtaaagtccttgtacaatttttaaagaaaatcacaaatattttaaagttcttagggatgaaaatgaagcactgtgttggttttagaaatctcagactattatattgctttctagtgacaaagtaagttgaaaatattcctcattgaagtatcttgtgaagtggcatgtgcgactttaatggttaccagttttgcatgttacgactaatttgatttatttggtaattttttcagttttgaaactttatggacgataaatatggccacaggagagatagaggatgttgtcaaaggtttgaaaatggtttgctacttttttttatcattattattaatatcattatgtgaaatgatgtctaatgttaaactcttatcgtataaaggtttttcgaatattttggagatatgtagagagcaaatattggagaaagtatccctcttgaaacaaattccacctaattgtttgcagcagctagcaaatgctacctgtgcatcatatgagcatccacatattggtctcatatcttcattaaccacctttcaagatcagataatcatgtctgacacaggtactgaattttaggggattagtttatttaagatattttatttctttcagaatcagatagtcatatgattttggagtttattatttttctcatgtactatgtttttgaagttggacagagagttatgaaactaagtaaagattctcaagttgcttccaactttcaattttcaaatttcgggactcttggattgccatattggttgtcaccccgtctagaaagagcgaatctgatgtatgttagctggtctttcattccattcttgactctttatctcaacatttgtacatactgtgtagctttaaactgcttccaagaattatagatataatgtcaatttttttccacggctaatgttaccagtcctggatttgtttcactctctgcgtcagtaattatctccacaactttaatgccttttcagttctggtggacttcagggaacagagattgaccatctccagtgtttcaatttgctgccaggtatttccctattacagttttttttttctattttaattattacagttagatgaattagatttttgcattccttagctgtcagcagatcagatctcacacttttccccaagagaaatggttaggcatgtggattttgctccatcaagttgtagtttcgagtcccttagttgctataattgtctagtccttaaattttgtatggttaggcagggattccagtttcagaaaagatctcacctttttgtacaatatgccatatggtggtgattctccctttacttctgctgatatcaagtattctaaagttaaaccaaaacatttgtctgtggcaggtaaagtcgagatacaactaaacgtaaacatccctgtggatactgaacttgtagaaccgttacaagaaggttgtatatggcgtcaggcaagaggagttgctactatagtatcagaagtagaagatgtggcaggatcgtcagaaaaggttcttaccttgcattgtgtgtgttgtgtgatctgagagagagagagagagaaagagatacagagtgattataactgtgactgcatttggagttggggtagttgtgttccccacaagtttttctgctatttttcttttgaaagcttatgcagtcattcattcatgcaggttggctctgcccaaaaatggtatgatgagctcgacactcttgtctttactagtcccgagtcagaatcagttgatgaagatgaagatacaacttcagtcataaaatttgatgatgataaagttcacattattactgctgtcaatacaagtcccggaacaagtgaggtatgcagtttttactttacctctctgcggttttattttacgtctttgttgcttgtttttgtaacatttttatagttttcttttactaatttccgctgtcataatgcaggttattataaccgcagttttatacttgagactacgaagaagtcccgaccaaccaaacgataatcaagagaaatacgctgcgaggatagtggatttatcgaactcaaggagaagcggaaagatggaaagagatggatgcattcagttcttgttgaaatcaaatagggacttgagagatctcattttcatgaaacctctacacgttagagtaaaatttgacagctttgatcacccgaaagctgataattcaagagatatcatctcaacagaatcgtccattgaggtcaatgtatctctcaattcatgatagttgttacagttgagcaaaactgcttattctttgtgatattcccatatagtttaatactgtatcaatcattggtggtggtagtgagtcactagattagttattttttttctctttttccaattcatatattatacaggactgaaaattgccaagagtgtaatttcagtataaggattcaaaaaagtcatatttatttgtcaagaagttatctataataaaaaaaggattattttctgggtctgtattttgttggcatctaaaaacaggaaagcaaaacaaaacaatgtcatatggtttattttatgctcttattcacattcatacaatttgtcatttaccattgaaagggtatctgtcacttaatcagttagcttttttatttctctcttttccattaaaagtgaaagtttcattagtggggttgcaccataagatatgatgatatcaagtccttgagtcacggggctaatatttagttacatatattgtcaaattaatagacaactcacttacttttcttgccctttttatttacctttaatttcaatgaaatttaatctcactcaccccaccatgacaaagttactgacactctgacataataatgaactccaacaactactgcttttggccgttgtaaagaaaccctacccttcaattaccaaaaacttaagcaaagagaactactgacaagaacttatggaaaaatctgtaaaagaaatttttcggtgtacttttttatttgtttttggcatttgataaagttttggctaatcatcaattttccccccgaattttgatatataccaaatcatgttccctgaactt

SEQ ID NO: 114476 - DNA, 1169 bp, Cannabis sativa
  modified_base (1139)..(1144): a, c, t, g, unknown or other
aaaaaaaaagagagagagagaaagcaagtataaatgttaaatattggtaaaaaaaagtcacttggtgtaaaaatcctaaaaaaattgtagaagtttgaaaaggcttaaaatggagatattttaatatatatttttaaaaaattatcgcttatttattattttattcataaaataatactttctaaagcatatccatttttaaaatttgtttattttattattttaatattattaaattaaaagattagagaatgatatagaatatcatgattagttataccaaatcatttaaattattagacatttaatttaatttaataaaataatcctaataatacctaggaattttaattatagttcaattttaaaattttgaaaaagatgttttaagtttttttaacaactttaatttttcaaaatttatagtctattattaaatgataattttaataatataattataaaatatctcaattcaaaattgttacatattcttttgtttaataatttttttttaataaacttattatttaattaatttaaatgactatgattaacttgttaatggatctaataatccaaattaatcatagttaattgttaataaatcaatgttttcacatttctttcatttgtgtcataaacctggtaacatgatatggctcatccaaattgatgtttacatgagcctatatgcttgctactatattgggcttagatgcatataggagcccatttaactttagatatttaaatggactagattgctaaaaataaaataagtagaaattacatgaaatatgggatttttttattgttttttttatggcataataaattaatacctttggtgtatggattttgtgttttgtttatttttctgtaagttttttgtatgccatacttttgtaaataaaaattattttaccatattttaatgttttttcgctttgtttatttttattttaaaatatattgaaataagtctcaaaaagctactacagattctgttttgcatgaagctagtgacttgaccaaagtagtttattcttatttgaaatgcacttttattttatattagtgcaagtgggagtttgttttgggttttgtgccgaaaataaaactcatttcaatataannnnnnttactaattaataaaagatcagaaa

SEQ ID NO: 114477 - DNA, 2859 bp, Cannabis sativa
caatccaatccaatccacacaaatgcggatatccacactttgcggattggatcgtgcggagtggattggatcggctattttatgaacactcctgcgcaagttttatatgtacgtgaacctaattagaccatatatattatcatgacaattaaatttatacagcctcttaaaacaaataatatagtaatatacaataaacgtattttagcccttaacgaaatgatatttagattcaacataattttctgcatcccacaggaatgatccaaacgcaacagcctccaacacaagcattgtcagcccagaaaaggtaattgaaaccacttcatcattagatgtatctattgaaccgtcttctgcaattttaatgtcaggcctaccgaacagagcctgagtttgcttctcaatcagtgaaatagcttccttggatcttatagtagcatatctctgaagtgtatctgcatctaagtacatcacataggatcgaagtctgtatgacctaccttccccgtcgctgtcaaaatcattgtcatcaggtggtactctgatcaacgattcaggatcccataaccggtttgctggtgataggtcttccatgctatcttgttctttaatgaaacgctcgggaagagttttcatggttctctcaagctgaaacctttcatcaactctcttgagaaaatatccatacatgattgaagcagcatacagttttccaagttttattttgctaatctgaacaatagattcaaggggccctacaacccgctccccaagcacaagggataagtgactctggatcatctcaaatgcttcgggagaatgaatacattctagtttctgctcttgatttggccaaaaatccacgcggccagtgggatctgaagtctctgatatctttggtatcattgtaatgtcattctccacaaatttacaagcaattaagcagtataatatctcttcgagggtgttgcgcctttctttgtctttaacttcagcaattctcctacatttacgacatgattcaatatatgttggtccaaattacaagaaatcaaaaagtgtataaagtaatagagggagaaaaatgatatgaaagtaaagtaacacactaaaccaaaaagaaatagcgaatgttaagagttgtgaaaattttcaagttgtttaaggcaagcacttagaacatagaaaatagccatgcgaaatgaataactctcataacagaaaaaagggttgtattttgatggcaacaaccttgggcttataacaaaaagtaaaagcaatacatagattaattagcagagagaaaacattggcagggacttgatttttcttccgttcaatgtatccactcagtgtttaaagtgatgatattgctgcacttacaacttgaaatatttgtaaaaatcatctagaattcacaaagagcaaatgatatctcacttatttaatacttcgagcatgcataaatttgaaattcaacacttacatatccacgcccaaacctgtgtgatgtattgaagaattagctttcaattacctcaaagtactgcagaatttaattgttcttgtttttaataactagtgcaaaattattggcttcacaaggttagatgtatcttaaaaaaaatgcaccatcagaaatagatgcacatttatgttgtaacagttaaatatgaaagagagtacttcaaacatagatcctggcctctacacatcaaaatttgatttgtaagtaagctagtttttgtctcaaaacatgacaccgttctcttccacaaaccatgtgcacacatttaacctaataagtgtatgcatcaaaacatcaagaagacagtaccgaatcagttaacatctaaagataatttcatccaggaactgtgctttccgtcacttgcttaataaagaaggtttcttcagaaacaggctgcttgtgaatacagttttagagttgaaactagaagctaactcaacaaggatatacattttggtgtggaaaaaggttaaagacaatataggcttaaacaaaagcccagtcactagagttgaatcctgacaaggtacccagtaaatagacactagtttcttcagaacacaaagcatcctaaaccaaatatctattgcttatgctttttctgtagtgggaacactagttctctgtatcattgtaattcaattacaggacaattgagataagcctacaaattaaaaccatgccaaagtattcatgtagtttgacatctataagataagttgaaaagcactagtctcacaaatattctatgagcactggaagtcgaagatcatacatccccagccatacaaatatataaaataagatttgggtgacatttaatttgtcatttttgagtcatcctacataacaggtataataagtataataaacagataactttcaatcatacccaagaatatatcgctataaatatatggagacccaatcttatttccccaactctcttatttgtcatatagtaacaaagacttaaaacatataattttatacggtattacatacgtttacgtatttttttaatatgcaaaattatataattattttagaaaatgacataaccaccaatattaatattttttgataagcataacataatattaatatatatataatagttacataaaaaaatatatgacttgttataacatattactacagataaaaattctatttaaaacttaaattaactataattaattatatccttacaaaaaatattattttttaatcgaaatatttaaaaaaaaaaaattaattttattttttttgaaaaagagaaagaggcctttgtctaagactgacccctcccccgttatatatag

SEQ ID NO: 114478 - DNA, 820 bp, Cannabis sativa
  modified_base (783)..(790): a, c, t, g, unknown or other
ctggatgatcaaaccaccaataacatattcgattggttcgtgtgactgcagtttcatgaacactactgctttttatatacgcatatggagtatataattattataatcttatgctaaataaaatatttattattttttgtatcaaagccggcaaatttatattttgcaatgttgttacatgtaattaagcagaatttatacatacattccaaacattttaattaatagcgtatgaaatggtgagctgttgagaataaatagatatataattgaaaatttagttttaacgagtggcataatgaaagtcataagtggttaatttatgtaataaaaaaatagtgacatgtttctgattttcaaccattatcataactagacatttagttaattacgtgactaaggtggcgaatggaatttagataatactatatgtaagatttgctatttgcatttcgaaaatctattattaattatatatattttttatacagccaagcaagccaaagcaaaaaatacatttccttatttcgtgttcaccttgtatatgaaataagtgaatatcgaaaactatgtttttgttttgagtgatttcctcttcccaaaataaaataaaatagaaatatatggccagaatatgcactaagtgcaccacacgtattcccaaatgacaaattagaattcttagattaattaaaaatatacatcataatacatcaatgtttaatcggataagttttgtagcgtaagatctaacaccttcgattctctctctctctctctctnnnnnnnnctctctctctctctctattattattattat

SEQ ID NO: 114479 - DNA, 2957 bp, Cannabis sativa
aggactcagaccccgaactgaatcgacacccaaactaggacagagaattgaaactggtaccaaaccagggttaggactaggacccatacctgggaccaaagctgaacccaaacctggactagaaccaagaccaggtgctagaactcgagaatcggactgggacccaaacacagacccaaacctgcaccgagacctggacttgaacttggactgaaacccgaacttagacatggatccagactgggatctatgaccctaagttggattggtaaccaacacaaagacctagaccccataaacagaactaggaccgagactcgagacttgaccctagacccagacccgaacttaggacccagatgcggacccagacaagaatccaaacccagacccggacctagacccagacttagatcaggactcagaccccaacccaaacccgaacccaaaataagaaccaaaactagaaccaaacatggaccaggaccaggacccaaacctaggacacgaactggacccaaactcaaaaccaaacccaaaccagaactcagacctggacctagacaggaacttggaacccgggacctagacccgaacccagagctagactcgggacttaggacatggacttagacctgaatccagaccgggaactagactaagagcaagaccttaacctgtacccaaaccaggaactagaccgggacctaggaaatggacctagatcggggatcgggactaggacccagtacacaaccctagacctagacccacacctaggaccccagactggtgcttgcgacccgaacaagaaccagactgggacccgagactaggatctagatttggacccaaggcatgtaccgacccgttgttggtgtatggatttcagaactggacctggactcaaacccagacccaaaactggacatcaattcttaaccgatgacctgatatcagaaccaaaaccgaaagtggtaccctaaaccctaaaccctttacgcttacccctaaaccctaaatccctaaactctaacccaaaatcctaaaccctaaacccttaaaaaccccttaaaccccaaatcctaaacccttaaaccctaaccctaacccaaacacgaacccaaactagaccaagggatcggaacccaggacccggacccaaacctaaacccgacccccgacctaggacctgaaccttgatctagactcagacctagacagggatctggacctagacccagagtcgcacttgcactaggactcgaaccctgatatagactccaattcgaacctagacacaaaatcaaaaacaaaacgagaatcgaaacaagatcgagactaaaaaccagagtaggacatgaactggacccaaacctgaacccaaacccaaaccagaacccagactgagacttggaccgaaaccgggactggactcagatcgcgacccgagatccagaacttggacctagattcgaaccttgatcaggacctagaaagaaatttggactcgaacctgaacccggacgtggacccaaaccgagacctagcacccagacatggattgggaattgggatccaaacacaagctctagaactgcgggacctgggaaccgaacaggaatcagatttgacctgagatcgagatccagatctagacctagggcttaaacccgacccgtagttggtgttatgatttgggacctagacttggacctgcacttaggacccagattaggacccaggacccgaattggaaccagattgggcctcgagactaggatccaaatttgcactcagggcatggacccaacccatggttggtgtacggattttggacctagactcaaactgaaacccgatcccaaacccaaacctggaccaaaatttgtaacccattacctaatataagaaccaataccggaagttttaccttaaaccctaaaccctaagccataaaccctaaaccgtttacacttacccctaaaccttaatccctaaaccccgaatccctaaactctaaaaccaaaatcctaaacctaaaccctaaaaagaccctaaacccaaaatcctaatctgctaaaccctaaccgtaaccctaacccgaacataaacccaaacctagacccatatagggatcggaacctaggacctagacccaaacccaaactcgaaccctgacctaggacttgaagtcggatctggactaggatgtagaccgggatccgaacctagacccagacccgcagtcgggctaggactaaaaccttgacctagacttgaacttagcccagacccaaaatcaaaaacaaaactggaactgaaccatgactggactaaaaccaagatctaggacatgaacttgaccgaaacccgaacccaaacaagaaccaagactaagacctagacaaaaactgggacctagactaagactgcaacccaagacctgggacttggacctagactcgaacattatcaggacctggacccaaacaagaccccaaactcagacccagagtgagacctagactcagaccgggaccaaaaccgtaatcttgacatggactcaaactaaaacctaggacccaaactttgtttgggaaccgagatcgggatccaggactagaagtagaacgaactggacagggaaccaagaccaggatccagatctggaccgaaggcttggacacaaactgtagttggtgtcttaatctaggacccaaacccagacccgagtctgcacgcgaacttacaccgggacttggacgaagaccccgacccagacccatactaggacccaaacccgtacccttgaccccaagttaaaacccaaaccaaaagcaaaccggcataagagaataggatcgagaccaagacccagacccaaaattagaaccagaccaggacaaaaactcagactcgaacccagacccagacatggaaccgaacctagacca

SEQ ID NO: 114480 - DNA, 1703 bp, Cannabis sativa
agtcaacttctttggacctcatttaatttcatcgacaagtctcttcactaccattaaatgcttgatattatattttgtaaaagttatcaaatgtttttgttttattaaatgataaaataaattttatattttttaaaataataaaaattgaactttgaagacaattttgataattttaatttttgatataactaattttaagataatttttaatacgaacagatacaaaaaatataattaattttattataacatttttagatcacattaatattattaagttttattttgataacaaatcacttcagaattctatttataccatttttaaaaataaaaaatctattttatcatttaacaaaatagggtctagaatattatttatcctttaattaaaaatattattattaagttattgagaaaaaaaaatgaaaattgttaaactattaaaactgttttctattttttaaagctgaaaacatttttaaaaactaatagaaattgtttggcaaatttttttaaaaacagttttttaaaatttgtgttttaaaaaactagaaaacagaaaacatcaaaattttatttttatttttcaaaaataattttttttgtctaacatattatattttacatttttactcacatactcgaatcttagacccagaattaaacccgaatgcgaactcgaatgggttcatatcatgatatggtgttatagtattatttgtttagtaagaaataatctaaaaacagttttaaaaaatttgtgaaaaatatcattaaattttaaaaataacaaaaaactgttttctatttttactttggaaaatacaattttaaaaactaaaaattgataacacaaccaaataaactcttatcttatcaaagtattattttacaaataataaataatcttttatggtaattattaaattaaaatatataaaatttaatatttaattatataatcattgtacgtgtaacctcgtaataagaacacaatatttaataaatatgtcactataataaaataatttctcaaactaattagaattccattcccattgttgttatgaaaactctctacttcacactctttatctatacattaacattaaaaaagacatctagaagtatattttcgacttttatatggttgaaaaaagaaaacatcagtacagctggtttcttttcccatatgttgtcttatttaattgtcaatcataatttaagagatagagtaaaaagaaaagagaaattgcttctagtacattactctttgttaattagatctatagtcttttatttttaattatttttaaagggacaataattaatttttgaaaatgggtgttaatagctttcttgctagtttgcttctattacctaatttcacttagttatcttctccattttctttttttttttctttccttgtttatgtaaaagagatgtgaccatttttttcttttgttgaaacgggcacaacctatttcaatagaaaagaatcatttgcttcatttttccctttttcttgtcaaccgtgaaatttctccaacattgaagaacatatataaatttatacgggtattgttattagggaattttacaaaaatactgtttttggaccaaaactttacaaatatactgggacacggcaaaaacaacatttttactgccccagcccaatttctttacttttg

SEQ ID NO: 114481 - DNA, 1879 bp, Cannabis sativa
atattaatatttatacatttattataatttgtaataaaatcattaattctacataaataaatttataaaatatatgtatattttattgaaatgtaattatttttatatagaagtattgagatttagaaaacgtacaactaattacaatttaaaaattgtttttatttatagttggacttaatatatatattttttttataataaattagtggttaattttaaataaaatattctttgataaaaattttaggagaatttacagatgaaaagaaagggtaaaatcaaaaagcaaaaaagaagatgcacacgcttccagaaatccagtgacccaaaacatttatttatatatgcatgtcagaaagtaaactgaagccaagtagaaagtgatttttaacttccaagtattattctatttttctttgcaataaaagaaaaaggtattattctactttcattggagcagctcctttcgtgtttgttttattagagagagtcaaaagtgtgcacaaaagccagaatttgatatttggttcccattttttttaaaaaaatagttcacaatttacacatctagttaaaaaggttgtggtgctataatttaagttgagcagataaactaatatatgtcttggaaatgaaagcaatacataattttcagaaaaatgctaaaagggattagtggtgctaaacattattctacgtgtcaatatcgttattggtgtaatttagtattgagtcccatagggagatcgttagccaatcctaaggcaacacgtcttaaggattaggcaccactggtacccaatagatcataattttcaagtgtgggttgtatctaactatctatctcttgactattttgtaaaagtattgctaaaagacctaatttgataattattattatataaaaaaaattacttgaaaaagttacttgcttgaagtgttagaaaatattagtaggtgaaaatgagtcaatttaaaaattattgactgtttccgaacaaaatattaattcactaacataacattaatgtttcaataaaacaagttcaacttcacatctaagatgatctttaattaatgaaatattataaaagtaatgggctgttatattttaacatatcttaaacaaattaattaaggtctaataatgctgtaaaaagtatgtcaaagttaattattcactcaataatttttatgttaatttgcatctaatttattagagcacaaagctaaaaattaggtcaaatataatattaacttaaataaggagtgaatgatgttacttttcttaatttttagaattatactccaacatgtaagttatttttttcccaaagagatgcaaattaactcaaaaagtctttgatttatattgaaaatgtataaaatagtttttttttcttcaaatgaatgaataaaaagttttgaatcaattaaaggagtaaattgtaactaatatacctcagagttaataatgctttttttttttttttttttcaaacaaagcgtgaaacatagttaataatgctagacacactcaaattgtacacaattattatacataatattgtaacatttacacattttttgggggtaaatataattaacattttcaaaatattacacttttgtacctattttttcttttttttttttttttaaaaatatgtctgtacatttagtcactggaaccagctagttttttttaacaactaacatctaatataaagaaaagctatgaatagttaattatatgcctctcaactttagtcaaataagatgggaaatttgattttctatactttcatatacttaatattttatttctaaactaatacatatcatcattgaaaatatatgaccactttatctaaaa

SEQ ID NO: 114482 - DNA, 1914 bp, Cannabis sativa
tttttttttttttttttttatcatgaaagtaattagtattatttttagttctatatatacagatcatctatacacattatggttaagggtttttctatttaataagaacctcttatacttgattaaataacactagcagatcataaaataatatatctattggtaagatgttatcttcatgataatattctacgtcattaataattaataacaatattaattataaataattacaaatcccactacaaaaaaaattacttttagtaataattttttagttataatataattttttttaactaaatgagacttttagttacaaaactaacaaaaatagtatttaaataaaaattatcactaatttagttttagtcacaactattgtaattaaaaatatatttagtcgcaacaaattataatttttatgattaatacatttattacgaattttttagtccaaacataaaataatgatttataattattagtcacaacttttttatttttaattataagttttattatgagaataagtaagatttgttgtgtgtacttttaataatattaatattattaatttaagatatttttctaatgacaaaaaggcaaggccagagtagctagctttaattttgctttggcttcttttttactttaattatacctttgtttttgaatgaattagtatatgtgtaatgtaatgtctcaccaaagctagacactgctttgagaggttttgaccatttttttcttttatttaaaaaaaatatataaaattggtttaatttaattaccaacaacacggttatacgtacctaattattaaaaaatggtcactactttgcataattattatttaatataacaccttccaattgtgtgtagaatgataagggtgtactatagtaccatatataattcaatttcaaaagattattttgggtactactcattcatctttttctctcttttctgtaatttaacactttgaattaaacctttttagttttcaatatacatatagccagaataacagagaagaaactaaaaacacatcaaattaattaaaagttttttttttctacaaaatcttaattattaactctaatcgtgatgacatcaaccaatataaattttcaaattagctagggccaccattacgttttatctagctagctctttatgtttattaataattaattagtttcaaactttctaataagaaaattaaaagattttctggtgaaagaaaatatttttgagtgacgatatattttaatataagttgaaaaattaaagtagtgctttgtcggtgacactgacacctcttccatgatcaatggatacgtagttctcaatatagaaaattaagcctaataattaattaattaattaattagtagttaattaacgggcttaattaattttaattaagatatatattaatattaatactgtatagtcaactgcatggccttccctcttgtttataagttttaatcaatagattgatcgagattgaaaatgcttatattataattacaacactcagttcattaattttctactaatctcgagtctcgaccggatatactgtcaacacctatgaataaacaaatataataagaaattttataaattaattaaagtaataagaaacatggattactgtttactataaaatgaattagtcacaaatttattaaaaaaaaagtgatatttttcaatattgtgtaatatttagactgaatatttgattttttttttcttttatttgtagtacagcatttgattttacaattttattataggctaatatatattaattgaactaggcgtttggttgggagaaatggaaatataggaatgggaatgtgaatgggaataggaatggaatggaatggaataaaattt

SEQ ID NO: 114483 - DNA, 5135 bp, Cannabis sativa
  modified_base (1129)..(1142): a, c, t, g, unknown or other
acataattagttttgataatgttttgattgctaatgtgagtcttcatgccattagacataggaaggcaagaaagatattgagttgggatcaaattagatatggagaaacttttgattaaggttgagtgtcaattccttgattggattacatcataagacattttaatttccctcttaagtttattaatttaattataaagtgtctttcttctgtcaaaataagtttcagtattaatgtttccaaccaaaggtataaggtagggagattccctattattgctctgttctgaaagactatattaaggaagctagcaatgatcttagaggcattagaatttccaggttagctcctcttatctttcatcacttatttgctgatggtagcttcctatttataattgttaatgctacttctaatagagtcatcaaaaaggctcttgagatggtcaattttaacaaatcatctccactctttacccttaatacaccaatgcaagagcgagagtttgtccttcaaaatcttcacaacaagtctttttttaaagaatatgttagtctcccacaatgttttgaaagaactaaaagttcctcattttatttcttgatagatagtgctaaaagctacttaaactcttagaagctcgaaaagaagtccttaaagctgtcattcaagctctcttctactatgccatgtcttgttttaaaatccccataaaaatttgcagtaaaactgaaaaaattatggcaaaattcttgtggagttcttatgggagcatttaaaaaattcatgataattaataattttgccccctgaatttttcgataatactaattatgccccctaaaatatacagctagttaagaatcccctgaacttttacatttacaaaagtttagtcattctactatgtttcgtctcattattccgtttaaatgctaatgtgtctttgtaaattagtaattttgcttcataaactttgaaaactatcaaatcgtattccctcaaaataaaaatgaaagattaaattttgtttagtaaatcttaaaaaaaataatttagatcgtaaaaaaattattttagaggtaatgaaatagaatggaatggaaagaaaacaattttcattccatnnnnnnnnnnnnnngcattttaaagtattagaatgacattccaatggaatgttcttttcaccattttggtggaatgactattccatttaaaaaaaaaaaagaagaaggaaagaccattccaatataacaagaaaaaaaaattcaatgattttttttatgcattttaaatcttattccattccattcctatttctattttcattcctattcttatattttcattcctctcaaccaaacgccaccttaaatataaacgattttttattagatgcttatgaattgttggaaaaaactccttgtgagatgttaggaataatgtggatgatctggaatttaaataacaagctttttggcaagaatgcttacactgtgcaggagatttacagtagggtaacaagatattccaagaacataaggaggctccgacaattgacaggcagaggaagagcaaaaagaaagaaactagcaagagctgcagatggaaaccaccacctcaaggcaaattgaagctaaatgttgacgctgccatagactcaaaaagagagaaggtagttgtttgggcaatagttaggaattcgaaaggagaagttaagagtaggaaatgcaaactttccaggagattactccccaacaatggcagagcttgtggcactaaaacgagcaataagctggagtatagctcaaggtgtaccagtgtcatatatagagacaaattcaaaagagatagtagataaaatcaataataatcttaaagacttatcccctatggatgatgttatagtttttataaagaactctttatctataacccccagtgtttcttcaactcttgtaagaagggaaggcaataccattgcaaagaaggcacttgtcttgtaaaggtaatatttcaagtgttttaatgatgtaacttgtactgaacagttctatttttttaatgaagttacttattcagttattctcaaaacaaaaacaaaaaaaaatcagcatagagtagttcaacccttattcttttttttttttttttcaatatgtagacttgatataaagcaagcaaactacactgcataatcatcacatcaagtccatccttattacaacaacagcatatacattccactatcatggacctcgtgattttgtttaaattgttcaatcagaatacaagctttccaggaaatatatatactgattatccgtgagaatttcatgttcatcaagagtacaacttcttccaccgtagagataaacacaagcatttcactacagattaagcttacctgctaagtaccatgagtgcatggcaaggctgccaaaggacatgatattagcaagagaagacaagccgtgaatcatcccaaatttcttgttcatagctgcaagctttggattcaccttggcaacttccacattctttgaccacccaacttcacccccaatgttctcttctctttccactttgtgtctttgcttcatcatctaaacaataaaaagggtcgaaatgctacattagtattcgaaatttagcatcagcacacttatctgattctgtttactgctcccaaatgaaagaaattgaattgtaaggaaaattgtttggagacaactgacaaaaactaaaacattttggcattgtaagtgccaggttttaaattcaatatgtaggcaaaattatgaagggaattcagatgcatctttagaggcattccaaagtcagatacttgagtgaaatgttcaacttgaagaacaccaggaaagattcaagttttgactaagtgggacattgccttttgttaaaaatttgtgtatacgttatgtaaaacttgatctgtttgttactggatcgcttacttggactaaatgtcccaagaagtagctatcgaaaggtagtgaacctgtaaaaatcttttgagttctttctcttgagcttctatcattgaatattgaacagaataataataacaatctggtaacaactctaatttaggtggctaaaacaaatttagcatgttccaaagtcaaacagtaattatttctaagttcccattgtcatgcttggcataaaaataaaatcattgaaaataaagcttctatcattgaatattgaactggaataataatgacaatctggtaacaactctagtttaggtggctaaaacaaattttagcatgtttcaaagtcaaatagtaattatttctaagatcccattgtcatgcttggcataaaatcattaaaataaagcttttgtgttacttcaaatagtagttaaatcgaaaattctctttgtcaagcttacaatgaagcttctaattaagttttttcaaaataagctcggtataactacactaattctcatgccccttgagaattgaagagcctcagttatctccatttacataataacaatgtaattactcagttaaaaacataaatgtgtaacctgttaattcccactaattatattaagatccaattagcatgttattttccaaacacagccatagctttttcttcctagtttgaataatttccagatatgaatatgtgagtagaacacatcaataaatgacgaagagaagtacttggttatagtctcagaaatactagctaatatgaaaatctaagaattttcacataagaattttcatattttctgagaaacaatggaaacgtaaatcaataatttagattaataagtgctaagccttgaacatcatagtagtaggttgtaacgtcatcaaaacacgaggttttatgtatttatgaaaaagagaagagttttaagaaaaactgacctcaatggtcatgggtgtaaagacaaataaattggtcagattgaaggcgaatgcagatagcaaaaacccgagttggtatttctcagtagtagctgatgtcttccatggatgcagatacccaaacgaagctactgatactgcgcaacaaacacccaccattgagaagtaagcagggaacattttgctctgcaaattaccaaattgatgcctcggaaggttcctaacaaattgtatcacaaagcaagaatttccatgttaagaaaagtaacaatagtgagacattattatatttcattatgtagttgaatataataataacagaaagaagaagccctaagcaaattttcctagtttatttgaattgagttccaggaaaaaatatcaaagaaccaatagttctaggtttggtcctcgaatattaatgattatcaatgaaaaccctactaagaatgaataaaataaaaccgagaaaccctctttccctatcaatgaccaatctcaaaattttcaagaagttaacaagtataaaaccgagaaacgctctttcccgtcaaccaaacagatcatatatacctccaattccacatcttcttctagaactgaagaccaagattaacaattccaacgataaaaaaactaacacatttaaaacagaacaacacctacttgaacatgatgataccgccgatgaaggtgacccatagagctgcaccccaagcggtggagaagcagagaagatgagccaatttaatataggtgaaaatttttggtgaatggtgactgtcggacttagatccaaagctctccggtgaaaatataactccaaccgctaagaaggtgaccgcagtaaggaatcgagataaccaacccatctcacactggagtgtcgtctcgtcggttttgcagagcaagattatttgttaggaaagaaaattggggagaaaaaaaatgaaaggagtacggagaatggaaagagtagaagtagtagaaccaaattgttaagaaaagttagacactgttttcaattagtattagagtaatttatatttaaatttaactttcgaagtaagtttaatttttagaggtatgagttatgaatttttaatttttttaaaaaaatataatttatatgtaccacacatggataatgagttgacattcatatctttatatattaaaagtgtctatctaacggcatttcttggtttaac

SEQ ID NO: 114484 - DNA, 4514 bp, Cannabis sativa
ttaattaaaataatgtatacaaaattgtaaaatgcccttacatgtatatagagttagtagaattggcatacaatattggaagttaagtttaaatgggttgaacttttagtcctttgtttgaagtgcatattgaataatggaaagagagtttgaattttgagataaattacctttggtctaagtttcttgatttgtcatccaataattgacttgttattttttagattttagttttagtttcattctttttcattgcttgaggacaagcagtagtttatctagcgatgcatctcaagtatggtattgacaaccctcttttatataaatttccatccatgagcaaatatattggggcctgatattgaacctaccatgaagcttctctatcatccggaagtgttccaaattctaggtacttttagattggagccatccacgaagttaaatgatcaaatactgttaccccagtgtttttgtgcttggaacgaatagatgggcgatggggactaatttgtatttttctatttctaaatcaattgctaattttgctagcatatctgcgaaagcattttcatccttggggattcacttgatgaaatgatgcttaaaatgttgcaatagctatctagattttgctatgtaattagccatcttttcccctttggtttggtactacctgtaaatttggttgaataccaactgtgagtcactatagagctcaatgttttgggctccgacttctttagctaattgtaagccagctatcattgcctcatgttctgccttattattgaaggcttcaaactcaaactggagtgcactttgaagtcgatgtttttgcggagaaattagaatgattctacctccagaacctttctcgcttgacgctccatctacataaatcttccagatttcaagcttcaggatgggttcttcaggattgttgttcatccctgtacactctacaataaaatttgccaaggcttgacctttgatagagattcttagttgatattgaataccaaagtggcttagctccattacctatttcaagagtcttccagatgactctgacttctacaatacttaatggagaggattatttatcagtaccctgattgcaagggcttaaaagtacggtcttagcttccgtgaatcagttagtaagaaataggaaagctttcaatcattggatatttggactttgcgcccagcaatttttcgctcacataatatgctgaaagttgtacccttccttcttctcacactaaggaaccacttatggcatgatctgacaatgacaggtacaaaaaaaatgccccccgattgtcttggacaatattggagccttagtcaaatgttccttgagtttctggaaaggcatcttcacactcggttgtccattaaaacttattatttccatggaggacattaaagaatggaatgcatttgtttgttgatttggaaacaatctgctgagtgttgcaattcttcaagttagactttagaaatccttgtgcttcctaggtgaaggcatgcctagaagagctttaatttttttttttcagattcgctttgattcatctggaactaacaatgaaacccaaaaatttccctaagaaaattccaaaagtacatttctttggatttagtttcattccatactttcagataatggagaaagcttcttctagatttttgttatggcttacagaagtctttgactttaccagcatatcgtcgatgtagacctctatattcttccccattacatctttaaacattttgttgactagatgctgatatgtggctctaacattcttcaatccaaaaggcataaccatgtaacaacagatgtctttgtcagtttggaaactagtatgttcttgatcagccacatgcatcttactaggaaagtagctagagtattcatccatgtagtttaaaagttcatatcatgaagtagcgtcaaccatttgatctatttatggaagtggaaaagagtcttttgggcaagatttgtttaggtctgaaaagtatatgtacattctctaggttccattagactttggaactaatactggattggcaagtcaaacttgatatagggcttcccaaaggaactctatattggtcagcttgtctactttcacttatactgcttttgctcgaactggatctaaaggtcttctcttctaacggactgattccaccatgggatctgtatttaaagcacgaaaaatcacatggtgactgattcgagtcatgtaaaaaatgaatccaagctaacacatcattattattcttttttatgaagacaattttctctgtaacaactggagctagattctttcccactttaatgactttggtaggatcttcatcattgatgcatacttcctctatctcatccataggttgattattttttccgcgcctacacacaaaactaactcatcttctttccagactatcccatgctagttgagcgaatattttggattcatttgggttttcttcttagaccattaagatagttttggtcaagacattgtaacattttcttgcacttttttgattacccctaattgttccaatgcttttagaatcactcgagaacttcatgcataactgacagattgaagtaacaactctaaaattaactaaaaaaggtcatcccaggatgacaatttaggctgttgggcaatccactactataaaagtgcattatttgaagaccaaaattgttattgctctcagaaacaactccatttagtgtaattgaaagttacatttttcccataagcaaaagtgtatctctattgaagccttggagctgaactggacaagaggttaaatttgtttccaccagacctatggcttttgatataccctaattttggctaacaatcagaagctagtacgtgtatcagagaaggaatatgaatcagcttaagcattgcattattaaatgcacattaaataacttgcattaggaattacagttgatagaaatattcaaattcgctgccacataggtagatccaagataagaataaaaattattaacaagtaagactggcgagatgacaagtttatcttgggataaacaaaatacataatgaaagttgttcaagacaagtaaaaaaagagcttgtagtttattaacccacatactcgggaataaaagcttgcaactcattgacctacatatttgtatgtacaaagaataacaacattcattcatctcgttctttatacattgaagtaaccacctggctaataccttctaaggtgataaaagagaattgtgagaagcattacctctgtacttaacatttttttacaaagacggtaaagaaggataatgtacacttagcgcagatcattcagtcttagcataattgttaatggataaagacaaaagggtggttaaatggttatttaatattatcccatatgtacaataatgaaacgtgaggaatgtccacgtttcatgagcggttatgaatgaatagatcccaaggaaataactatcaccctacacatctataaatagggacataatctaggataaaagggatgaccaatttaagaaaaaagcgagatattattgctactaatattattgtattctatattataaatactatccataataagatagacttgtggactatgaagaattaatttcaaaactacgttaaaaactttctggtgttcatttatatattattataattaaatctgtggtatatttattacaaaaaggctaatatttttggttaacaaaaatttacgttaatagctttaaaagcttatttgaagagaatgttgacagagcttccattgtctacgagaattctagacaccctcttattgcaatttgattttaggtctagttatagtcaagtactgcaaagctctaactatagacctataatgttgagggttgtccacttgatttccatcaaatgtagaaagctttttagaccactagtaatgggagttggtgttggttttgcatcatgcatttgagctctacacagtaagtctcgaacatatatgttttgcctgggatagatgcaaaccttcttcaatgtggtgaaccttaatactaagaaaataatgaagactaccaagatttttttagtgaaaacttaaagtccaatgctttgatcaatgttgaaacaatatctagattactacctgtgatgattatgtcatccacatacacaagtatttaagttacatacctggaagtgtgttgaataaacaagctatggttcgatttggaggagaaaaaaccaaaattcatcaagcattgttgcaacttcttaaactaggcccttggtgcctatttgagcccatataaagccttattcaatttgcagaccaagtgaggagcattatgttgagatttattttaccagaatctagatttattaacatgtatgtttcattaacaccctaaatatgaattctctaatatgatgaaattaaacacataagag

SEQ ID NO: 114485 - DNA, 3335 bp, Cannabis sativa
gtaaaatatttccaacaatttcttagtcaaaaaatcaaataaaaaggaataaaatatgattaagactttccttaaaaaataaagataaaatcaagtattctaaataaagaaaactcatatttaattcacacaaagtcaaaaaggaaaataatctaattttagaaagcttagtaaaaataatttcaaaaataccacaaatattatttttacctattttatcaaatatgccaataaaggattttacagaagcatcaaaaatagaattttggaagctcgattttaaggccccagcgcccaagtcaacatttggcttggtttgatgggttctgcttatctaaatcgagtgtcgtttttatcgtccatcaagtttttcacaagtgcaatgatccatgaagtcaaattatctaaattcacaacttcaattttggcgcattcggaagtcataagttttgagatctgtttccgcaaaacaacaacatctccgagaatgtgtgtgaccagcttcaccaatacatataaaaggactaaggggtgtcaaaccatcacttaagcatctcaaaggacttcccttggaagattttacatttatacaacgtccagtttgatgtcagatgtcaacctgggcgctaggacgtgaactaccttcagtaaaacggccataagtcactcaaattttatcttattgacgcaattcaacttgtgttttgaagctatttaatccctctatcaagtaatgtctcatacctcaggcgtaattctgaagttatcgtcatcaaaatctaccctcaaaaaagttacgaaaataaactttgggtaactcgcagcgggactcgccagacatcaaaaataagctaccacgagaagctaattttcatcatcaaaggtgaaaaaaactttatttgtatattatctcctatttttgtaggcttccttcacttataaaaagagagcttctttaactcattattcacattcagaaaactatccacaaggttagagcttctctctcaagattttgaaatttctcatacttagtctattgctgtaatcaccatctcgtgagaaataaaaactcaaagtagacatgtagtcccattattatcgcgacatataggaagtgaactattataaatttttgtgtctctccaaaaaatttacttaaacaacttattcattctcgtcaacaataatatactttttattacctaaaagccattaccaggattaagtcctagccagttgatcaactgaatgattacaaattattttagaacaaagatatatatgagatattcttgtctactgtaaccttcttttttgttagtgatcattcactttgattatcatgcaccaaagagtcaaaaaagtagatttttcagcttttgcaaaaagactttttgaaatatacttttactatatgccaatatttttctcgtgcttaacaatacattttctttattgttggtatatagaggtatatatatatacttccaggaacttgctaatgaagaaacaaagaagctagtaataagtcattcttttaataatggtcaaccggcaggcgggtatacgtttacttatatattgctaccaagtaccaaccactagaataattgcgtgtataaatagagagcaaggctgaggcagttcaaggatacatacgattggtcaactgtttgttcgtggatgaatataggagtctctctttcgcttttctcatatttattattaataatatataattgaataatcaattaaattaatattacatgcatatatatgttcttctttttcttctttttcttctttcacattctttctttttctttaaccagaaatgcttctttattgatctgatggggactacaaatccaaaaatttaaatcgattccggtgcatctagatcaacaaaagtcccatccactcactcaagctaggagattgtaaggttgaaacttaacagtacgtccatgtagttaaagtttttcttagctgcttttactttccctttctttttataagacatgtagcaaagtttattggacaaatacaaatatatataaatctctatttatccattatgcaaacactgtctaattaaaatacttccaagctttttctacaaggtccagctcatatacatgtcacgtaattgaacccaatttaaatcgttaaataaaaaaaataaaaaaataaaaaaatcttacttgcccattttttaatgtatataatattattatttgtcacatccatcgtttaaactttgaaactttatatgcaaaataataatctaaattatctataaattataatctctcattttatccgattccaccccataaaaattacatgtaaaaaaaaattctcgatttgacttctaatcaaaccaagatatgttagaaaaaataattatattacaataataaaatgataacacctatgataacacttataaggatttacaaaaataatccttcaggattcaacagatactctgattacaatcaaagaactagcaaaacataaaaaaaaaaaataaccaacccaagaataattatacatataaatattatgtaatatatattatatatatgtgtgtgatactatgcatgaaaactttgtacgtctcactgagtgatagaaatatgtatggctgatatatcatcaatagcagatgtgactgagaatctgtcattgtctttctttaccaatgtggtgactttactatctctaatgaacacttggtcaccctctatttcgtgagtccatgtgatatgtttttctatattacatatatatagttttaagtcattcctgtattccttcaaaaaaaaaaaggtcattcctgtaagtaatagtttttaaatcagataaagtgagtactgtttagaaatggaattaataactgaaacaaaaataaaaaaaataaaaccaaagtgatctatgtgggtccacgtaacggcataaaagtctaataatgttgttctgccttttctcgactacacatcaagctacatgtgttcctcgatcattgggtccggccggtttgctcttccctaaaaacatgcatagatcgaatgcatgtcatttaatattatatatgtatatatttatatgaatctccaatgttcttatttggcactgctgggcagtctatattatcttaaacagtatatatctttgattggataattaggggctaagtcgacgtcgctcaatggatatacacaaatatatatatactagatagaattacgtggcgtcccacgtaaatattagttttatataagttctagtagtttttgtttaataatttagtaactaagcaacgacaa

SEQ ID NO: 114486 - DNA, 1426 bp, Cannabis sativa
  modified_base (33)..(38): a, c, t, g, unknown or other
  modified_base (1280)..(1294): a, c, t, g, unknown or other
ataatttataaaaccctaataaactttcatatnnnnnnttaattaaatgattacctaccttgtaaaaatactataatattttactttcgtagttaataataatctaaacaataatctctatttgaatctggatattacaccattgatggagtaaaatgacatgcaaattctacaccaatttagtgaaatggtaaattaataaaaaaatatttatgaaataatctcaaaaaattaactaagtcaatctctaattttgtcgattgagttttattaaatttaaagtagacaaacctcaaacaagatcaaatatatacattaaccctaatagtcataggattttagtgtgattaaatctaaaaaaaattaaatatatactcaaatatataattttttcataataattgattttttttttacaaagaataataataataatggatttattattattattattattattattattattattgaacagatttaagtttttaaataatagcttcttatccaaaacgtgagtaggtcagccaacagtatgagtaatggtgacttggttcaatgctattggactgttgtttacaataatattttatattataattaaaaatacataataaaaaacacatgtcgatatctattccatttactcatttacggataacctggagccatctcatctgatgatatatcggatataatatatcgttaagtctaagctagggctataggcctacgaaatgcgaatcgtccacacagactgacaaagctaccagccgccgtcacgtgtctctttgtattttattacttattattcatttttagtaattaaatatagatggtaaaaaaaataaaaaataaaatatagatggtcccatcacgtgcttatctttcttagtttaatcttaacgatgcttcaaagtagagttcctttgtcaattctctaaacctttttcaaaatattaattaagattcctttgcacttaaactttttttaataatcccacctatatttaatcaacgaatatatataaattaaataataataaaaacaactgtggtgtaactgtataagtgcaagtggtaactatcatgaataataaattaccttattcttattgtatgatatatgtgaattagactttgtattctgtaacgaacacatatacacattaaagtagcatatggaggagttttgattgttacatttttattataactatcgttatatttttttatgttattggattgatattaaatgattgtgattaatttaaaannnnnnnnnnnnnnnataataaataacttgtaacctaaaaataatttgataatttattttttttataaaattttaattaaaattaattatattttaaaattaaattaattataattattaattattttttgcaatttattactatat

SEQ ID NO: 114487 - DNA, 1499 bp, Cannabis sativa
  modified_base (1176)..(1176): a, c, t, g, unknown or other
taattaattctaaaaaaaaaaaatgtttacctattagtaaactgctattacaagtcaaaaaaaaatgtaaccataatggttacaatcaaaatataaccatcaaatagttaaccatatatataaatgcgtacttttttttataaagaaaaaaaaaaattgtcacaacactcttcaagacagaactctttatttttgtacaatattgcattgatgtatgtattagttccgcaggatgcttcatagttgagttacggagttaaacccttctgttttatgtaggagtcgattttttgggaccacacaaatatataattttggctttttgcattgtcatttctcttttgtgctctctatctatctacccacagctcaccaacttgagatcagaaaaggttggtgcaagtttttggaccatcttcgttcctacttccctcatccatgtatatattcaatcagttgagatgtggaggcttccgggacagccagtacaacttcaagacaattctaaccccgttgtctcttttgccctccatttattttcctctccttgacatttaacatgtccttatagaatataatctacagattatatgagccatttctcttacctatttccttttgcttagttagaacgatcgaactaaaccaccacgtgtacaattttaaattttgtgtgtatagttagcaagtagagaatttaggtatgtaacgtttgtaagatgagcaatatcaccttccaatcattgctgccgccttgactgtagattccagtttcacctatttactttaaagaattgcaattgatgttcatattgttgcaagttgcaacttgcaagtatgataattaagggctgttatttatgtgtaggagtatcctgtgtgagtgtaataatgaacctttttgtttgctatgtaaaaattgtccattaactcatttattagaacactgaacatttgtttgatctccaaacagcctttttacaaaaaggaaacagagaagaggatcaaacaaaagatgtttgatgcattatcgaatcagggttttccatctttaatcaaacagctggaaaaaagatattacattccttccatgctttaaattcaaatctccatctgacaaatgtatatgtagatcagcttcagccctccaaaaatatatattatataatatatatntatatatatatatatatataaagcgaagtgtaaaatctttttgagcaaacctagcaagacagagtcaagttgacatttacttgtttttccaacaagcaaaataaattttgacagccttttatttgtccaaactacaacataattcatttctcgtgtccacttgtaaaatatgaagtgcggttctcctctctcattgctaatcatataatgaagagagaaatatataaatatttttatttaaggaaatatatttctatttaaagaaataaatttctatttaaggaaataaataaataattgattttctgataaatgaatatttt

SEQ ID NO: 114488 - DNA, 2423 bp, Cannabis sativa
agttgactaattatagacataaagttcaattagtttggcaggaagtcaagcagatacgagttgttttgttatctaggatttaaaatacaaagctcaagcgcacatgtaccattctattgaaaaaagatggtttgtattgatttgaccaaatatgcatcactatgagaatgttgaacatagtcatcaagtagttacaagattttgaaagcacaactcataagaaacatctcatgactcaaaatcagctaaatggaagttcatacctacctgtaattcatgtgcacccacaacaaggttaccattggaaaaatattttgaaaagttagaatgaaattgcacaaactaataacaacaagaaggattattgtgattattattttggtgagcatatcaaaacacaaaatgcttatgtcatgaagtgattttgaaaacgtttattctcaagtattcaaagacaaaaagagagttgctcacatcaagccagaccaaccactaaaaatttgattaaggaagaagaatacaaatacacacagctgcacgtagcatgtcttccatgatattcttagcccaacgccattgacccaatcgaccgtgtgcattaataagagcattataagtctcagcatccggtttacacctacagaaaacaatgaccataacaaaacaaaacaaaacaaaacaaagagcattataaatggctcacaatcaaaataacaaaatgaaaagacaattcatgaactgtcatatagattcttataatcaagaaacaaaatgacaacaaaacaaaaagagaaaggtccaggcaccgtgtcaagatttcaataagctcacaaaacacagatcaaacctataatatggctggactaaccttaaggctatgtttggaagttgtattttggttggaaaagaaagaggtgaggaaaatgtaggaaaaataaaaaaagttagatacaacaaaaatttttagatcgaacacattttcttttttaattttccacacctttctttcttacattcttcattccccaccgaaatctaacttctaaacatagctaaatgaaacaaaaaaaatagttggactaatcttcaagtacatactaaagtagccaaactttcaggtttaagaaaatgttccttgattgattaagaaaccgggcaaaacattactgacaaagtttattttcttgtatgaactaatatccaaagagtgagctttcaaagacagaatacaagacaacatgtatgtctggagagaaaggtattgttttgaattcaagcttatcaactaaacaaaacccaatggtgataataagcattaacacctgaaaagtataagctttacctacctccattcttgcatctcaaaaaacaaaccacgagcttgatcaatttgatgattccttgcatataaccttatcatcatattgtaaatatcagtccgagcacaatagtttctctgattcttcatccatctaaaaacttctttacaatgctcaagcgatcctctcctagtcatttcctaaaattactcaattcaaattccgcaaacaaaaaccaaaactttttccctttattcaaaaaaaaaaaaagcgccaattaccttaatgagaagaggaaaattcttccttgaaaatcggccaacccagtgattcaaaacgccatcgatatcctcccaacgtcggagctggtagaccttttcgacgacctccgataaggtccagtccttctcgaatcggtcaccaataacacgcaaacggtaccgttttgggatatcgtcttttctgaagccggtaaggtgagtggtggcgtggtgtttaccctggtcgtagtcgacggagacatgcttcttgttgtcgaggaaggtggaggaggatgaagagtcgttggaggagctgttgttgcagcggagggagattcgaggaggagtgtggagattgggtagtgaggaatgatgggatatggtggtgatcaccatgggaattggagaagtgagagaagtggataaagataaaccctgaaaccggtaaatgaagaagatgagattctaagatcatctccaaccagctcaccaaattcgttttcacaatatcactaaatttggtgcctataatcccaaaaattacactaaaaacatattcattattattatattaattttttaatctaatccaataacaaccgaccaccgatctaattacaatcgactaccaaacataaggtattgattggattttaatattatttttgaatatccaataaatcagatctgatattggatggggtgtctaaaaataatataaagtagatgagaggaaagaagtagaagatgaagagaaaaagagaaagagaaaaagaaaaatagaaactaaaaaaaagagaaatattgattacaattaatggtaataaataaaagatttggacat

SEQ ID NO: 114489 - DNA, 1542 bp, Cannabis sativa
ttccatgtttgcaatatccgaaaactaggaacagatgcattatttagttttacagaacaaagatggatgaatgacagccatgctcatgattatgcttgcagctttgaagagcgccttgctgcacagagaaaagagagagagatggcgacagctgaacttggatttaaaaagccattgagtaaggaggaaaagataatgaagaagaaagaacgtttggctgcaattggtaattcaataatgttgatttcattacacaattcttgctgtccaactcatttacgagatttgaatgattattttgtagttgtttgctttattccttttttaagaaaaaagtgagtaaagagtagggatcttctcaaagttttgcttaaactatcttcaccattaggcatgtaaatgaaaagaagttgcataagcaagtacttgttcttttaaagatcactttggctcctagacttgtatcctttccctagattagagaatataggagtgactagtgagtatatataatgaatgatttagaggaagggacgactgattattttttttattgccagtcttattagcaatgtgtggtcttgtagtttgagagaagtcatagtaaaattttgacgtaaactttgtaggcatcctgtagttggcaaaaattgatttggttttcctacgctgatgggttagcgagttttgagtacaaaatgtaacttgctcaaacataagattaacttgaaaattattaggtcttaacactttcctcctattaaattttatataagtattcatatatgtcatcattctacttgtagcatctggtgaaacatgagatgcttctgtactgtactcattgttgcattgatttaacaggggaagatctattagccattgcaggagatcaacccttccgctttcctgctactttcacatttgttgttcgggcattttcaggtggctacattatttaaatggctttgtaaatttctacgtcatatataatccctacctgtaattaagtaattactatttttattatttttggcctgcagtattggatggcattggaaagggccttgaccctcgatttgatattactgagattgccagaccgtgagtctactctttatttgaaatcagtgtaacaagctcttttgaatatggctaatattgatgaacaactgacaagtcttacattttctatgttatagttatgccctggaattgttgaaatttagggaagctggagttgaagttttattaaaggtaaatttaatttacattcatctaaatgttctataaattttaaataccatttctgtttatatcttgatctcacaaatcttgcaggatgcaagaagcagatgggatagacagtctcaggccttttataacttatttaggcaagctgacagagttcaaaagcttactgatgtcatccaaagactggtatgaatgatttgcttataatttcttaaataccttactaaatttttgtttacatgtgtttatcaaagagtgcttcaactacttcatgcgcttaattaattt

SEQ ID NO: 114490 - DNA, 4464 bp, Cannabis sativa
  modified_base (941)..(963): a, c, t, g, unknown or other
  modified_base (1093)..(1094): a, c, t, g, unknown or other
aaaaataaacatagttaatattaccatatatataataatcaataattattaccatatatattgtaaaaaaaattaattttttttaattatatgtaaaaatgtatgagaaaggagaatggtgagaagtcatctaacggtggtgatttggattttctagtggaggagatcattcatgattccatttttcgctcttctcttagcttccatttaaccccaagaacaaccaactcttcagttcatttcttttctcactaaaaatgcttctaaagtataacattaacttgttgaaagaggatttccgtcaatcagagctgtgcatgagaaaatgggggccaagatgagtgtttccctgatccagattgggcaggctacaaggtagatagacgatccacttcaagatattgtgcatttgtacataaaattataggtcctctttaaaaagagtagtcaaaaaaattgttaagggaattagaggaccaaaaaaaaatatgatatgaaaaaatgacaacctatttttataatgtttttcttaagaaaaataaattcaaaaataattagtgttttaaccaactaatattataagtatatttatattctttatagatcacttgtgatctctagtgtaattgtgaggtgatcaatatttcacttggaaagttagtggtttgaatactattggttaagttttgctaattaattttgatttatgttgataaaagtttaaaagaaaacgattgatgatggacaagatacgtttgccactgtgtttttatcatctaatgaaattgttatactaaatattaattatattgagtaatgtataattaaagaaatggctaattaagatttttacccctgaactttgatatgtaccaaattatgcctcttgaatttttaaggtcgttaaaaatacccgttgaactattgagattgttgaattnnnnnnnnnnnnnnnnnnnnnnntcaattttactattttagtgattgcttatgtactaaattatgctccccagactttgatatctatcaaattatgccgttcgaactttgacatatactaaatcatgcctgtgaactttcatccatgttaganntttttactaaaattagacaaaagtcctttaattcaacaatctcaatagttcaggggacatttttaacgaccttaaaagtttagggggcatgatttggtatatgttaaagttcagggggcaaaaatcctaattagcctaaagaaattgattttctatttgggatcctgatatggtcttatttttactattttgaaaattataaggtctagtttgtcatttaataaaataaaaagttcaattagtaacttttacaaaatactggatctaaaatattatttaatctttttgtaatcttgttgacattgggacaaaagtataattgagtgggtagaattttgttttgttttgtctatagaaatatttgcttctcttatcctgtcgcaaaaaacataaaaaaaatattcaaaacattaaacaaaaataaactctctaacaaattaataccaaacaatttgaagaatgagagtcaaagtggaatatttgactttaaattaaaaactttagggaaaaagtcaaacagaaaacaaatgtttcatagaaagaaaagagtctaatatctcctccaaatataaagaagcttgtatatgtattgtgttcaatgaatcattttagaaatatgaatttgaaaatgtgagagttggagtgaacgggtctaatcagagtacaagtcttgataaactcctttgttagaaggcaaacgttgcaggcattttaagaaatattcatgaacgttggaaattagaaagtagatttcttttctaatttgaaagaatcatgaatgggtattgttagaaaaatttaaatttttatgtatatttttctatctaagaacaattattatttttatattatatgggtttggattgttccattaactaaaaaaaattaagaaaaaaagttttttggcaaaaaaaaaaaaatatttgagtttgatttagaccatctccattaagagatataaaaattgtgctatatttggcacaaaaagtagttttgtggtaaatttacaccaaattattcttaaataacattaaagagagaaatatattattttagagaaaataatatttattttaatcattgttaataagagattaatgagaattaatcaaatattatttattggtataataaataataaattttatttatgaaaaaaattagaaattaattttagactttaaactatggcccacacatgtaggcctaatttacacgtgtagggtgacatataaaagtccgtgattaatttaattttaattattttaattagttaaaataatttaaattaaattaagttaattataatttaataaattattaaataattgtttgatgaaaaagataattattaaaataaaaaatctactaatatttattatttaaatattagatatttatatttaaatttgtattctaattcaaatcaaattagatatttacttttactttaaataaagaattaaataaatttatttgtaacactatatatatatatgatatatagtatcataaataaacagagagttaataaacaattaacagacagaaaatgcataacaaaatagagagaaaatatgaattgattttttcactcctacttctctctatcacgcctaccactatctctctccatctcacatgcatacacctattgtgtaagatcaaaaccctaattcaattacagtctctcataagttgagtacacactgtattacctaaatttatttatctattaaaatctaatagtccactctattcttgagtgttgaggctggcttagaagatcaagttgtggattcttcaacaaagtttatggattggatgatcgataattatttaaaaagaaataagaatatcctgataggcttgaagaggtataatctttctttgagtagtttaaatttaatctatatatattatattgagatcattgagtttatgattcatattagataaaaaaatatattttatcaaattccgctctcgcttttataactctgatatggaccataaaaatcaacaaaagccataattcatctatttgtgcttgcatcgccacactacatgcatatcttcattgtataggaaagcatctattttctctcatttttacttttacaatttgaaatgatttatcttgcttatcatagattgtgcaagaatctccttcaaaatgcaaagagtactattttttaattatttggcctacactaagtaggttttgatcaatgttggatactaagagtacatcattgatatatctcttgccttttttaatgtcaatggtaatggtgcctttgccgaatgtttccatgaagtcaccattaccaattttgactttaatcttagatgtatcaagactacaaaagatgcttttaattttttgtcatgtggttactacaaccattgtaaagataccaagtatttttaatttgttctgttgcagcttggtagacatagaagtgattattctcatcattttctcttcggtaaaattagcttgatgagatttttttaaacggcaagttttttcagtgtgcctaattattttttacaattttggcactgtggttttcctttaaaccaacagtccttctccaaatgatttttcttttataaatgtcacatggaagatacttgtcgttattttctttttgtttttcttgtgtctttttccattagcttttggtttttgagaccacgaattgattttagactgaaagacattttcaacttcactttccttatgcctttctcgtctactttcatatgcttcaagaaaaatagaaacagatcaaagcttttatggatcagtaaaactctttctcccaaatcaatggcttgtttatcattaatcataaaaatataaatcaataattaagtaaactctattcctagactcctcactcatttcatatggcaatggtatcttcttccatatcacaatccaaatcaaaaataagtatacaaaagccactttctacatgattaatcaaacatgttagactgcactaagaaaaataacaagcaatatattagacttgcataattattagacacgaataaaaacataataatgtagaagtattattagagtgaattagaaaaatgggaataaaagaaagatggggtacctgcataatgatgaggatatcaatgggctcacttgtctcacataaagaacgagggatgaagctatagttgtgagtgtacacgactaaggagcaaaaagtacgattacatacagactgttgatgagtaaaaaaaaggggaaatagaaaagattgtgtaaataaataaaataatgacagtagaaggggcaaattagtaaatagatgtatagatgaataaaaatatacatgaataa

SEQ ID NO: 114491 - DNA, 2520 bp, Cannabis sativa
ggtttaggcttagtttttaggtcatttggccacttttgtttgaatggaaaagatggtatctgttttggataggaagggggggcatattttgatcttgtaaatcaaaatatatcttattctttcaattttgatctctcatgctcatttgatgtaagtgttttacctattttgaaggaaattttgtatacaattaaggttacattgaagaaaaacatgaccaagtttctattgtaagggcacaaatgaatcacttgagacaattgcccatgttttcatactattgaggatcttgacataacttataatttttgatagttagttattttacaagtaattttattaaatgaatttgtgtgtttataaaggttctcttcagttctaaatattcaaaacccttgccttttgttggttacatctattcagtatacattttcttggaaactaattttatggtagataaacaaaagtatgcacaacgtatatttttagttgcataattaggttaattttgtagatgttttactcataataaaattatttttgtgtaaacataatatttatatatgtatatattttttttttttttgaataagtgttcttttattaaaatgagcaatcactctccagaatagacataagattcaaaggaacactgttaatggaaaacatacgttcagctaaagtaacagagtgtcgggcaacatagtgcgcagcacggttcgcagaacgcttaacaaataaaatcgaaacattgaacaaattttgaagaatatttttgcaatcatcaaccaccaatccgaacgcagaggctagaatttctgcactccgaatagcttcaacacaaacaagactatccatctcgatgatagcccgtgtgtaagcattgtctttgagccaacttagagcctccctaatacctatgatttcggccaattcaggggccactgagccatctttaatccctgcaaaagcagagatcaaaccactatccgagttcctcaccacacatccgaagccgtgcttgaaagaggaggcaaaaatggctgcatctacattgagtttgatacctgaagacggttttatccactgctccgcaccatctccatctttgagaggagacaacgagggtatattaccctttccttgagcatttatccattggtcaagactcaaatttgcaaaagctaccacatcactcacccttctcgcccgctgcttccaaaccaggtcatttctcgctgcccatatagcccagcacaacatgattacccgtcccaaagtctcactgcttacacggctagctgtagcctttagccatggcagcaaagaagagaaagaatctcttgctacagtggctaaaccagcaaaaccgaagcaagaccatgcgaaatcacaagccaccagtacgtgccattctgtttcggcaaagacaccacacaaaggacagttactttccaccaggacctttttaatacaggtttcttttagttgcgaggcaatttgaggccgccctccaaacaagatctttggccttaggaggcactttgagagtccatagattcttccagaacttattaacctatgtgttggccgaatggtgtttaagatcctgaagtaaattatatgcacttcgaactgaatagaacccgttcttctctgcaacccaatactaagaatcgactccaccagtttgatcaatgggaatgccaaggatgatagccgcatcttcgggggagaagaagtccttcacaacatcactatcccagcatcgattgttaacttggaaaagactattgacagtaaagttctcaagaccttggaccatagggacaggtactgagtgatacaaactaggaagctaatgatcatttgtaattagcactgtagtgccagggtcgattctcttcctcaagcctaacttcactatatcttttgcagcaaagatactgctccaaatgaaacttgggttcgatcctaactccggcgagagataatcaccatggggaaaatatctagctttgaacactttgctagcaagagatcagtgttaaataaaagtctccaaccttgtttgccaatcatagctagattaaagtccctcaagcttcggaagcccataccaccatcatatttgtgttttgtcattctgtcccaactcatccaagtgataccgctgccattaccgttggagttgttcgatttccaccaaaaactcgccatcatccgctctaattcgttacatgtgccaatcgggaaaagaaagacgttcatagcatacaaaggaagagattggaccacggtcttgatgagaatctctttccctgcccgagataaaaatcggccctcccaaccattaatcctctttctcattctctctttcaggaaccccaaaacagcgttcttattgcggcccacgatacttgggagccctgttacgaaaattctgtttattacgcaagtgtacgtatcaagtagtatctcacgcaagtgaggtcaaaccacagggaattggattaagta

SEQ ID NO: 114492 - DNA, 1166 bp, Cannabis sativa
cttcatctgtgtgtttatctatactgtgcctttttccttgtcttgtttgtatgttatgttcccaaatccataggacttatcagtggccacaaaattgttatgtaagttatcctttgtgcttcacgggtctgaggtgtttaaggtgccctgtctagcattcatggtctttcttcccagggaaagggttccattctatgatctctgctgctttgcttgtttcgactatgcaatagccctgttgaaattcttctgagcttttcaaagaaaattataaaaataatctgtaccatcattatgttactgccagttttctgtttattttgttctcgctaattccttgtgttgttttgtttttcccttttagggagaattgagtttaatgggtttgtgaattgtgaatttgtgatttaaatttttgttggtgactgtgtacgcacctgtgaatgagtttttttctcagtagttgtgtcccaagttagtatgacttgaaaaccttatcaagagccttcagatactgatgtgcctgttggttccaattgaagtgtaagacatctttgaagaatttgggtaaaatcaggaatgttgatgggcattctagacccacggtaaggtttacttgcactaggaggggtagacaaatatagcttgttgctgagttggcttaaagagtgggtattttggtaattttcttagtggtaagctgccttttgtattgagtgattgggatagaatcatttgtgcaaagtttgagtgaattctctgcatcagtagagagcttttgctctctgccattgtaagggactttgtctctattttccttatattcaataacagctcccatatttcctattatttcttggttactgttctattgctttctgttatttttgctactggtttgtgtatactattacaataggttttcatcaaatgtactaccaaccgggtcctggttcttaggcacatgccaggaatccctaagaatttttctttccatggagtattagccttaaattgggagtgggtatagccaatgaaattttgccatctctacttcccaattaaagcataatttctagtttagatttgatttcacaatgacctgaacatggatactttaagagaataactggtagaactgaaagtgttaaacttgtgatttattt

SEQ ID NO: 114493 - DNA, 2838 bp, Cannabis sativa
ttaaataatacattttggtgttgcgaaattcactcgacaacatgacaaaaaacactttgatcctatatatatagttgatggatgagattgttgtgaatacctttacataatatcaaattttgagctcataaggttatacatttataaggtaacatatgttacccaagtgggagattgttagattaaaaatcctactctgggcacatatatatgtataatgtatatgctattatatagtgcgatacaatttaagtgactaattatgctatgggtatcaaagggttaaattgttatgaaaataatgtgtagataccataaattaatttataatttgttaaggggccaaattataaataccctaaactcattttaagatgagtctaaaaataggtaggggtcccataaaaatactaggggtttcataattctcttcttttccatcaaagaaaatactttagagaaatagtgtattcttagaagatcataactttccctaaaatctctaacaatggcttcaggttagtgcttctgctcatctcgttaatttcttcttttttgatttagcaaaagttctataaaatataattagggttttttttttttatatatatataaaagtacttttagatatataattaaatatctaattatttgtatttcttgagtgttttataaatcataacacgaatccctccaaagtaaaacaaaaaaattattataaaaacatcaaacattatattagattgtctctaaaagataatataatatacacatatattacatatacttattcttatatgaaaaaaaagaataaaaattatattgaaaaattgaaaactttgtaataaatagtgcggtgtggtttgaactgtaattattaaatttaaaaccgtaaatcgcactacaccacgcggtttgaaaaaaatacaaattacaactgcaccgtaaagaattttagactgtattttttatactattatgctatataaacaatttgtatggtatgtgcggtttgctgagcacccttaatttatactaccctaattatcttattcggcggttacactgccacatttcaatggccctaccgaaaatctaaaaggtgttatgaaaaaaaaaaaaaaaaatccaatatagattttaatatctactaattttggcttttcttttattttctctttgttgtgttattagtttttctttttttcttaaaaaggagattgactatttgactttgagtttttgtagttgtacacctaatttttttcttccataaattgtcctcaatttctttaggcgcagattcctaaaatgtataaattttgtcaatttgatccttaaacattttttttttaattttcttttttggcaaattatagtattttgtgtaagaaattttactttgtagattttaattgagaaggttgaaactaagtttttaacaaaaaaattagattaccaaaaaaaaaaaaataaataaataaacttaaagatggaactcacataaacataaaccctctactaaaaccataccaaatataaatttggttttacattcctatttccactctccaaatatacccatatattttagggatagccctaagtaatatcacttagaaagaataaacaaaaaaatatacgttacacatgagactacatttatgtatatatatgtatatgcatagtattcttccattcaaaacaagttagaggattgctacaaaccaaataatggctcaagactatgactatcacaatgactattattttttgggtcaagtgattaaccagtcatcagctgcctatacactttcacagcgccgccgccgtaggccaaggaagcctgggacaatgtctaccatccatgacaactcatgtcaaggctacgggtggcttcttccaggatggattgctgaagagcgccatatgatctctggcaagatttacagggtaagtagtacatattaattatacaaatttaaattattagacgaacaccataacgagccacaaaatatttgtccttaatgaaatgaaactttatttgttttgcaaagtatgattcgtagatattaatagtcaaatatttctctatttccactcataagttcatatattattagcttttactatcatttgtaaatgtaattatattgtatatttttttaaattcataataatgatactcattcttcaaaattgaaaaacagtattactatgatccatctggccgtctgtactatacccaaagtgaagtgattcgcacttgggaaaagaatggtttaattcttcttgacaagtaatggaaaaaaagaggtaagactattcattcaaaatctatattgattcattatagaacaatgttatttatctttattgaaccgagccttccgagtcatatgacacttttggacgagttagtatgctcgtgatgctcggttcaatcaaataaatgatattttcatttagtataagcatctttaaaagaatatacttaatttattcgtagttatctaaacagaacgaggagtaattatttaatttaaagaattaactattaagaaaaagaatattaaaatttacacaaaaaaaatatgtatatctcctccaattgtactattaacatatatgttaacaaattaattgtaataattattattttttaatttattttttgttttatttaaaaaaaaaaaacagaaaaggagaacaaataccgtatttgtgaaattacaagagacatagctagaaattacaaggcttaagcctgtaatctacttaacaaagtattttaaaaaaaaaaacttttttatttttatacttcaaaacagtttt

SEQ ID NO: 114494 - DNA, 2606 bp, Cannabis sativa
gagagagagaatagattgttatagatttaactagagattctgtttgcaatggaacaagaaatatattttttttttctttttttgtttggttgcactttaaaagtatattattctattttaaaattaaaagaataaccattctaatttaagataaagaaaaatttaataattttttattaatattttttataatcttttttgtcaattttttttatacattttatatagatcggaaagatgtaatctaaaaagggccttaaactacccgaaccaagtattttgtgtgttaattatcatcattattaacttatgtgtttatttgttatctatctaaactctatggatgccttttgttgaaagtaatagaatgtaatggaatagaaaacaatcatatttctttcaaatttatttattttatctttttgtttttaatagttattctatttcaaaatagttataaaaaaaacataaaaatttatcctttttttttttatgcatattaaattttatatattcctatttttattactctcaatcaaataagtacactgctcccattgaaatcaacaattaccttaggtaagctttgtaagtagaccttaggaacttccatctgagcaagcacatttgcgttgattgccaaggcagccttaaggatctgattgcaacattctctacattgttgcagcctcctcctggcatcatcagacaacccatttggcctaaccttaggaaatggtacccaccatttctccttttgtctgccactatcacttgtcgaccctgcccttccagacgaagacgaagacagaggaatccttgcagtgtcatcactagcaacgatcccaggatcaacatagtaaaattcagagttatggaatccatcaaggatgctaagcagcatggtatcgagtttcttcagcgctggtaggttgacatagagatctgaacgtggtctactgaccataacctcaaatgccccactaccagggtattcttgtatggatggtgtaagctcaacaatggagtcactcacacataaaagccagtccatttctcggtgccatatatactttttttgaggagtcaatggctctaatttccacagttcaccaaacacagaaactgcaaaaatatgatatatcaaactcatgcttgtatttatatataataataatttgtatgcaacaatagaacaattgcaggtgaggctagccaggcgttcgccttagagattgtgattttaattgaacccaaaatttaattttgtcttgctccatatatcttaggacaacaattggaattatattcacataccagaaagattggaaatggcatttgagatagccagtgctgtacagactcctttgcctccaccagacatatcttcccctaaaagaagtttagcaaatcgctccttcatcaattctacttctgggaccataccaatataaattattattattaactcaacagatccatctacctctaatccactgaacaaaatatttatgttatgtataaacgagtagctagactcaccagaattgttagtatctgatatagaagtcatcttatccggaatgacaatgttcggcgtcggaagaacaggactgtccggaagaggagaattagaagtaccagcttcatcatgattgtagtgtggacgagagaagccactgctggagctctcgcactcactcacctcctccgtgcttaggctgttgctctcgaactcatcgtccgacgtgtagccctccattaatttaatttattccgatcatataagctcttatgctcacataacacgaccgttgattctcttctcgatagagattacgttaaagttccgatccatactggagatttgggtcatgactgactgagaagactaaagagatagtctttagtgaccaaaaagcacttaaagtgtgacccaaatagtctctgtttttggtttgagccacatttggtcccacatcggaatataattggtgactttttgttagttgggcattttatcacaggcgttaataacgagcgtgaaaatcactatccaatgatgattattatgttttcattagttttgctgttgcttgtgctgttcacgcgcttggatcttaaaaagatttggattgaggttgaggacgttaatgatatgggtaaagttaggttattgtgagtaatttttctgccaaccatcgaataaaaaagacagaatttaaaagagcgttatttttctacccaaaatacgtttcttattaatggagaaacgtgggagccaataaaaataaattattgtgctctaaaaaataaataaaatttaaagtttttagtatttataactcaattccaggagtagctcttttttacaccatttttttttatatatatttataagaaaatttaattatgcatgcttaaatgtatagcacagtctcttaatatgctactaattttaatatttttaccatatcattctaagagcatttacaattatatttcctattttttttagggaaaaaaacaggaaaattccaaaaagggtaaaatattacaaaattactgtgggccggcccaaccaacatttatacagcccacattga

SEQ ID NO: 114495 - DNA, 1453 bp, Cannabis sativa
ctatttagttataacctcccaattagaatataatttacttggtcccaagtgtattcttggatagaggttctactgtatattatattattttaaaaaatagaattaagacttatttatttttcaaaattttcacatatatattttgaaaatttaaattgagggcccatattttctgtctcattttaatacattaacaaaacacattaagatttatctatctatttcatttggaatacctaatcaaataaataatgaagcaatatttaacttgttgaatttttctcaaaaaaaaacttgttgaattgccttttatttttatttgtttttaaatgtaattagttatttgacattctgtgttgcattaatatgagtttgccttttaagtatttccttttttttttttttttggttattaatcatctcattattatattgaaggattttttttttctcacctaaatagaaagtaaaatgtgaaagggaaaattaatgggtatatacttaacttacttaacatttgagtaatgagagacattaataatgagcacgagaatagatacaccaaagtagagtaccacgttgaatttgaatgatacgattcataaaaagtcaagcaaagaaaactaccactcaataataaggttttaccgacaagacttttaaaaacaattaccatatacattaatatggtacattaccttactttgacactaattcattctaatttgatgtattatgtcaaaggttagcaagttgattcctacgtgtgtatggtttggcttcagcccaaaactgaaccctttcctgcctctataaaccttaatttaacaacatatttagttcagtcaagcccttgttgctgaacaggactgcacattacttaatttacacaaatcaaccaaaaatagtgttgagaatgacaatagtgttgagttagttagatcatggtcgagtgtcgttctctcctactagtctctccatttcaatgttgttcatgcatgaaaaaacaattgatgattcctcttctctgccattaatcttcttttctatgcataccaagcttttacaagactcctcttctttcctctttgctttcactaaaggacaagctggattcctccatgttgctccatggagagcatgacttgtcatgatctaaggtgacaactttgttgttgtccaactccatcaccatatgatcatcttcacttaattgacattttcatcataatccaattcatgccctctagttttgttgctaatgtccatctcttaatgactaatgaaatcttcatcgctttgatgatcagacgaacaagctgacatgggagaatatcctcctgaagttttagtctcttcgcgctttcttaggtggcgtttggttggaggaataaaaacataggaatgggaataagaatgggaatgagattaggaatggaatggaataaaattt

SEQ ID NO: 114496 - DNA, 2430 bp, Cannabis sativa
aaattttattccattcctattcttattctcattcccattctcattcttatattttcattactcccaaccaaacgcctcctaagtggaaagcggcagattgcaggagtattattgacaagattcataagaatcactggtctagcaggaatttgtcttttgctgatagatcctagcttattcattcagttcttataaatgagagtgcgagattattggatgagtttgtttattttatcttataaggtcactgctgagattgataaactttgtagaaagttcctttggggtaaaataggtccgcgtagtaagttgcatttcttgtcttgggagcaagtgtgtcttcttaaaaagtttggtggagtaaggtttatttgggctatatctacgaagcaagattgcctaaggccatgtacttgaaagagcatgacttacaactagtactttcaagaacttgtcaagctgagggataaattggatcgtgcctctgtgttaggagctgtgtgaaaaggaagatttaaggtaaaggaattttatttgtctttcattacttctgaaaaagtgttgtattccaaaactatttggtatcggctgtgtgtgtcaaatcatcgctttatttgttggcaagcgataaacaaccacctgcttacccgtgattgccttgggaaatttatggacttagatttcctgttttgttctgtttgtgaggctcaaaatgagatgctctagtatgtgttttttgattgtgttttcactcagcggttcgggagattcatctttggtttggtcaatttatttggcctactaattatctagtttggaaagcaatgttgagcaccctagagttgattttcagtcttctataattaacgctactaaagctgctaccatctacttcatttggtgtaacaaaaatatgtgtcttttgagtctttttgtttttcggctaaggttgttagttctcaaattagatcagcaatgaaagcaagagtgatgggtggtaatttgtttactgtgttcaaaaaaagagactcatgtaagggatgtaataacaatgtataagtattggctatttttgctggtctttggcagcttgtttatactattttggtggatgttttgaataaccttttctcctttgcttcaaaaaaaaaaattaatatttgaaaaataaattagtttatgactaaaatataaaatataagatcttaaaacaaacatttttttagtggaaaaaatttatagtatagtatttttttaagatgaaagtggaaatgtatatctatatatatatatatatatttaatagggaaggggattcaaatttcacacctcctcaatgtgagaagaaatataaaattactagactatagagtatacttatgactagagggaaatgcatatgttgagtggacgttattgacacttatatattaattaataaaaattgacataaataccttactctctctttgccaagatcccacatcccctggcgctgccaaccccacgaaagcaccatttgcacatatcctctcttcgctaacgtatctttaaattatacaaaaatcatttgtgttatataaactaattatcatatgttagaaaagaaacaaaggtagaatttttagagtacctgtcatatattactaatctcccacttaagttgccacgttgctgtgatgaaggaaagtcctctgactgtgcaaaatcatatggccatttttgaacttcaactttcatctttgcttatataccaacaatgaataaatgaatcaagccttattattatcagtaaagtgaaaattttaagactttaaaaactatagaaattaattatataattatatacaggggaattttcatttttaagattttttttttaaaagaaatattttgtgtggaatttttttttttttaaaaaataagaaatatgagaaagatataatttaaggtaactagaggtgaccattacctcatgaggataaccgttaacttatattatctttttaaattgtttaactctttttttttttaaaaaaaaaatcataaaataactttttttaaaaaacaaaaatatatattgtattttttaattatataatggaagaaactacgctagattttcatttatcattagcaacaatctcaaactatttattgtactgataaattaatggtcaaagttaagaaaaaagagatttcattcaaaattggtaggatgtacctatataatgaaagaagtttattttgcaattatatttttactcttttatgaatatcattaattaactctatcttttttttttttttgaaaataagcgttttcatatattaaaataagctagacctcatggtcgttacataaaatgttctccggtaaggagtggattggaatagatccatacatttggcggttaaaagcccatttgg

SEQ ID NO: 114497 - DNA, 1928 bp, Cannabis sativa
  modified_base (1860)..(1867): a, c, t, g, unknown or other
ctttcgagcataacactaatgactacaaatattacacttagtaatctttaggggtcaacacaaactaacaacactctgacccactaaatttcagggccagccctagtggatgaaccaatgtctgatctatttatagagtttttgagaaccaagcatgaaaaacacatcccacaagtttagtggttgttactagccatgtaagagtgagttaaggagcaaaaattcattggcaaagaagtaaaaaccgtttcctattgattgcataacattttgcaatgtttattccaaaaaggctctaggcaacatatcgcttggagctataccaaaaaatcctttgagatatgtcgctacacgtcaaaaaactccctaaaactattttaggcgacatgtcgctcagtgagtagcaacatatcgccggagagagtttttagaatcaattttgaagtttcaaaaacttcttcgagtcaaccttgatttcaaacattccaaaaatattcaactaatataaatctatttttaacacttagaaacttccaatttgaatgcataaatcccaagtgtaattatactcttaactacacatttctaatcaagattcatacgtattcataagttagaaatctaaatatttagatttataacttattataacttatatatatcatatattattcacttaataatatatagtataaccaaatttaatctcaataatatattatataaataatataacaatgctattatttcattttgtataataattagagtggagaccaaataatttgagtacgaccgacataatcagattgtgtgcgggagcagtgacgaattaacgtgaatgagattttatagaagtactatataatattaattaattaacttataattattaacgacaaaaaagcgataccataggcatagctaatattagtgaaaccattacctattaaattgtggtaactggtaaaatgtactcccttattacacacattaattaatttttatctatagcatcactatataaatcgatgctataataaaataaatacaaaccacttatctttgtcgtttaggttttttttcatacaaatttttttacttttttatatactattatttgataattttttaaattttttattggcactttaacatgttcaaagtcatattaatgtaatatataataattagttagtaattttttttatcttttgtgttttattttttttaattttttgtactattattgtcatgtagcacttaaggtcctcggtaccatactaatttacatacacaatattaaattaaaatttttaggagctgatattaaaatacaccaacgacgatatgtgttcttttgtggtgcttttacacctaaatgtgtactttaatatttttggtattaatatgtacatatatttataaataactgaaataaccgtgagtcgagcttctctctaatgacgattgtacatgtcttgacgatcttcggtatacaaacctgacagctctgataccaaaaatgtaacgccctgatacttagacgcgctacagtagtgattttccagttactgtgccacctttgctaaaagggttttttttgaaaatcgtgacaaattaaaacttttgatttaattgctaaactttataaactttcatacatttatttacaaaagccgcgatcctatatttaaacttttacagcattatcaaaatatatttataatatggtcgcacagagactacaaaatagaatctcaaatgtcccaagaccgaatgctccaggttgcgatgccatgacatgtacgatcactacccaagcttggagctcactcatgttcagccttcgcctttccnnnnnnnncacatggaagtagcaactgtgagtcaacagactcggcaagaaaagcatataacaaataata

SEQ ID NO: 114498 - DNA, 1949 bp, Cannabis sativa
ttgaagcagagcatctttgtgggcaggtatataccttgtggtggaaggaaattttggatccaattaaagtttgaaaggttaccaacactctgttttgcttgtggagtatggggacatgaaaagagagaatgtggtaaagaagttctaatggagaattctgaagatggactgcaagtacctaagtatggtcaatagttgaaagatgatgatccaacacctcattgttttagtgcattccatcaaaatcaagtagaaacgcaggaacaaaatgggaagcatcgggaaagagaaggggaaagattgacagagatagacaattcaaccagacattttatggtggcgccgccgacggaaattgatgatagagtggaggctccgatggtacataaccatgtaactgtaaagggtagtggagcagttcccattgataagtccccaatcgtgggagatgggaatataactgataatgtgctaggtggcattggtgagaataattgtcattttggtacattggatcaagtgggctaggctgggactattaatagtactgagcccaatacaatgggccagcttaccaaaattaataatactaaggtgaataaggcaactactgttgcgtttgaaacgcagctgggggggtcgacttctgaagggattacagagggaactgagagtgaagctaagaaaaggaaaagtggggggacgaatggtgatactgaagaggagaaggctcaaagggcacttcttaagggtaagcaaattcttaatgatcagggggcaagttctttctctgggggagtggatattatgtgtggctcgggcgagaaggggggcaagtcgagcatttctgggactaggaaaaaggtgtcaatcaagcatcgggcaaggactcatggcaaaggaagggcagtggctattagggataatgatggtgggatggctaaggacttggttggcttggatatgattggagtggagcagcaatttgtcttcggggcataggatatcaatggaacaaagaatgtagtgactaacactgaggtgagtatttctgagtttaatgatttctcatctcaaactttgaatgatgaagcggcgagtcttgctcaacaagaccgccgagagcaatgaaaatgataagttggaatgttcaaggaattgggaatccttggacattgcgtgctcttcagtcccacatttgggatcatgacccgagtattatttttctagcggaaagtaagttgacgagattacaggctcagaatttatgtgttactttgaattttgggcagaattattgggcagtggataaagttggtttaagtgggggattattacttttatggaaggaggagttgggtgtgagagtggattcaagttctcctgggcatttattagtaagggtggcgggcaaagatttttttccttggactcttacttgtttctatgggcacccggatgctacgcaaaggaagttctcatgggaactattaagaaacattaaggaagaagtagttgggctgtggctgtgtgtaagagattttaatgaggttgtgagtttatcggagaaggtggggggtcgaattagaagcgatgtggcgatggaggactttagaacggtgattgatgaatgtaggttgattgatttttgttcctctaaaacggatcttacatggtgtaatggacataaggtgaacccggttatggagagattagataggggactatgcaataaggaatggttgccactttttaatggcgctgatgtattggtgttggattggtgggaatcggatcatagaccgttggtagtagatatgccgatcgatttggatagggaacggtgtggtcaggttaaacggaaaagtcgcttccactttgaggaatgtgacagtcagtcgtcccgtgatccgtaaggggaaacactgggtaagctgtgcaatctcaca

SEQ ID NO: 114499 - DNA, 1481 bp, Cannabis sativa
agagagagagagagagagggtggtaggggcttagggattttgggctttcaacgagaccatttgttgcctccattttagccaaatgtcgtcggaaatggctcatcaatgtggagccgagagaaatgagaatactaatttccaacagtgataagttattgggtatacttaggattctcaatacttataaattgttaagatttttttttatttagtattgtccatgatttttcttcgttggctatagctactccgatggtttcttttcattggaggaaaaacctcttacctattctaacgattttcatacttgatgactcttattaactactataactatgataataatcttttttatataaaaaaaataaacaataaatatctatttaataatattattgagaagtaaaacttaaacaattgttacagaaaatatatataatacaaaattgataattaatatatatataaaaaagaccagatgtgtattaattaatcaattccaaaaaaaaaaacatttatcacataatattaaaaattaagctcactcactcactcactcatcatataattaatttttcatagcatagaaacaataagtgctagaaaagaagctagcataagatgtgaaaaggcagaataagctgatgaagtaggaaggttattattattattattattattggccttggaagggttgggataatgagatgggtctgtagtagtagtggtggcctggggtgagtaagctgaggttggtgcataagcttgattattctcatgaacgttaagttgaatcttcattcctccaagacagtgtaacttgttaccacacacaaagaacatgtctccaggtttattcaatgtgattgttgtgtttcctgctgagtatgctttcaaaacgtttgtcgtattgcaactctcataattttgttttgtcacttcacttacactgtgggttgatgagtactggaacactgcatatgaacatataattcattaatacatgtacttgaaattttgatcataactatataaccagctatatgtagtacctttttttggggtatggaactagctatagtattttatttgaatttgcattgataaccagttgaattattttttattgactattttacaaaatattatgtattaaataataatttatttattataaaataatgacattaaataaataagtctagtataactaatttaatattttacatatattgtactattttcaactatatgtattattattaatttgttcaattaaaaagaaaaaaaaaaggacaaatttaaacatatatatatataaaaattattagctatagtataatttgtttgggaatatgtgattaaagagtacatatttgtaaaatgaagagatattttgctaatttaatgggtaaatactattttggaccctctgttttattaaagttaccaattggaccctgtgttttgttaaatgacaa

SEQ ID NO: 114500 - DNA, 949 bp, Cannabis sativa
atgaaaaaaaatttaactaaaaaattatttcggatgctaaaataaataaggatgcatccatatatttattttaaatgagtgcattgtagaattttccaataatatatatagctgtatttttggatagaagttttaagccctgcccctaagcagttttgagagaggaaatatgtaaaacggataattgtaaaagctcattcaatgaataatactaaggggtttaacagtaatcaactcttgaagaaatatttttgggaaacttgtgctttatattctgactcggtgcttgaatgagacatcaatactatatttggatgattgcgcaaaaccaatgtgtcaaaggaaaagacagacgcacaatatctcactattgattttctattatcatcagggcaacatgtacaattaacatccgagtaggctgtaatgataagtttctcacaaaataatttaaggccacaattgaaccatgaggtatcataatatccttttgggatttataatatagtatagattagtacagtacttaattatgaccaaaatgccaattacttttaacatatatatatatttatatattcataccagttcttaatataaatctcatccagttcaacaatacgtctagtttactagttttaataaaattagatatgaatatatattgaatcttgttttgaatcagacaaattataaccatctcatcaaacaattagatcaaaatttcctctcgaagtcatggctccctatatagtggtatttcttgctcattcatatcttctcgagtaatggctcttttctaaatttttgatttcttgcttccattctttctcctgcacaccaccaaacttactgagacgcaagataactctattttagcccgttttccataagtttagcttttttctttatttttttttgaataattatcttttttaccccctgtact

SEQ ID NO: 114501 - DNA, 3093 bp, Cannabis sativa
  modified_base (3018)..(3022): a, c, t, g, unknown or other
ttgttatatttttatttctctcaaatgaacgtcacctaaagcataatttcctatattgttggaaggagcatagatgcccaaattttgctacaataattgagttgttgcaccatctatttatatatttaattaattttgggtaataacctatatttccatttcatgcattaagattaaaaagactctttctcacatcacatgccttgctctatccaacacacatacaaacaaacaaatcagctaacagctatcacggaagtcgagcaacatggtggggtccacattcttacccaccaataaccattgcatctatcaactgtgtcaaatgcgaccacgtgtccccaccacctttcaatcctgtcaaatcacttacagctgtttctgccacctcacccaatccccataatccacatacatacctacacatccatgcatacatacatacatacatagcaatagcatatccatagcataataatattaatttttttattaataattaataaatgaggaaaagaaaattgcgtagccactagccatttctcctctttgcatacagagctttataaaccacctctctagctctctcacaaacactactctatattaaaaaaatagtgggagaaaattgtggagagagaaatggaaggatcaccgtgtcaatctgatgtttgggtttcctctaatggcagttttgagcagaccccagatgagaaaagcttagcaaagcagcagctatggaggacgacgagttctgggtctagttcttggtctgggcatgatgacgacgaggaatggggtgggttgaagaatgaaagaaagaaaagcaagaagaaaaatcaggttttgcttgaagggtatgtggaggcggcggacgaggataatctgaagagggccaagagcttgacggacgatgaccttgatgagttgaaagggtgtttggatctgggatttgggttcagctacgaggagattcctgagctctgtaatactttgccagctctcgagctctgctattcaatgagccagaaatacatggacgagcaacagaaatcgcctgacaattctgtgtcggcggcttcggattcgtgctcttcggtctcgagtccgatcgctaattggaagatctctagtcctggtgagtcactcagatcaacgcctttctcatttcaacatttttctttttcttgtcttgtgacttgtttggctgtaaaattgattagaattttggttctaggatcttcatcaatgttttcatatgtatagatcaaaacatggaatggtttacttgttgtgattatcagaagtcctgaccctttttttttgtttccttgtctaggtgatcatccagaagatgttaaagccaggctcaaatattgggcacaagctgtggcttgtactgtcaaattgtgcagctgaattcagctacaaaagcgctgaaaagggaatccaaattcttttaaaaggcgaaaatggaaaaccaacgtgatctcagaagcctggaccttcacgtggagctttttcttcactaatgaaacttctcagctggaagagattttcatgtaaaattggataatgagaattctggtgatgatggctgatgggtctattttgagggagaaaaagaagaatgtttcaggtttgagattgatcaaaataagtctgaattcattcttatttagagtcctaactcctaagatgttatcttcgtaccattattgtattttgtattctttaaataataagaacaataatatgatgaataagcctttccgtcatctgaaaaaaaaaacaaaaactctatcatgtgtttcattttgttcatctttgtgttgagacaaatttccaaccttagttgatggttttatgcagcactgagaactattcaattagagcttcaacaactctactttgctcaacctcagtctgcattctgctgaggtaactaacctaactgttttggtgaacattgtgtttccctcaaacttaactttgatcttgacttgaacctttgatgaaagattatggtcatgatactaacaaacctttaactctctttgactagttatgattgtccattctgggctggtatctggaggcaggtggaaatggaatgagagggaagattgtgaactttgttttcttgattgatttcgaagtttgttgtgttcttcctctcaatttataacttgtattttagttgtttactataagggcaagtgtagagtgagatgggggagattgtgaacattattttcttgactggtttcaaatttggctgtcatcgtagatgattactggaggattctagttcttttttctcccttgtgattatgtgaagaattggatccgagaattgagacttgttaactctgacatacatgtgatgattgaactttgtataatcttggtttcttatgggaattggcagttgaactttttgtcatgaaattatataaataatcaaatttctattgttttgtcatggttaaacttgcttgttgagactatatcatgttaacttaggttaagtacttgtaggttaatgatatggatcattttatatgtttctgatactagggttctgaaaggagtcttaaagagtaaagggttacatacatgagaaagtaattgtgggtggatgcacaggatcttcattaggaaaatggggtcaaagcctctggaagtagtacaggattcagtttagttcattctagagaagaaaagagcctcaacttctcggtttaattcctttaaggaatggatgtgggattatatttttggatgttaaaattagaatggattgaattcttataatagaaatgtgagttgacgctgagttttcatgcgtaacagtctttgagattttgctagcaatttagttctaacttaaaagggttgtgctggaatcaaatatcaaagatgtattaccataaaaaagtattaattgaatattaaactttgtataaagttttctgaatgtttgcatgtttgacatcataactaaaaaactgtttnnnnnttttaaaaacagaaaattgtttttaaaaataatttggcttgtttggtcttgttttttaaaaacagttttca

SEQ ID NO: 114502 - DNA, 1068 bp, Cannabis sativa
  modified_base (56)..(74): a, c, t, g, unknown or other
ttatttcataatcgttttaaaagttcatatttagtgtgttaataaacatacttgtnnnnnnnnnnnnnnnnnnngtaaaataatttccaacatcttccccttaggctcattttcttcgggtagtgagaagggttgtagttgacagtatattgagtgattttttacttactcctagatttttcttttgccccgtggggtgtaggattttgaggtctctttgtccccttccttatgtcttctaaagccagtggcgtaactcctaagggagtgatcccgattaacattttgttatttgactcaaaaaatcaagtggaggatcgtttcatcgtatatcataggataagggaagcactcatagctcacttaaagcaactatgtgagttgagggaaactcaagcgaacccaagctgagataatctccctggagttgaatggtccctcgacctttattgatgtcttactgtagttagaacaacttcggtcctcgcactggattcgcaaagtgagggtgggggccttataaaggtctatgcctttgttgccagtcatttctccaacgtctctggtgaaggaacatccaggctttgatgttggttttccttattcctccctccattgcctagagtctttcacgaaatccttccccaacctacctttgtctcgatgcaatcttctaaagttcctggtgtttccattccttgttcactccataaatgcccgacatgtagaataaaaattttgtagtgttatgcttgtcctaatccttgtgtttgttgtggagatatgtcttcgaggactaagaggaaatcactgacgcttccagtagtggatcttgacgtttcatttttttaggataatatttaattttaatagattattattatttctttgatattttgaggtttaaattcaaaattttattattttaattttaaattatggtcagattttaaaattttgttaatttgtaatattatatattatttaattataaagttggatattttaatattggctatattttaaattaacagatagccttatcctttaatttgaaatattatatta

SEQ ID NO: 114503 - DNA, 6871 bp, Cannabis sativa
  modified_base (6632)..(6638): a, c, t, g, unknown or other
  modified_base (6810)..(6810): a, c, t, g, unknown or other
aacacccaaaaatggatggaaagggctaagtgctaacagaatatcagtttgggaggttttaccgccaaaattttaaaattgggggttagtttcgaaaatttaaccacttaaaaaggttatgccgtaaattactctttatttgttgaagttatagtaggcttaccctggaactttaagatttagtatgtcatgaaatgtgtcttccattcaagtgtgtgtatcactagtcatcagtacgaaagattttgatgtagcaggtgtcagtgtaatagctatattacaaggcagcagcacatgcaccatactcactcaaaattacaagtacaacacattcactataaattgagttttcgtcatcgatgaaatagtgaaaacgcttatgatgacttggttattataaattataactacaatgcaagtggtttagttcatgaatgacaaaaggacaaagcaaagaggattattgatgatggaacaattcaatatcaaaacttaacatatagaagaaaatggctaaaattattataaaaattaagtccgaataaattaaaacataatgattattatgtcaacagccactactattatttgatttttgtgatcatgaaaaattaaataagtgactctggagctcaactttcctgatcaagtctaatcttatctctatttttttttttctttttgttgctgttgcatgcggtcgttttggattggaatctaaaattgagcaaaggacgggctacatgaaacacaccgaatttggcttcttcatgcatcatgatccaactccactcgtccagtgcgcgccagtcaataagtgtgcgtggctctttagccaataaaacatgtaacgaaaacgacttagctctccgcagccagccactgcatgtgtcaatcaatgagaaatggtaagagtcacactttaaggtgcaaagcaccactatcaatgtgctagctaacaaaaaatgttactaaaatagattaggatgtaagggtatatctgtaatttcaacaaccgaaatggatagtgggagacattggaattcgaacatggaacaggagctcttattctttctccgtgttttatgtgatgtctatttggctcactcactttttctttaccttgctttgagaatctgggtcccattctatttgatcttatacacaaaataactaaaatacccccaaaagctttagatatattaagaaagagagaaaaagaaaagaacgttcatcttcatattatgtttgcaatcgtaatcattgattgtgaaacaggttcatggtttctcggccttttacatagaatgaaatcctttttcctcatttcaagctcatctaataatgataagctggtttcacatacacatatatttgtatataattaattttctagaactttatgtaagaccgatatatataggtataaacatatggttattgtattgactttgacttgactcatcatctcaagtgatcattcatggcatggcttaaaaagtaaaagaaatgaaataattaataatctcaccaacgtcgatgaattatgtaaaatgtaatcaattattttcattcgtaatgaaatatccattctctcactcaaaaaagaaaaaaaaggcaagactccatgtgtgtgtagttttagttttctaaacaaataaaaacaaaggaataactccaacaaaacggcaaacaaacctacatcgcatgtgtggcttctaaatctgctgtcaaaagccataacacaccatatttcatcttatcatctctcgtctttattaattaatttgtgggccaaatgctcacttatcaaccttaacagtttttgcaccatttgatcaaacaaattttcatcataatggatccactcaactacaaacatattagaagtcaacatatatctcttaagagtaaaacatacaaaatttaactaatccgaaaattttctgtgataacataacatattaataataattacaatatatactgaatatgtctatatatatttacttaaaaattatttattaatcaatgatgatgtatataagataaactgtattggtcaaaattctaaaagcaaggcatgtaccctttttctgtgtacacaacaaaacataatagtaaatccaaattaaagaataaataaataaaataataaatggaataattaagtcaggtaagccccaccataccacaccacacccaccctcttctttcgataatttgcttccttatttctcatcttggatccctctcccttcacttatttatataccaaaaataataataataataataacaaaaaaagccttatttctcctcctttattatttctctctttcttctctagtactaaagaagagaagaactacacctgcttttgctctgctctattctgctctctctgtctctaaatatttatctttaatttctctcttttgctcttttttttttttttttttttcatggcactcctaacttttacaccagagcccaccgactccaagaaacctactcaatcaaaacgaaagaagagaccaaagcagcaacagcaacagcagcagcagaaaccgccgtcttcatgggaccaaatcaagaaccttctcacttgcaaacagatcgaaggttctcgagttcacgacccttccaaaaacaacaccaccacagttggctactccaagctcggctcttcatgtagctctatttgtagctttagagacgttgttcatggcaacactagggttgttcacagagccgacaactcgcccgaaaatagcacggcaggacaggaagccggtttactgagtcgaaagggagcgaacggttcctcaactcggtccactacttctgggtcggcgagatccaacggtggcgctgggtacacgtcatcctctagaggaatgcaattcaggaagctctctggttgttatgagtgtcatatgatcgttgacccaagcaggtactaataatcatatatatcattaataataataacaatattattactgttagaggaatataatcttttccatatctggtactttatatattaatttacaattaatgtggaattaaatcattgacataattatatatatttatatctaggtatccgattattccaaggagtactatttctgcttgttctcaatgtggagaggtttttcctaagattgagagtcttgagcttcaccaggcagttcgccatgccggtacaatttttttttttattattcttattcttacatgcaatgcaattaattcatatatctacacagattaaaacattataattaagaaaccattaattaattaatacatattggaattatacatagaaatggaatttaaattctctcattaatgatattcacctataagtttatatatctccctcctaattcgtgctagatgaaaaacattcatgatatagttttgaatttataaaccatggcccagatcaataaatatagaaagagaaaaaagaatcacaaaaaaacaagaaaaataaaaaacgagagttatattaataaaaggattttcaataacactgccaatcacttatttttcttctatacgagttatagtacagtacttttgtttccgtaaatcttgcatgaaaaataaaataaaacaaatcactgtattattattgaggtagtaactcctgtcatatccaaaaatcaccataagtgaataagtaaactcactgtgttattattccactcgtaactcgtaaggatatataactatatatacttacaactacagctgtctctgcaatgcaaaataaatgaccctaacctaacaatacagtgtatggagattattatttattcattttaaaatattgaaaatgtttatcaatgtcatagtaataaccaatttttgattggacaacaagtccctaccgacaaaacaacaataaattaattaattcttgtttaattctattttataaattttgtatgtacagtatcggagctgggtccggaagattcgggtcggaatatagtagagataatattcaaatcgagctggctgaagaaagacaacccaatttttcagatcgaacggatcttaaaggtccacaacacgcagagaacgatccaacggttcgaggactgccgtgacgcggtcaagacacgtgcgctgaacagcacacgaaagaacccgaggtgtgcggccgatgggaatgagcttctgcgattccactgcactacgctcacgtgctcattgggggcacgtggagcttccaacctttgcgggccagtgcctggttgcggcgtgtgcaccatcatccggcacgggttccagggcaataagtccggtggtatcataataataataataataacagcacaactacaactactcagactcagtgcagcgagtcgagcaaaggagtgttgaccacagcaagcagtggtagggcccacgattcattgaggtgtacggatgggcgtagagcaatgcttgtgtgccgtgtgattgcgggaagggtgaaacgctatgcggacgatgcgccgacagaggaggatagcgtgtctctcggctcctcttacgattccgttgccggttacgctggtgtgtactcaaatctcgaggagttgattgtttttaatccaagggctatccttccttgtttcgtagtcatctacaaagctctcgattccccgtaaaacgtcgtcgtcctcgtttatttattaattatataaataaatttttagttctcttttttttctttatttatttaattcgaatagtagcttcgcgacccgtacctcctcccactgtacataaatctgcttccattccatggatgtggtgttcactctctctctatataaaatgctgtgacgtgacgactgcgttttttgaccgttggatgatggaggccttaattgtaatcaacggtcaaggaactgcagtcgtgacaatataattagcaatattgtctgtcgtctctatctatctatatatatatattgatattaattaataagagtagtttattaattgcagaagttagcatatctttgttgtatgatattgtttattaatgaatttcagctcaactgcttttgcaattggatgcgagttactttactgcttacttttatttaaagaatattcattagttgaagatattgatagggtagctaattcgattacagagacattaaaaaaaaaattgagatgtatagaggattgctataagacactagtctctagtacgtactaactaatgatcttgtataaaagtttgtacattaaattaaatgaaatttaatacctaatcgtactaataagtaataactatattagagggtagaagctggtaggcagcacctatactcatttattaattttagttgaaggtccaaaaatagttactgattgggttaaacaggtaagtattttttatttaaggcgttgttaattggccagttggtacgggcttggctttaaatcacgcccgagattggtcagaaccaggcatgtacgggaggccacatgacatgagccacacctactactatcaagactattcaatattgaccagctacctcaatttatatgttaattttcataagtattttttaggattattcttttcttttcttttatataaagttggggtttagtttacaacaccaaactactctaaaatggggtgacagacatcacaataagattaagtagagtttttaaatgcactcaagaacttaagctaaaattatgagggtccacgtgagataatctttgaaaccacatggatataaggaagaagggaaagaaaacaaaaaaacaaaggcgtggtatggagtgaccaaaacttaaagaaaaaactcatacaaaaccaaaaacaaatgaagtctacctaagaatatgaataatatagttagttggagaaataattaataaattataattggctacacatgcgtaagcggatgcgcactcatggaggattctcatcgtttctagagtttttttacagttgatatattcatgtaatacaatgtacagtatatataaataaaattcaaaccatatatatgatctgatgagagagaagtggttgtcgtcccaaaatcatataatatataattaactagtgggattggaatctactgttgagattactgaaaatcttacacgcaaaactatatatagtaataaatacggtacggggggtccatactatatatgtatttatatatatactatataattagttctatatattactagcatttcctaattagttactttcattcataattaagtttatgtttggaagctggatgggaatgaaaaaatgagaaaaatcatattgcaacaagtaataggagtcagtgcagaccattttggtggctgatttataaatcacattaaatatatctataattaaatgtgcaacattattaattagcaacttaacatattttcttcataaaaattgttttttctttgaaaaaaaaattacataatacactaaaaattttaaaaaataatttcaaaaatatatcacacagaaatttttttatttttactctatgaatatttttatttataaaaatacctattcagtgaaaataatgaactattttttagttgttttatannnnnnntatagttgtattatagttgtcatgaattttttttttgtttcttttatagttgattaatagttatcgtggggttcattttacgttattttttagtttttttttactgaataacggtgtcctttctagctgctaaagggcattagcggcggacttcggccgctattggtccgcngctaatgcttggccgctattaatagtattagcggccaaaaaaagggtccgccgctaatact

SEQ ID NO: 114504 - DNA, 1550 bp, Cannabis sativa
gaaaataacattttgttgttctcataattcttgtttttgaaatcttgtaatgtgaaaattgttttcaaataataagactaaacatgcctaactattttcattaatagttttttatttattttttaaaaaaataattttttatttatgatgccaaacatacatttattttctcgatcatgttttttaatatattaatattgaaccatatgtagtaaaaatatcgtagaatatataacctactgattgaaaaattggatgaaatcattttgtttaatactgtatatcgaacagatataagaggtttcttctccccgattaagaatgtttgtttgtttgtgccaaattctcacttggatctgtatttatttatttttattatttgcttggtagagagttggtataaactagagcttattcattcatgaaattattgggaataaagagatattgggtgtacatgtttatatttggtcccatatagtaaagtcatatattatatcacacacgtgactttcgtttttgtattgagtaatgtgtgtgttgtgcatatatatatatatatttttaacatacatagacatattattgtgattattggttgataaggtaatcaaggtaaggtggtatataaaacaagtgttcttttaattgccaagagattctaacatttattttttcctatcagaaggcatcttccacaaatttattatttttgtgcctataagaaatataaacattattaatgtgatcataacattataatatgcaagaatgaaagcctagtaacattaatctttgtttacattattgtttaattactttgactatatttgctttattataggcataacataatgaatcaaaatgaaattacagatgaggacttgacctactattgaagcacataggcaataagtaggtaaaaacaaataccaccactcttgaagtaaggaaaaacaaggaaagaaatacaatctcatgtcaaacttagaaaatggaaaaataataaaaatctaaaaaaattctagtacatcaactaaagagtgtatctattaagaaagttctagttatttaaaattaattgtaattttttagaaaattttaaataacttataatgccgaataaaataatattcaaatattttactgcacgcgtcattgtttttcttattagcgtaatcaatagcagacccaaaatttaagctacttggggtataggttttttttttttcttttttttttgaagtaacactttttgtgcttattttaattgtatgaatttatggttatgtagtcactacaaaaaatatctacttttagtgacaattttttaattacaatataaattttttgtgactaaatttaacttttaatcatagcaaaaatttacttgtaactaaaatatagtatttagatacacattgtcactataatttggttttattcacaacaaataatatgactaaaaatacatttagtcacaacatatataagaaaaataatttataattaattactatttttttacttttattcacaaattttattgt

SEQ ID NO: 114505 - DNA, 8604 bp, Cannabis sativa
  modified_base (6998)..(6998): a, c, t, g, unknown or other
  modified_base (7574)..(7579): a, c, t, g, unknown or other
accactcggccatcctgacttgttttgttgtatgtcaacgtattttataataactcatttatatcttttttattattatgagcaaacaattcatcattgtgttttacattatctcttcttcttatagagtttttttttttttttgggggaattcttcttatagagttgaatttacaaagtagataaaatgacattgtaaaagtaatgtttgtctaatgatgaaatagaaatttaagattacaaaattttgttaatttttttttatatatgtttttcttattaaataaattatgcattttatgtttataaatagtttaagattaaattattaatgagtaattctgtgagatttgactattattaaggaggtgaaaaatctacttgttttttctatgtagttgttttgtctcatttatttattatgcaacattatatttaatatttctagttcactccttagtagtctatgaaaataatttttaaatccataaaattagagaggtccaaataaaatcaaacatataaaatttctatagaagaaaatacatgaattatgggatttttttagtttttacttttttatggcatatctaaataattcttaaatttatgaacattttgaattgtttacattattatggacttttttatgttatatatgtaaaaaagaagattgattttttatattttaagtttctctttcacataaaaagaaaagtggaaggatgatgtggcagaaaacatgtaaagttggatccgatctcccctgataagctccgacggttcagaaacggcaggtattgctggaacaaatgaaatctctcagtgtaattcttctgcgctagcggcgaccggtgagaaggaaaagcaaaaggagaaggcaagggtgagcaagacgtcgcttatactatggcacgcccatcaaaatgatattgttgtggtccgtaaactcctcgaggaggatctgtccctggttcaagccaaggactatgacagccgtactccactccacgtggcatttatcagttgacttcgagatgattctgttgagtgttgccatccttccagccagagactgtacttcctttggttttgttggcgaaggcatcttaagcaatatttttattttgttggggttagcttcaaatcctctcgcattcacaatgaaaccgaggaacttttccgaagacaccccaaaagaacacttcttggggttcaatttcatatcatactttttcaaaatggcaaagcattttgcgagatcctttgtatggttctctcttttaacagacttcaccaatatatcatctacataaactttcatgtttttccctatctggttctcgaacataccattcatgaggtgttagtatgttgcttcggcattctttaacctgaatggcatgactttatagcaataaagtcccatattggtgacaaaacttgtatgctcctgatctgggacatgtattgtaatctggttataaccagaatatgtatccgtgaaagtcatcagtcatgtcctagtgttgcatctaccaattggtcgatccttggtaatggaaagcagtctttagggcatgctttattcaagtcagagaagtctatgcaatctccatgtctcatttggtttagggacaagaactggattagatatccatgaggggtaaaatgcttctcttatgaagttattggtcaactatttgtcaacctcttctcttaatgcattctatctcttgggatctaaaggtctttatttctgacgctttgagagataagttgggtcgatgttgaggtgatggcatatcacattcgggttgatccagaccatatctgaatggctccaagagaactgatcttggtttgccttaagaaaagtgattagtttttattttagttcttcctccaaacctttcccaatgctgacacggtttgtaggattatttggatctaaattcacctcttctaattttcgatgggcctgagttggtaattttcatcatggattttaggatccagatcttccaactcttcctcgttttcttctatcaaaattaccatcaattgaaggcttgcccttctatttttcaatttcatactatagcattgtcgagctaatagttggtcgcctttaacagcccctactcctgaatgagtggagaacttcagagacaagtgtttgatcgagctaattgcccccattcttgttaatgtcaagcaacccattagtatgttgtaagcagaagggatgtcaacaactagaaactttggatctgacttgtagataatggtgattctcccatggtgagtgggagttcaattgtgctcaaacttgtgacactatcgtcggtgaaccttgcttcttctaaacccatctttttaaaagtctatttgtagagaatattaatagaactctcgttatccactagaaccctctttttccttttattagcgagctgaactgttattacgagaggatctgtgtggggaaaatgcacatgtgatgcgtcttcattagtaaagacaatgggaggttcatcaaacttggcccattttaggggttctggagcaaaagtcgatttctcgctcttcacttcatttatatacctttttttgagcattattgctgttttcggcgaggtgtggccctctaaatatgactaggatatcctcaccctcaactgggataggttgtaatctttggttattctagttgttgggtagattttgtttttttcctttaggtcttacatattgccttaagtaacctcgcagatgagattttcaatcttgtctttcaactggcggcattgttcagtggtatgactgatgtctctatggaaacggtaatacttgttaggatctcgcttatttcttgcatgtctcattggattgggtctacgaaatgcgacttgattttcatttgcgagatagatatttttacgagttttatttaattttgtatacaccgagtatattggaatatatttctcgtgcttcttttgtttcttcttatcttttgatgaatctcttaactcatcctttctcttggcatttaagccattgggatttgaatttccagcttcagttgtcacagtacttgttgttgcagtacttgtgatgggtttgtctcccaagctaaattttagcagcttcatttcatttcgcgcttcttccttcagcatgaagatttgtgctctttcattgaatttattaatgtttctaacatgatggccttgcaaatcatcccataattcacctcctacggttgacaagtcagttgttatcccagcttgaagagctgttaactgaatactatcattcaaatttctgactttagctgtcgtattactaaaacgacttaagtatgcttttagggattcccttggttgttgcttaatattggttaatgtagacgcttctagtcttcgatcccttgtagcctggaactgctttttaaagtcatttgatagttgttactagaaagttatggaatggttggtgaatttatcaaaccaacttcttgctactcttgttagagaagttggtaataaaatgcatcgtaagttatttgaaatattgcttgctcgcattatggatttgaagttgttaaggtgtgccacaagatcagttgtcccatcgtattaagcgacatgtggatttttgaatccttgaggaaaatgagaattcaaaatatcatgatgaaatggttttgtttcctcgttttgaatcgtatcttgataatttcccatactcttcatcctggtattgcctgaatttatcttccaattgtatcactcacaattggattggatccacaggctgttgcctgcctgtattctgatttaactattgtgaagatctagtgcattacaattttaaatgcttgcatagaccttattctcgagttacttccaaattagtagctttgagagttactaatactctcatggtcatctcaataataacgtcgcaatccaccttcctctcatgttcgcctgtcatgggcatgagtttgagttgatctgttatgttcgcgggtccttgatcttgatccacttggatctatactcgagtcagtctcttatggctcttcttgcattggccttctccttcgaaatagatttaatacacgactcctactcaagtaagtgtgtgtactatctctatcattgcgattaggcctttgttggtggcttgggggtcgacctatcccaggccaatttcttacatttctcgcatcatgtcgtggaatttcttcgttttcaggtcgtgtttacctggcatctatattcatgtgagaagactctagcacctcaagttgtacattcccttggtttgtaaatccatgggaagttcctggatcgtcatgtcgagtctcttgatttcttgtgtttctaggattttatgggtttccaccatcgattcgattgggatatctcttacattctcaagttgttcaacctgagtgcctgagggattcccttggttgttcccttgtctcctagttttagagcctcggggcctcccctgtagtcgtctcgcagatggatcaggttaattttgaggggcctcttgttatgcaacccttgttgctgccgcttcgtgttctcatttggcgttcctctgatttgattcagccaggcaatgtcaaagttgcctatttttcagttccactagtggaacatagctgattggattataagcatcctcactttgcctttttgggatttgttccccagtttgattagagtctccaccgtttcttccagaacgggaagtttcagcattgttcattctttgcgaagctgctcctttactaaacgatggattgtctcttctggctagttctcttcgttacatggagtatcgtcttccatgagtgtgttttaaggttgtattttttaggagggtatttttttgagttttactgcaaatactcttaatgaaagcaccaaactgttaatgcagatttttattaactaaattgttagcctattttgtaataaataaactacaaaattaattatataaaaaaataataaataacaagaaggtcatatgtggttttgaagttaaatctttatagtccacgagtccatcttattaaggataaatatgtttgtatacagaatacaatgatactgtttttaaggaataaacaatagcaatatgatctgttttctctcaagattggccgcccctttttctctaggttctatccctatttatatatgtatagggtgacagttattcctttgagatttaatcatttgtaactgttcatgaaacgtgaacattcctcatgtttcatctttgtgcacgtggaataatagtaaataactgtccaaccgctctttatctttatccatagacggttatgttgactaaactaaattgttatcgtcgtttgaatcttattcttcttagccatctttgtagaaaaatattaagtgttgagttacgatacatctcacagtcttcctctgtcgttgagagaggtattagtgaggtcgttacttcaatgcgtccagagcgaggtgagtgaatgctaaaattatattccttccttgaacatactcacaagtatatggatcattgagccgcaagctcatactcatgagtatgtggatcagtgagttacaaacttattgtctactcattctgaacaactttcattgtgtattttatttatctcgagatggacctatttagcttgctaattcatcagtcaatagttattactcacgtctcgctattgcctatatagcgacgagtttgagtatttctattaactgtatttctcgaggcaaattatttaagtacatttaataatgtgtggtttgagctgattcatattctaaatttgatacacgtgtcagtttcttattgatactcgaaatataagtataacatccactaagtagaataaaagccaatcccatggctaaaatatccaaaatgtcttttcttagctactaagctacttaaactacaaaattgtgacaaaaaatgaccaaatcttcgcattccatttttattaggcataaaatatgaaaaatatcaaaattcatatataacatatatgacacacctaaattttaataaaaataaattatatctcaaatgcctattgttgacaattggccttattttccgacaatgcacatatataacataaattgaaattaaatcactaatgagctgctaatttctatgtctaaatatgcagtcattagaataggaaatcacaatataccataattcttattcttgtattgtcacacgttgatctctctccttccattgaagcaaggtagaaagggataatcttttgattgttgaaaaagttgtgcttcaaggaaaatacaaactaacaagattataattttatgacaaataatacaaaggacaaaatatggattaaataatattacaatactaaacaaaatatacacataaaatagagaaaaaatagatgaagagaaggttaatgtttgagccttttttgaagtatgattggtatcagtatttatttcatttattattgattgtatatgttcttgtatatagtaattttatattaaatattttttttacataattatttaaattattttaattatgattaatatggttttttagtttttatggctaatgtgccttttgattttgtaaagcaatatgtctaattttgtaagtggcttgttttttaattttgtaaggccaatgtggctagtttttttgtatgaccaatgtggatagttttcttttgtacggtcaatatggctagttttttattttgtaaggccaatatggctagttttggttttgtaagtatggctagtttatagttttgtaaggccagtatggctagttttaattttgtaaggcagtatgactagttttagtttagtaaggctaacatggctaattttttggttttgtaaagttattatatggctagttttaattttgtaagatcagtttggtctaanataacacatcaaatgtagtgtagtcaccgtcagcaatagagatgagaatagataagttctagtatttacatcagagaattctatgtgactatttatataaaatttcaccaaacaaaggttacacttttgatttacaactctttatatttctctctgtttttctctctttggatactaacaaaaagctctcttttttttacatgaacatctctaggaggagctcacaaggagatacaactctcagccaaaaaggctctctttttctgtgttaaatctgttgttgttctctctggctgtgactttttatttctgcttgtatctcttgttttgtatctgagaaaaatacctccttttatactgatctgtgattctgatctagggcagagccctagagtaatatttgtaactgattttgtaactgcttcagttgtaactgtctttatgttctttagtcttgatcttagttgtatctgatgtaagggtatatttgtcaaaccctgtgagtagtgttatacaacttaaggataaataagtgaatctgaaccaacaatttgtaagggaaatttcatattttannnnnnatttattatgtattaatttttttctctttattttgtaggtgttctattagtgggttggaagtgacaactctcagttttgaggttttcttttctgatattaaagttttattgtctagttctcctagggtatctctgcatgcccttaggatagacaatgaactgttttaaatggaagaaaattttcatctgattgtgtaactttattacctttgttattttaacatgtatcagtttttcttaaaaaaaaaaaaaaacacacacaaatgtaaatagcatatatatacataaaaatgtgaaaataatctcaacatcacaaccaagggaaatcaccaaagcttgaacatcaccccaaatgtagtggtgttcgcggtacgggtggtgcgatttttgattatttttttaaacttacccgcacatgtattttttttttaattttccaaaccgcacccacatcatgaaattaaaaaactgtagaaatcacactgcataaaatagtgcggttgcggtgcggtttctgtggtgtggattataactaaataattaaactatcacaaatacagtaaagttagagcaacacctgtcaaaaatataataaggtttgaaaataaatatgaaaaaaaaaagtttcaagtttcaacaatacaataattagtgggctttgggctaaggtcttcacatattggacctaaataaatataaaattagtatttttattaaatgtggtgcggtgtggtttgaaccgcatattaacaattcaaaaccgcaaaccgcgcgatttagaaaaaattcaaaccgcaactgcactgcaaagaatttcaaatttcatctttttgcggtgcgggcggtttaagtgatttaatgaacaaccctacccaaatgtaattatataaataaatacatatttgtaaagaccgcctatgattaatactctgaaatgataaataattaaggtttatgtatgaaattaattaataattatgaaaggtatattttggaaataaatttaatatcatttatgctattta

SEQ ID NO: 114506 - DNA, 2496 bp, Cannabis sativa
tttgcgggttcactagttcgggttcgggcgggttgctcgggttcgggtcaaacccgctcaaaatgttcagccctaattttgagtgttttagtattgttggtgtggtatgattttgttttattttgttttgttgttggttcttctctgttcttcgatggctcgccatcaagtcccttttagtggttggaaataacaagttttctgttactgaaaggggttgttagtagtgcagttactcaccttgcacaataattgagtgcttaaggtacgaggttgaatgaacctactgcaatgattatcattattgtgtcttctgagcggtagatgaaactaaatatagatgttcataaggttaattgtaatgctacaatctttttaatttgattttatttttagtttttttttttttttgccaaatgatctaagaagtaggctgttgattatttggctcgtttttctaattctaattctggtcgggtctccaacaagagagatatcccgattgaattgcagactattattttaggcgattgtcattaataaaattgcatgatttattaaaaaaaactacttaaataccaattattttttatttgtagcagtaattttaaaatttttgctaatcaatacatttgtaccattaaaataaatgatgtctacattacacctataaatatacaaggacttcgatctactttataaaaaatcatttttttttttgaattctaatgaggagctagtatgcaacatgactgttttgtatttgttttcggaagagaataaggggctagttctggtttctttggctaatgaggctcttgagataggtcttcgaacatgtgagatttttttcgtctctgttaatgcagctggtggtttggatcatttaaggcggtgtaaatgtgtcacgatattttcgaagctaatttaagcaacaatgcaaatttacaaatagctatcaatctttgtaatcagagagagaatgagactattattgcttgagtataaatcgtgatagtgtaaggttcagagagaaaccttttctcgtaatctcttagagtttgtgaagattcttgtaaccttgtaaacactgatatcaataaagatatgattgttattgttccaaccgagatgtaaagtattgcacatgactcgaactcgttaaatctggtgttaatcttttctgttttactacttaattcattacttgaattttgagatctcttgatttattattttttggttgtgttgcgtgtttattagtccaatatactgaatcgtaagtcattaattgttttgatttcgcaccacactaaaatataaatttttataccaaaaaaaattgaatggtgtggtattatattttagttggatcttcaaataatagaaaggtgcaatgtgaacctagacggataggtggtctgatataagaaaaggaataatatctcaattttgaatattgccagttgtccttttggtttttgtgcattttccaatatgtttcttttacaaagttcatcttagttacacttatatatgtatatataaaagcattatatatcaaaggataatttggagaaccatatatatttgtgtggaatggaatatatataatgtataggaaaaaaggacacgtaaacaatatttgatgatgagtagatcctatcctatatataatatggccataaactgatgattcatttgacctgaaattatgtccaggttcaatcttttgtccccttcttctgaggctgtaaattctttcggaattggctactataaatatttgtggtaattggcccatgttgtttcaaacaagaaaaaagaaaaactatagaaatgtgtcagttgttaactagagttccctcgaacacttcactgccaacttttataaaatcctacattgtaataatgttgatacataagcactgaagtgtttgggggaactctggttgccacttgactttgattaacattaacactacactactactactactacactacacttctttccataatcatcaaattaattattcactgcaatatttaattattgatgatgttcaacatatatagttataatataatatctctttagatatatataattcacagtgttttggtcatcttctcataatattgtatatattgtttgattaaatttagccatgctatattagttggtgttgcatgcaattaataattatctaagctcctttcaaaaaaaaaaaaaaaaaaataataattatctaagcttattattattattattattactattactcctaaaacttaactcctctctactctctagatatcttatgctcgcaagtcccatgtctagctacacatattacaatttacaacaaaaaaagtttaggggctgataacacctaaatgttagacatttacatgtataaactgaaatatatatgtttaagtataaagtgcggaattaatcaaacatatatgcactataatttaaggatcgaa

SEQ ID NO: 114507 - DNA, 1726 bp, Cannabis sativa
aaaaaaaacaaaaaaaaactttttgaagcttcaataagtaaaaaacagtaaaaaagaaaaaaaaaaattaagaaaagaattaacatatttggtaaaaaaatcaagataagttcaaacgaaattatttattatttttttctttttaatggcaaaatcaactttttatataactatttagctaggttatagaggttgttgtgaggtttcattcattctatcattatttatattgaaatcatttatttaattagagagattgattgatgcttatttggttttaattaatatccacataaagcttatctatactcatatatagtacttactaattgggtaatattcaaataaaaaataaacaacaaatcataaatgtctaaattattagcaagtatactttgttctattatgatcactaaactatatgttatgttaaatcttgtctctctttttatatttcaacatcaagagaattaaaacatgtatttaattatctttataacataattaaattaataaaaaatttattttcttaatttaaaagtcattttagaagaagttataagatttgtagtttttcttaaatggacttttaagaagttattttaaaatttaaaataattttcataattcttaatttactcacaaaagtattttttttatgatatccaaacattttgaaaagtatttttcattataaaaagatcttcatataatagtaattaaaacggtaaaaataagacaaatcttatatatacttatcaacgtatataactttataataaaaggttctatatttactcatgtgacaaaaataatcctccgttacattcctcctacttcatagctttaaacggttctccatctccttgagtctccaagctcactacaagaaatgtcacttttaccagtatagttcgttactacaagaaatgtaacttttaccagggcatttacgcgttaagaaaagtcatttttgccagcgctttttattttgtgctggcaaaagttctaataccaacggtgatttgccaagacatcagaagtaaattctattttaccagcacaataccaaacttttgtcagcacaaaaatgtgagcaaaagtgacatttcttgtagtagctaatgcttcaataacttttattttttgtgttggaatggaagaagaggatgtaaaccaggtattaaataatgcttctagttttgtaagaaagtcattgccatttcattatcttgcttccttaaacgatcatctactgctgatttggaaattcttgttgagaatccaaagaattagaatgtggagcactcatatgcaggaggaattattctaataaactcgattcttatggatattatgatctttccaaagctaatactgaaaagaatagagcaaatgtgtagagcttatttgtggagtggcttagttgatcataagttcaggttgtattttttgggacaaaatttgcaagccaaaaaaagaggttcgggatctcggtgcattggtaattagaattttaaatctattggaaaatatgtgtgggctataactttgaaaatgatagtctttggattaaatgggtacaaaagatatatcttcatgagcatgagtggttaatatatgatggccaccaaggaagtaactcttagagtttattgttagataaattaacaattaacccaaaatcaatttgtatataacatagaacacaataataagatataat

SEQ ID NO: 114508 - DNA, 1915 bp, Cannabis sativa
atttccttaattagaaaataatttccatatataaaatattctaatagtaataaccaaactgcatttcacaataattatgcttattttttcattttttttttatggttttcattttttatagcttatccttaattgtttaaggtagattttcgatatggtcaataggtatatgagaaatgtttcattttatactcatgccttctacaaataacttttcagatccaacagataaatgtttaaagtcttcatgacattataatatggattgtttaaccatctttattcacattaattattttttttattaaattgtgtggtaatagaattttatttattattaatttgtaggtcaaatttgaggagagccaactgttacagagattttgccgataagtttatttaaatacaatttgtttgagaattgttatcttctaactattgagaatttcttttattagtatttaatatcatagctagctagaggattaattttttttttatcttattttgttttgtaaatattttggggaccattaatcttgatatgttaatgagttagtgtgtagtattcactgatacaagctaacactctagctcttttggtgtgttgtttgatgactttataactttactatctaaattatcgggatagttttgtcatgatgctcgctgactttaaagcatgctcttgggtttatccaagtgcaaggaggtttatatactgtttgcgaatgtgtgcatcgtaaattcatgagtgattctaatcattacgttaaaaaaacacacataattcttcttaaaaaaacacataattaaagatagatatatatagagagatctaaaccgatcatcatcttcaaacaaacaaattaacaagaaaacattaaacccaaacgctaataaaacataaataaaacaacaaatacacatacacatataaaaaagaaagaaaccctagctagctagtagtcatcatcatcatcatcatcatcatcctccacatcatcatcatcatcatcatcatcctcctcatcatcatcttcatagtaactaatatgcttgtttttagagccaaaatcataataatgatgattagtagtagtaggcttgttaggataagcaacatgcttgaacttaacttgagtctcatactcatgagtgtagccttcatccacatccttgtattttcttatttgactatactttttctcttctttgtatcccactagacctcttctcttgtccacaaactctcctgagctataagtttttttgtcaaaggtggttactttatttccttggtagaattgtatagtgtccttgctaactttttgtatttcagtcgactcgatcatttgcctcccggtcgctcccctgttcgattggacttggtttgatggcactagctgtgcgtaccctatgtagtgtggtgtttgcttggacgccattgatggaagttacaaactctaactctctctctattttgcacttttctatgtgttttttattttgttaagtgttgtggcacttgcactagggttagggagtggtatatatagagggcatgagaaagttgtgttatgttaatttttatgaggaaagaggaatctttaacttgggaaaagtcatgattatgtgatattgagggaaggataagggtaatatagtatttatattattatgttataataaattgagtaaaacgtctttcatgcatgcaagttaattatgtagacatttgagggaagaataagggtaaaaaggtaattataactatgacatttatttgagaggtaaaatagtaattgtgtcaatgtttggctctgaaatttaaggttacaaacaagactcgtgaaagtaggggtgggcatccgatccaatccaacttttttttctcatccgatccaatccaatt

SEQ ID NO: 114509 - DNA, 2446 bp, Cannabis sativa
cttgcatttataacaggtaaataaattgcaacacaaacatcccaacacataaactgaaaccatatttaaactcttaaaatgttaggttatgccttcacatgatcatcaatcaagcaacccccaagagctcctttatgccatgctgcaatggtgtaataaagaaagatgagttttatatatttcattatgataagctgttaagatacataacataacaagatccattgaaaaacaaatttaaatactgtagttcctttttcttgtatttagattgcaataatcctaactaataacatttttaactcacttcaaatttcttattctacaccaacaattccaaacacaacattttgatgactagaaatttgatatgttttacctcaaggccaagtggaggtgtggtggggtaataccgatcggtcactttcccatctttgtccaccaaaaacttggtaaagttccactgaatattatctccgaaaaatccccatttccctgctttcaagaacttgtatactggagcagtattgtcaccattgacttcaatctggaatgtgccacaaaaaattgaagcagcacaaatcagtacaatttacaagttaacagctatgatacaatatgtcaatttactgttataaacataccttgccaaaaattggaaattctgacttgaaacgagtacagacgaattctgtaatctcttcattagttccgggctcttgttcatcaaattggttgcatggaaatgccagaatctcaaagcctacataaggccccccgccaaaataatacagcagaagagatgtgaaaaacactaaaatgtaaacattctcaaccagaaagacagtcaatatttagatatctcagcttgcaaatggttttctagagcttaacacaccttgatctttatacttcttataaagctggttcagctctgcgtagtttgagtcagtcagtccacttcaatgattgggagaaagaaaacaaaagatggttgtaagtaagagaatactttcagtggtttgagaacatataaaatataagaaaaagatgacctaaactgcagagctgaaacaatgtaaagagtacacaaatttaagcttggaaataacaaaaaatcaaaatagtaatggtatacacatcatcattatcaccatcttaagattaagataaaacgttatttgacaatagtggggatgaagaggagtaccatttggaagcaacattgatgatgagcagaactttccccttgtaaatgctaagatctacatcatttccttgagcatcctgtatcaatattcaacagccaaacatattatcacataaattgtctaagaagaaatatagcatttgtcaatgatagtactgagtacagatcacaggaaagactcataagaaccacaacttgtaagccaaagcataaagcaaactctgtatcgtatcttcttcaaatggattaaattcttttgaataatctgtgtttgtgagctgcaaagatcctatcacttacatgctaaccaatatgaaattacattgcttgagaagccatatctcattatcttattatacatgtcctaattttcaacacaaaaaataaaacttgatgacagactccctaaattggagataacaaattttaaattttaaatctttcgtaagattatttgttcactaggtcctctttcataaaaacactaactttatacttaaaatgacgaaaaaataatagataaacggacatttccaataatcaataaataagacccacaatccaaaatctgggaaatcattataagggttggtttgaatgttacataagaacatttgtctatcaaaaccaatttacccaaaaaaaaaagcaaagtaaaaagctttactttttgacataaagagaaaactaaccttaacagtgagatcgtagattgtctctgggatctttgaggcttggcttgtcatccttttgtacgtaccagagagagaacacaactacagggccaagttaaccggtgagagagaagacagagaaataattcgcacaagatacattaaccattgaagattatataatccctcacattgtaaatgagacttaacaatcttttgttattttgtttattttttaattacttagacccacgttttagttaacgttattagattttgaatatagtacctacctactattagtctgtaagcaataactcattaataatattagctttgaaaagcagtaaaagactgaatataatcttttcattgattcaagaatgatctgttacagattttttaactatttatacttatactccagcaaagctagctgtaatacggctgcaccattttctccctttactaattacaacttaatgttatattacttttgtaatttagtaataaaatattaagatttgttataaaataatataacataatatagaatagatga

SEQ ID NO: 114510 - DNA, 2120 bp, Cannabis sativa
ctttaaatccaacaatttcaatattcaggaagcatttttaacgactttaaaagttcaagggcataatttaatacatgtcaaagtttaagggacaaaaattctaattagcataaaaatagtaaaaaaaaaaaatgatctaggagctcatgtaactttcacatagtacaagttacaaagtatcaattagtagaaacttaccacgttacaccaactcttaatgaaacctttatcaagccctaaagctctttttactagtggttcgtgagcatcgttattatcttggctagagacatgcctaagagaaacattagaaagatgagataaacagtcataaactgactgacataacaacatcagacaaagaagattcttctttaaatctacacttaattttttccaccaggatctttgagtctttatcaacttaagtattaaatgctctgatagcttcacaccaatataaagaaaatttaagagccaaaacctgtgtagaagtggatataccaggaataggaataaaaagaccagctattttgaaatcatgagaatccattacaatcacacctaatcaaagctccccttatttttgtctatggccgtatctacatttaatctaaagaaatttggaggaagagattgtttggtaaatttagtatgcaagcagcatacgcaatcgaatcaagcattataataataaaatagagtatcgttctcacgagaattgattatcaattactaatcaattaaatttttgtttctatataatcaatattaattctagagaaaaataaacaaaacaaaataataattaaaatttagagaattaacaataataaaaataaggattagtatgatccctaattattattcattttacttccatatacaattactcaatttctcttcttcttattcaattgacaagttaaattaagtagtttataatctcgttaagacttacaaactcaatctatgtgaaaactttctatattcctatgataatgtttaattacaaagaaagcattaaacaaaataacttataaaatcatacaaataatctaaatacttttgttctaaattaatttacatccatagcaatcaaaacacattcaaatcgcacttttcagtattttaattcgaattcatagataacaattataggtgatcaaacaataattgtaaaataaaatcagattgtatagaattaaaataggagaagaagatgaaattgaacaactacactaatccataaaataaattcaagtggtttacataataatcattaaaagaaaattagctattaaaagtcattcttaaataatagaaattcaattaaaaacataaaagataaaaataaaggagatagaacactgtttggagtcctctaatgatgtcttctgctcatagccttcttcctatgctccaaattggtctatattttcaaatggtctcaaagcttagccaccagccctctttaaataatgaaaattcgagtagactttttttcaccaaagttgcggccttgcttataaagtaacggctttctaagcgattttctcagtttccatttttcccctcgcagattcttgatttcccaactttttcttctttaccaaacaagaaatgtcgcgacctttcttgctaagtcgcggccttgatgagcacattcctctttttcttcatttttttcactttatttttgaaaagtgtcccctcttatttttagactaaaaatttttgagctaaaaatgcaatctttgacttatttgaggcaataagaaatccaactaagcttttagaaatttcctttctcctcagaattaaataattttgtctcaaaaagacttgaagaacaccaaaagtactaaaaaacgaagatctcccaatatttcttttaaaaaaaaaaaaacaaaaacaaaacaaagtataaatccgaacaaaaaagtaataaaaatactaaaacacacactaaaataaactctaaaaatgtataaaataaacctaacagagatttccatttatcaaccctaccaacactagtacagtagttgtacttagtacatgtggtacagagattgtacttctattaagaatgttcttaatcatctattaagccttgt

SEQ ID NO: 114511 - DNA, 2603 bp, Cannabis sativa
aaaagacaccaatagacgagataatgctaactttaaagacccgaaacataggctaaatataacctaacacccaacttagaggttagtcgttaatggaccgtacctgagcaacgtatgggtaccaaatctaaagaattttttctaaggtataccctatcttcacaaactcatttttctcaattttatgagaatcaaagtaagaaaaaaggaggtaaaatcaaacttttccaatgttcttggtgttcttctaaactcaagaatacacccaacaaaaagtttcaaaattagtcatttcttcacgaaatttcatgaaatcaaagtcaaaaatacattacccatcatctatactacaaaactcatgcatcaaacattcatttttcatcaaaaaaaattaaaaacagcaaagattaaaagccattttctgtcaagaataaaaaccaccaaggaaaagttctaaaaatgtcaccaaatctcaattttcaagcaagaaatttgtaaaaaggagtataaaaaacttacccaatattgagattgaaccacaaaccttccaagaaccacctaaaagcttcaaaatctcttccaatgaagaagagtgagtcaaacctgaaataaaaaaaggagaagagaaggaaaggtgcaactttttaaatttgtgatttttgagtatttttactcttcatttgactattttgcataagtaaagtttatttttaccacaaagggtcatttatttccttttgctattaaattcccccaacaaataattttttatttcttgtaaatatttgaattatttcctattgtaaattatttatttgttcttccttgtatttgattttgcctataggtattattggggtgatgttaataaaagtttaatcattgggaaaagtatatataatttggtttaggaaggtaatcactcatatagaggtgttattctcagtatcgcaccattaagtcatcaatatcaagattgaagcatagactacataagaaaatttctaccatatagtcataccgctaaaaacttgggaggcaaatatttacccaaaatttgacgatagtgacgtggcaaaaatgatgatgtgaaacgatgatactgggactgaattgatgaagaatgcaaagtcatgaccgttagaagagaagtctggcagtaggtgactacccctagaggtaaggtagactagcaccctaacaaacgggataaataattactacacacctaagggagtcaaatcgatcgatctggggaatatatactactacccctacctcaaatataagtgatctactcaaaaggtgatggggttgacccccacaaccctcatggtccaagtaatacattctacctacataagatatggttgatatagtgcatctttcataacgtcaagactacacacaatattgaagattaagtggaaggggtctcgggggtaacactctaaggtggcgactatcaccccctttagagtgggtctcaggggtgtcaccctaaagtagtggctattatccccagagaaagttaaatggtcataccgcactttgggggggaccctcgcaagaagctcaacagtagttacaaacccatgaatatagtggaatattatcaaaagaattagtctttaaccatctccgaaaactaagatgacaattgagatattctcaaaatggtacatctcttgaagcaagaagcaccgacgtttccccatttaaggggttagccatgaccagagaaggggattcaaaaattcataacttacagaggagtaactctgccatttttattctttttcttgcattgaagagcttgttttcttttaatttatttccagataatatttagtacaacttttttttagcacttttcttgataattggtaaagggtaagggtaatacacctaactaaagtgtcatatatatacatttcattttaataattataacagattatggctaattactcataatatgctacctcatgataccattataactcagtatatgcttaataagaatgtttttaaaatcataaaattaatatatttatatatatatatatatagattctgtttacattgtatattataattactacaaagatttcattgatatataagttcttaatattaaacatgcaaagcagaaataaatgggtgcatacgtagttgtgggtaagtggccggttaactatagttatgcatgaggatgaggatgatgagcatagccaaaggctttaatatggtcattaagtgatcgtttgtgcttaaaatcagaaccacaaatgcaaagccatcgcttgccacagttcttctcatgggttctccagtcgcctttaacagccaagtgcttgccacattttcgacaggtgaagggcttgatgccatgcttccgtttgtagtgagtttgaagtgttcgaaagtcctttaagggcttcgctcgtgggtgctctttgttgttcttacatccttgtgcgcaacaatagcatggtattcctgccatcacccgaggttgacttcctttaagcgactctggcccttttctgtattctgatccatgcccccacatgtgcatctgatcacgtacgtaccattaa

SEQ ID NO: 114512 - DNA, 6126 bp, Cannabis sativa
  modified_base (96)..(96): a, c, t, g, unknown or other
  modified_base (137)..(137): a, c, t, g, unknown or other
aaattaattgctcaaaaactaattatcttattctcttaactttaatattaataaaaaaaataatatattattagtaactataatacataaaaaaantagtaactataatacataaaaaaacttaataaattaatatntatatgtataacggtcggtttcgaatttttcgatcggtttattaccctaaaaaaaactgactgttcaatgtcggttttaaccgttagtggtattttcagttttcgatttcgtcggtttcggttccaacagtgttcggtgggtcggtttaaacgatttttgtcgattttctggattttatgctcacccctaaaatcaatagctgaatgtatacaatctcattcctatttatgtaacaatctgttttattctgtattaaaattgttatgcatttaaaatattttaatctaacatcttaattgaagtaggttacaataaaagttgtaaataatttttgagctgcttagaaaggttcttctatcttgtataattgtatagtactatttattgtaaagaaatcattattcttatatatttattattttttttctcatctttatgctgtaagggcaaatacggattttagttatttatctaagattggtaactgttaagtctgtaagtttagaagaagaatgggattgacctaagaacagtccacaaaattggtcccatttgggcttaaaatagaccacactgacttggattccaattttcccaagactccaaagtcttattgtaaattgtctacacaacaattttaatatatatttaaaattaatatttagatccaagtaggctacaaattgtgggcccaactcaataaattatattgattaaacatgagtgaatgaattaccaaataggagaaaattagaaagaagatattttagttttaattaatcagtatcaagtactctatataatttaaaaattagtataaaaactagttcaaatctaatcaacaaattacaagtacaaagtatattccaataaataataatggtactaagtatattctataaataataatgtaccattatatgcaaatttttagattatatgtatattatctaattacttttatcgaaaatataaggtatcattaattttatacaaatttgaaaataaatataaattttagaaaatttacatagcagacctttaaagggttattttggtattttctatatgttttggtatctaaaaaatttttttgatctaattattttttcatgatcgcataccttgtagctatttaagatcacttgtaaatttttaaaaaattctaaatagttacaatgccacaaaataatgtttaaacaattaattaccatgcgtataagaaaaaataatcaatcgtgcaataaaatatgtaacttttgttttatgcattgttaattacttaaaattttctaaaaattgatagttttaaatataatcataaaaaaaattagactaaaaagttctcaagagtgccaaaataaatataatgtattctatttatattaaaccttctaataataataattatatactttttctattcaaagaaagattgtttggctagttaggcgtgaaggtcttgaattcaatgaaggggccataaatacattaatgacacttaagacacatgatgggtgtggtgcaatgaaagaatcatttcatgtataaattttggaaaacaacaacatcaatgcttgttcccacatatcaaattgcccatttaaatatatgtgtagatatgcattttcaattctcttaatttgagaattataaaccacaaatgacacatatttcgtatactatatttatatataaatcattttcattctctcatcatgtttttctattgtcttgtctacttactctttgtctacaatagatgctatatatgtactcatttgaaaacaacactcactcgagaattaagataacgtgtaacttcatgtttattatgatcatatcacattctaattcatatatataaatatattttgtatccaattttattttcttggtcagtctctctgactttatctaattatgtaatctttaaaaatatttatatgtatatatggcaaaaatatagtagaacttaataagttgataaaagatctaataggttgggttctgcttattcaaatttaatgctagttaagtaaaaaaaaactcaaattattttattaaattagtattgattccaatacaactttaaaagaagatgatagaataaaagaatatgaaaggtttgataaaaaaaaatattaataagcagtagtaatggatttttttttttttatgggagtgaccaataacaagttgttagcttattgaaaagtttaattaaaaaaaatcctaaaaaaatattaaagaaaaaatatattggaccctttatgtttttagaccttgtccagtagcccaacttgcacaccaataggactggccctaaactttaataaaacagacataactcactccattttgatccaattgacgcgattcagctcgcgtttcaaagacaataattcaatgctctataattctgaaaccatcgtcgtcaaaattcatcccaagaaagttacaaaaataagttccgggttactcgcagtgggacctgccagctccaaaaaatggccatcaccaacaagagcaaatttttattttttaccgttagatcattatcaacgtttaaaaatatcttatttgtatttttctcttatttttgtggatctccttcacctataaaaagaaaggtcatttttgacattcagaaaactacccacaaaatgagaacttctctctctagattttctctatttagaatttggagcttctgacacttagtctattgttgtaattaccatctcgtgagaaataaaaactcgaagtagacatagcctcgttactatcgcgatatagagggtgaaccactataaatttgttgtgtctctcttataaatacttaattattacttattcactctcgccaatatctagcgagcgaatgtggcttagaagtttagtctagatttttgagccaacaaagtctactttcaaaattctctttaatgctactatctatacaactcgaattcatacattttttcttatttatacacaaatttaagtttagccaaatgccataaattgtacctactaatattcttttgaatataatataatttttatgaattatatatgtatttttttaaatatattttttttttcaataacaaaaaaaattaaaatagcaaaactcattaacttaaaggcaaaaaaaaaaaaccaaatctattaatgtatacacgccacatatataaaacattcctccttttgctattttttttaacaattttttcttataaaacagctgctattttttaaccaaaaaaaaaaatatatatcacatgtgtacgtacatactaccataccgtataatttttatttcactttaatcttattaaccaaaataactatcccatactataaggtacaaattaaaggttgtacattagaattaccttatgtatatgctaaatattaatggctacacacaataaaatggttttatgttacttaatagagctttaggaggaactaaactattttaatttgtatcaataatgaattattttattttcaatttttttatgttaataatattcatttcttttcctctcaaaaaaataaaaataaataatcatttctttatattttttaatctttagttgaattttcttaatgattagtagtttaagttggtctgtacgtagctggatgggaatataattcaaattatttcaaatattaatgtgtaatcatgataacataatgcaattttctttcttatcctacaaataaaaaactaatctttgtcctataatacgtgtttaacaggtacattaaaaaattattttctttctaaataagaaaagaaaaccttatacttttaatatttttaatcgtacgtgaaaaactttaattcatgggggcaacaataaacacaaaagaatatgagttgagcgcaagactgaatgatgtttgtcctacgccattcacgaatattttaatcatattatttatctataagaagatttttcaaagcttctaagttctaagtagtaagtttaatctaagtacttctttggaaatggaacttgttaatccggaaactaattctggtaacgttaacagtaatatttgacacgtgacaagaaagaaaacatcctagagttgagtagtcccaagtcatagcagtcgacctaagagaggttcctagccttgagcccaggttgactccgggaactctggaatgggtgtttggatctcgccaagttatttccaactcaccatttttcagtactctaaaccaagaagaaaagaaaaatccaagtctgaggccggaaaactgaaaagagatgaaataacaactcgaaagtcaacccgggaacctagggttttcaccccaggttgacattccaactagggtttcagtctttgggttcgtcttagtgtaaattgctcaaactttatactttgacatgaataagacctgtcataaacacgttaatcaaaatcgggacactttctgttttgagcacctgaggcaccaggcgcctagggcacccagtgcactcagcgcccatgttgacatattgtcaacttggagcgcctccaaccacaatattgaaaaagtatcccgagaattttcttcgtctccatccaaaacgaggaaacaagtacttttgggaaagaaacagatcatcctaaagggtaaacaggagacccagcgtgcaagttgacactggcattgggcccaatgcctaggttgacattttgtcaacctaggccatttctaatcagtttttttagaagtcttctaagcatattatttattttcacaaataactgaggtaagagtgttttcggaaatcaaacaaaccatttgatggcaaaaagttggacccactgcctaagataagcgcaatttttttcgcagattacccgaaaatgatccaacgaacgagattcaaaattgacgattttcatcaagagtcaatttttacaattatattaatggccaagataagcccaaagtgaatttttcatataatttatattattttattaatattttaataggacctcattctctataaaaggagaacttctctagttcattttgcatattcttctaaatcttcataaagtcagagtatctttctctactttctctctctaaaaatcaaagctcttgcttagccaattaatttcttgtaattctcatgagtaataaaaattcgaagtaaacgtagttctattgtcgtcgcgatatatgaagtaaacaactataaatctcttgtgttatttatttattttttataatttctctctatttatttacttaaacttattctcttctcgccaatctaacaagtgagtgttgattaaatttttggatcaacagaaatctctcactctcagacagtataattgagattgtgatggcttgtctaaaaaactttttgagattttggctaaaatattagagcatattatcaattattaaataggaatttcgaatttggtctaatatttaataaaataataatatgattaaaactgatattattagttgaggaaataataaatgacaatattaaagtagggcaattgtcccctgcagtgggaacctaatgttggaaatgatgtggacctcttttaggtatgccacggcaaattatcacttttctagcttttcaaaaataaataaataataaaaatagttgttggggttttgtaattttcttcgtcattaacatgcaatgtcgttgaacttgaaactgtatatatgtgaaagtccttactgtgtgtgtaaatatgaatgaaatacatttataggcaaccgattgtgccactttaataaatattgtgtatattttaatgagcaattctacgagttataattagttaatgattttttatttattaaaataaaataaatgagactttatattaaattttactaataataaatttacaactcacaaaaatattaggcactatgtaggggtgtgcataaatcgatccaatccaatgagaatcgac

SEQ ID NO: 114513 - DNA, 1609 bp, Cannabis sativa
gactctttctatgttagtaaataatagaatacaagatttttcttttcttataataatttaaatgtttatttttagttttgtaatcattaaactaaaaatggtgaaattcgtttcataataaacttaaataaaatatgatagaaagagtaaaagttatatttcaagaggtactattaacaaattatatatcataaagggtataacttggtagtgtaagaaattaatttacgacaaaaaacattagtaatcaacacataaactttctcaaaatactcagacaaataaaaaatcacagtattatcatgcaagccaacacaattatcaaaattttgttattcttccctttctttgattctttcgcacctataccatatccactctgatacgattcaaaattagtgagcaaaaaataaccaccatcttgaaaaagaataatgtgaacattgtctcacataaaataaatggtaaagtattgatattgagccaaatatgaactactcttactctatttattaccaattaattttaagatagaattccatgattctcaacactcaaaaataaaaagactgatgggcatgcaaaaccttatgtgtcattttgttattgttgttttattcaatattattcttgtcatgaaaacattatgtcacatttatcagagattatttgcacacactggccacctcaaaacaaatcttttaatttcacttataccaaaattgcttagcaagtttacaaaatgaaaagtgacattgtaatgctaaaactgtcacattcttacctgctaataacagcagttacatatcaatcaaactgtgtctaaattcaaagccatgtgaccagaactaggaagccataccccactggaaatggaaaataaagttttgaatatacatacttgtaataattcagctctgctcattgataggcttttgaagagatccaaacagtaacctcagaaggaacaagtttcacttgtaaccaaattccaattttctctgtacaatttcagtgaccatctataccataccttcgtcggtggcaattgttttcatgagcatcagaacaaaggtaagaaaccacacaagagaagaactatactccctaaggatgaggtgtatattgaaccaaactggcaaaacatgcgttctgtttgtcaaaccgagtatcatgaatgcacatttaggtcaacttgatggttttgcggttgctgtagacacctacattcaggcaaagggtaagtgtaaaccgaggattttctgtttatcttcttcactcttggtactatcattcctttgcggtcactttcagcaagcatagcttccatctcatccttgaaacctctccaactgcaactcaaaatacaacaaaatagattagaagaaaacaaagatgctaggtagctctaaatgtaggagcataagtgcggttgttattaaatcatgatgtcctataatttaatatcaacagtcaggacaatccaaaaataactcagatcatacagatatgtcatgcttttgatccatcactgcatacataaacccaacagagatatatatatatgtatatatatatatagtgtgtgtgtgtgtattataaaaatata

SEQ ID NO: 114514 - DNA, 2071 bp, Cannabis sativa
catggtcaagacaaacacaaattataattatgtaattacctctaattacacacaaatccaattacaaagaattaccaattccatactgacttcttttctttttatacaataaattgcatagacacaaagtgaatttggttggacaagtgaatattttagccaaagaatagatctttaacttgctaacataacaaaaatacaaactttaaaacttcaacaatttgaaacaatctaataatgatcataagttatgataaaaaaaatgtgttaagcaattcttacaataaccttgttcttcttgccagcagataaaagcagaactttaccatccacaatatcttcatcaccaactctcttactctcactatcaactcttgaattgttcaagtaaagtcccccttgtttcagcaaccgccgagcagcagatttactctcaaacaaacccgacgaaacacagagatcaaccacagacaaattattgacttgatcataagccaaagaacaacaaggaacatcctcagcaatcccttcaatagttttccaatccaacttagtctcagctccaggcctcaaagcttcagtcgccttcaaagcctcaatcaaaccctcttcgccatggacaaatctagtaacttcttctgcaagtctccgctgattcgtgttagggacatagccaggcctcttcatatccctttccaactccattatctcttccatatccaagaaagtaagaatctttaagaacctaaccacatcagtatcaggaacagagaaaaagtattgataaaacttgtatggagacaacatttcgggcgaaagccagaccgccccatcctctgattttccaaacttggtgccatcactcttcaacaaaagaggaaatgtcaaaccataagctccttccacttgtaaaatcttcctaataagctcagttcctgctgtaatattcccccattgatcactcccaccaatttgtacactcacacgcattttatcgaacaggtagaggaagtcatacccttgaagtaattgataagtgaattcagtataactcattccctgatcagattccaatcgtttcttaacactctccttacccatcatagtcccaactctagcaaatcgacccacttcctttaaaaaatccaataacctaaactctttccaccaatcataattattcaaaaccaaaaccccatttgaccccaaaattcttgttatagtttgggtgataccctttgtgttaatgagcagagtttctgggtcaagttcaggtctttcaaggctcttaccagaagggtcaccaactctggcggtggctcctccgatcaaggcaacagcttggtggccacatttttgaaaccaagagagaacaatgatacccaaaaggttacccaaatggagggattgagcagttgggtcgaatccgcagtagactttaagggggtcggagcaagcgagacggagattatcactggtgagtgattcaagtaagccacgttcttcgagaatgctgaccacattgggacgttgactagattggggtgatgatgggacggcgtcgttttgtgtagaggtgaaggaagtgaggaatcgttttgggtagtttagatttagggttgtggtggtggtgttggagaagaggagagaggtggtggaaggtggtggtggtgagtttttgaaggtgaagaatgaaagcgtgcgatgggagtgagtgaaagctcttgatactactgaagaagccattgttatccggaaatgtgaagtttaacatgaatatatatttttggaagaataattagttattttctcattaacttttacatttaaccatttttccactttaacttttacatttactaaaagataatttgtttcgtattattcggtttaaatgttagatatatgtttgtaacttaataatttagttctttagacaattatcgaattgtatcatctcaaaaaagaaatttatagcagttatttaaaatattatataaaatgggaaatttgattttctatacttagaaaatcaaaaaaaaatttccctaaaccaaaaatttaaaaacta

SEQ ID NO: 114515 - DNA, 511 bp, Cannabis sativa
taagggcccaaaaaataatttttaccctatagcccactacatttcagggccggctaatacatgtattaatagacataataattatatagtgattattttacaggattatatatggccatttttccgagaaaattattattaggtgagacacattatattattggtatatatagttaatccactcttttttagacaggttagatttagatatttaatatttatattaagttagtaaaaatactctctagaatgtcacttttgtctcggtaagatatttggaaagattagatcaatgtacatataaatatatgaaacattaatttatattttactaaatgttaaaaatagaaatttccacactgattgttaggtattattttaagttaattttgagtcatatttttaaatgtttttgattagttttgttatctctcaaaaaatccaaaataatggtgcatgaatttttactctagatatggaggtccaacaaggtggagcttattggccatgg

SEQ ID NO: 114516 - DNA, 2403 bp, Cannabis sativa
aaacacatttttgtttttaaaaataaaatttgaaaattttacttttatttttgtggttaaaaaattcaaaaacaaaagtgttaccaaacaccacctaaactaacacccaactctgaaatctccttagctcctcctcaagcgttaatcatttccagcttgaagagcttgtttataaccctaaaccctaaactctaagtttgtttagggtccaaagtttgtttgaataatagaacaaaagtaatatattctttattttttctacaatactgaactgaagtttgtcaactttaacgtggaattaagattctcttgtccaaaacagctttcccaaattgtgattagccaatagctttagacagtattgaaaatgggggagtatatacatacatattgaaaatgggggagtatatacatacatatatgtgctgtttttttttctctttaccaaaaaaaaaaaagaaacttcgccccgtttgcacctaatcctacaatttttgagtaacagggattatagcaatagctatgtagagtttaagagcaactcgaatatcagactttgtgggagaaacccacatgcctgatcatttgagttacctctcttggtatgttcattctgttttctaactattttaaatgatgtatttcaatgctattagttagtgaatgacatgaaaatttgagacgataatttttatcacagtaaatttttttgttggttgacttgtaagagtatcttttgttctttgagtaacaactttggccgtagtgactctcgaatcccatgagctatatgtctttgttcaccctcaacattgctgccattatggttgagtttttatcccaagtcacaatactattagcctaaggcattcctgaaatcttcagtcaatttttcttatgtttataatgtttgctaatgctgtgtcagccacttattttataagatttagttgctggttctctaacataagatgaaaaccagtcgcttttactgggctttgaattgtcaactgtgctttaaaattgtaatttattaaactattggtgatggactaaatgcatttacctccattttcatatttgttgccccgtcttcagaaaattaaatgaacggcaacatgctcttttggaggaatttgcaaaggaggaaataaatcaaggagaaaatagtttgaacgagggaaactggtaagccaatgcctgtctataatacttgtttttcttattatctgtgagaatgataacatggtaaggtctactaaatttaaattttatggtttgtggtaggcatgaataagaacattatatttgtgatgctttgctttcttgtttgtattgttattgctgtgtctttatgtgagaaaggagggaaaacatggtatatacataggggccatctacaatggggcacacaaaatgtccttatagcggggtacgatataattgaggcacttaaattatttttatgacagttgttttttctttttgatgaaatgacagttgttaattagtcatagcaggccttctacaagttttcgagaatttcatgataacttacactgtccaaattagagttaaaatagtttattgccccagtaccttttttttttattttaatgaactggaatttcttaaaaatttgggaaagggtttatgctatgactatataaacatcattattaaaaaattgggaaaaaactattaaaagtgcttcaattagaccgtgtgttactgttgcgtatcctaatgtaatggcttcctacatatactttatacatgttttttttttttaaaaaaaaataataaggttaaggttcttagtatttttcttaccttatatatttggttggaagtaatgaaatgaaatataaaggatatatttttatttcatttttttgtttggttgtatttttaagtattagaatgttatttcaatggaatgattttctattattttggtggaacgattattctattttgaaatggaaaaaaaatcattccaatgcaagatgagaaaaaacttaataattattttatcaattttttttttatacattttaaatttgattctattccatttgtattcctattctcattctcattcatatttctatgtttttattcctccaaccaagccctatgtttaatgtaggagaaggaaagaaaaatttgaattgacaagtggatagacgttaaaaaaatgttgggttggagagaattttgagtgggagaaaaaatgggtggaaaataaaatagtgggactcacctatttgttaataacttatatagtaacagatttttgggaaagaatcaaattctggactgtcacttggatcttcagaacgaaacattttgaagatctctcctttttagacttaagcagagattggagtgtgctgttgt

SEQ ID NO: 114517 - DNA, 2383 bp, Cannabis sativa
tattacccatgaatagttactaagaaaatttaactataaatattaattttaaaaatatcaaaccattgaattttaatctaataacgaaatgaaatcacaaatttaaatttaaatttctatgctatataaatttatattattcttttcccgttcacgttgaatttagaaacactgaatttaattgcatgattttaagatgaatgaatatgttttaaataaagcatttattaattggtttacaatttcaaaataaaaaaaagtatgaataagacaatctagccgctcacaccttttccctattattcatttgatttattcccagttagatatgctcaaattgctctcttgtcttgattagaatatccacaaacacgctttcataaacacaccaagtaacttgtgctcaaaaagttctcaagagtgaagatttctcttttattaacgaaattgtataattataaacaacagtaaaaaataattaatcaagatctatgcacacacccacgtatctgtatataataataagttcatattctcctgtccaaagatatatcacgagtgatatcgatcatgaaggttatggctagttccaaacaaaacctcatcactcttttcttcttttacttcttcttctttgctagctcattaaacattaatccagaaaacagtagtcctactagtactactacagctgaaaccatatgcaactctactccatatccatctgaatgcatgtccaatctactcccacctcaaaaactcggcaccgtacgagatttttgcattcactttatccataaatccttaacaaccacacaacaatttctttcacttctaaactcatacctaaaccgacaccgtcatcgtcatggtgctgatgattttctcacaataccactactgtcggaaccaatcattggagcactccaagattgtcaccttctcgcagagctaagcctcgaaacattatcaaaaacataccaaactctcaactccacaaacaataatataataaacagctttgaattagccgaagagtttcatacttttctcagcgcagttttgaccaacacacaaacttgcctggaaggcctcgaagaggttgtgggggactctccatctaatccccttactaaagtcatctcggtcgctctctctggtgggaccaagctttatagtatatctctagctcttttcaagcacggttgggttgatgatgttagctataataataatcaaccatcgacgtcggccatagtagggggccgccgtggaaagaggctgcttcaggtgggtttgggaggtgttttagtgggtgagagtgtggtggttaatcgaaatggaactggaaattttagtagtattaatgcggcagtggccgcagcgcctaataggtcagctaatagtaacattacatcttactttgtaatttacgtggctggtggagtttacgaggagtatgtttctataccaagtaacaaaatgaatttgatgttgattggagatggtattaaccagactctgattactgggaacagaagcgtcgttgatggttggaccacatataattcggcaacatttggtaaaatttaatttactttagtgttaattaatgctttaagttaggagcctttattgattttttttcttataaattttctgagaagtcttgtatacttaaaatgattactcaaacagcttttatttaacaaacctgaaataatttagccgacaaattatctgaatgctacttttagttcactaaattagctaaaattaacttatagatatattgtagtacaaagaaaattatttcctagtagtactactcattctccaaaacataaaacaataaataatcttacacggactccgcattaagattgagggggtctatttttaactttttatttaatttttttttagaaataaagacttactttgtttatgagatagggaaaatttaacttagcacactaaaatataaaatatacactcaattaaaaataaaatatttatagttttaatgtattttcctcctaaataccctactgttgaacccagacatagacacataattcaaaaaatatattaaaatatattaaaattaatacaaatttatatttttatactactatatttttttttttttttaaataatatacataaagtttgatttcaatatagctaaagtactcaattcttgtgttcttggtgggagttgatctatttttagaacaatcagttttttgaaaaatatatattgcacatattgaaaaacaaaaatgctctagttggattttgtgttggacaccacaacacgtcaaaaacgtaattactttattattgtaaaagtaattacaccaagacttgaacacttttt

SEQ ID NO: 114518 - DNA, 4121 bp, Cannabis sativa
atgcaaacataaatcacttcaaaatttcttatattgataactaatcagattgtaaagggttttatttagggcacaaaacccaacacttacatcgtcatagtccattggttgttcttcgtgttcgtagttgccaatcggttcttgttcttcatttgccaagggttgttcttgttcttcatagatgtcggtcggttcttggtcctacaaatagtcttcatgtcgatcttcatctctatattcattgtctaacttttgaatctcttctgtttgtgcatttctttgtgcttttagcctctcaatttcagcttttaatcttttgatttcagcgacatgttcactatcgacattgacctcaactttttttctttctttgcattctaccaaacacgatagaaatttttgcaaatgacctgtaacataatgtgccaacttagttagactctaaaatatattaaaaaaaaagaagtaatatgactcaattaaagaaacatcatacccaacagctctaacacgacctggatgctcaggagtgcctaaagcttgcgttaagatatcattctgacccttagcttcgatttcaccagtactataaatttttatcagtttcaaaatcaataatatctttctttgaagaaatacaaaaacagttacaaaatgatgtattagaaactaaacaataaactctaatctctaaataacaaataacacaaaaaaaatacaaagactaatacaatataaactacttagcatatcaactatatcgctaaacaaaaaaaaaaactactacatcatatatacaataaaatggttaaaatatccaaactactacaacaatcaactactaaaaccacatccattacaaaataataataaaaaaaatactaacatatctacgatacattatcaaacaaaaaataaaacaaaagaaaaataaacttattcattaatataatcaaacaagaaaataatctcagtaataaaaaactactaaaaaataaaaaaacaacaaaaaaactataaaagatataccattcattatcagagaaaaataaataaaaaataaaaagaaacagaactactttttcgatcaacaaaaaacaaaaatacaactcaataaatccacatgtaaaatgaaacaaacaaatatactaaccttcattttcttaggcaacacaataggggttcatcacactccgaatcgaaatcatcttcatctcctacaacactcttcatcttcttagagcaccgatcatcagaagaaggctctgacactcgactcctcttcgaaatgcaagcattcttactgttcttctccttatcaatatcgacatccttcaaagaagacccatcaattttttttgaattactcttctctgttttttcctttttttttcatcaaaccagaagcctacggtgacgacgacatcgatctctttgtaagcaccatctccttcgaagaacaatccacacacaatgtaaaccctagcaaagaaaatgaagccctaacaatgctaataaaagagaaaaaaaaagagagaatgaaataaactgagaacaaagagaatatgaatcaaaactgaaaaagttgaaaatgatatgttgaaataaaagagaggaataaattttgtataacacgccaaatacaccccacgtatacacgtgtccaaaataattgaaaagtacctctacttttcattaataaaagtattagcagtaatcatggaattaaaatttaaaaatggtctctatgcctaaaaatctcttttataaggtaatgaactttattaagcttatcattaagttaaagatagcagtagtagtggcgtatatttagtagagtatgtttcggcacttaacttaataaggtaatttgtaagattcatcaaattatgagtggaagtagtagtggggtcgtacagtagcattagcatgggattggctaagtttaaaaaattgaactgatacattatatgtggcatgaagaacaaatttagacaaatagaattagttcaagaggtaagatatatgtgttcatgagaaccattaagcttataagtggagcaagattcccccacatatattatggagttaattcaaattcaaaacttaagctaactagtctacacgtggaagccaaagagaatggagtggaggaggttgataacttgaatgaattcaaatttgaaattaaagcattttatacacgactagtatgggattgattcacttgaccaagtatgaaggaagctttaaggaggttattactttgaaatgacttttagctcattattcaattgattttataattttaaccatggttaataaaggtaactaagagacataagtgtagttagctaaacacttataataccactccactcaactcaaaatgcatcagtcacataagctctgtctctcctcttcactcactcaaagaagacaagtctctcaattcattttcattatctctcggcacaaagtaacaatctccattatcctcttgaatcttcccttgtcttgatgttatcatcaccatgaaccaccattatcatatctaaattattttattcaccctacgccattatcaaaattaccataactactttctgttcttcattcatgtcaaggctacaacactcaggctctatcatcatttttgtcaacttcatttcaagttccacggtctatattaatgactatataaggtttattttggaagattaaggtgtgatattttaagtctacacataagatagaattgggtctagattacttatcacttaagtgtttttttaacgttagtatttggaaactaggatttatgtgatacaagggcttggttatcaaggatcattctcacaatcaagtttttttttttttttttttcatattcgaggtaaggaaattaagtagaaatttttaaatttttttgtataaaataatattcaaaaaagagtgggaatgaggtataaaacgtacttcaacctattttaatttgcttattattttattatgttatttgaataatggacaatacagtgaattcgtattatttaaacaacaaatatgtgtatgtggtttgaataatatacggcacaatagattcacattgttcaaactacaatagattcacgttatttaaacaaagttgtgattataatatgttatgatatttaaataatgtatagtacgtagtttagcattatttaaattaagtattaaatatagtttatgagacatagtttgatcgagaagatactagttgaatacgtgactgttgggtctatatggtagatagaaggtcatttagtagtgggtacaatttaatcattattatgtgacttagctgagaaactagttaatagttactaatgttaaaaattaagtttatgtatttctatttatctagatatgtgcatctatgttttggttatatattttttattttaggtgactacctgacaagtatttccttactgagtttagtatatcacccttatcaaacttaccatgcgcaaattcaggttgtgaaagttagaaagttggtggcgagtgagaccttggaggcttatgtgtgtactcattgagggtgatatagctgggtggtctaggacacactccatttattttattaagtgttattaaattaatatcgcatttattttatttattaattattatgtcttttaagtccaaactgagctcaattataaactattttatgtatataaataaaagcgacattacagttttacgcattttaacacttgtaaataatttagtacttctataaaaaaaaaaaaagtacgggcattttagttggtattagagccacagttatatcggtcccgaacgttctcacaaattacacatattggctaaaaaggcttcgctcgttaccaagtaagtattatttttgcatgtttgtattttatgtacattttagtaatttcaaaatttcttttcatttttcagaatcttagaatcaactaagcaccaacatcatgagatcagagcaagtagaacacattgtaggcacattaaagttttaaagagagttcctaagaccccacccatgtaagaagaaaacaaagtctttgatagaattaacaaaatacatg

SEQ ID NO: 114519 - DNA, 1300 bp, Cannabis sativa
tggtggtggaggaggaggaggtggcggtggaggtggaggtggcggaggcagtgacactagtaaagcaagttttggtgcaaattttaacaaaggctttacaatcggttctggttctagacgacttaaggaggtctatcaaagcaatggtgaatatccatcatggttttctactacagataaaaaactagtgagtaccaacaatgacattgaaaatgcaattccaaataaaattgtggctaaagatgggagtggagatttcaaaactattgcagaagctctttcttcttatcctaagaaccacaaaggcagatacattatatatgttaaagcaggaatatacaacgagtacctaactgttacaaaagaacaagtgaatgtctttatgtatggagatggacctagaaagacaatcatcacaggaagaaagaatttcaatgaaggagtttcaaccattagaactgcaacattctgtaagttttgagttttcattaccttaacacattcacttcccttcattttcttttttcttctactaatcagggtcagcctgagctaagacgaactaagcctgcgcctagggcccaaccagggtccaaaaaaatatgacccaataatttttattttcttccttgctattaattgtgcttatcatcatcttcatttcttaccttatcagctgcaattggaaatggatttgtggcgaaatcaatcggatttcaaaacacagcaggaacagaaggacaccaagcagtggcacttcgagttcaatcagacatgtctgcattttacaattgtagaatggatggttaccaaaacacattatatgttcaaacacatcgtcaattctatcacaactgtgtcatatcaggaacagtcgatttcatctttggagacgcagcagccgtcgtccaaaactcgttgatcatcgttcgaaagcccgagaaaaaccagaacaatgcagtgactgcccaaggcagagttaacaaacatgaaacaacaggcatagttttacaaaactgtaggattgtacctgaacagaaattcttctcagaaagattgttaacaccaacatacttaggcaaaccattgaaaaagtactctagaactgtgatcatagagtctataattgatgatttgattcaaccagctggttggcttgaatgggataatggtgattttggtcttaacacagtttactttgctgagtatgcaaataaaggacctggtgctgtaactgatcagagagtgaaatggaatggttttaaagtcattactgataagaatgaagctcttcaattca

SEQ ID NO: 114520 - DNA, 779 bp, Cannabis sativa
agaagaagaacgtgagtgtttctgggttggggatttgggtattttgatttttctttccttttgttttacgttttataagattagttcaattattatccttccaactagcaagacccgaaaatctcaaagaactttctcaacaccccaaagcagggagggaagaactttaacatcatttcacatcgaagcttattaatgatatgaatgaaataaaagtctcaatcacattacattatactttgaatttcgaaaccatcaaagtcgatgcagacaacaaagaagcatatatatatataatgagtggtagactcgcaatgggtgtggatcgagaagatcaattggaagagtttaccgggatgagattaataacatacgatgggaagtaccacaagaggtgagcagagaaatatcaaacgtaattagcaccaaatccagaaagcgtggacctatatatgtcaagaacctagaaaccgtttggactgtcagccattgatatgggttgcagtaacactagtaacgctaatcatcatatatatgggagggagagagaagatttgaagaatttacctagtggatatgggtgagtgtgcgaaagagagggggtcaggggatattagaggttgaatgaagaagagtttcagagtgagttctgaattgagaaagccaaagttttgcgtcgctgattagaaattctcaacaaagaagaagagcaaatactccgtctctgtaccgccacacgtgcttgctaagatggcacgttacaagctaagtgatgctca

SEQ ID NO: 114521 - DNA, 2628 bp, Cannabis sativa
  modified_base (31)..(66): a, c, t, g, unknown or other
  modified_base (212)..(218): a, c, t, g, unknown or other
aattttaagaaattcggaataatttacaatnnnnnnnnnnnnnnnnnnnnnnnnnnnnnnnnnnnngtataaaataaaatagtcacgcgagaaatacactacttgaacgcaatttttgacgtgttaaaattttctaaacttcttaaaattttgcaggaatgtcttaactacgtataatttacatgaccataagaaaaaatttgactaaaaannnnnnncggatactaaaacagatagagatgtatcggtgtatcctttttaacgggggtgcattatagaatttccttatggtatttatgatatagtttattattattttttttatctattttgttaaaaaaaaaatgtaatattaaactagaattactaactaattaaaattatttataatctcaagtatgtatgtacatatttttatttttaaaatacactatcattctaattaattgcttatcataaaactttgactaaagttatcatagggggaggtaagatgaatacctcctctaattatgtaaatgaaaaataaataaattaagttattataataattttctttgacgtattattataataatttaaactacttttaaatgattatttattttaaatacttgtttttttttttgttattacataatcattacaattattaatagaataaacatcttgtatttcatcatataaaattttaaatttttttgcacctttctttctatttatcttttttgaattttttttgaaaacagaaggttcattcgaaggttgaaaaatgataaagctctataaatcagacaaacaaaacaacaaaaatagacttaaatattgttttaggacaactaaaccccacacaatgtaaattgagtctgtcgctcactgttgataagcaagggatcgaaagggaaatgccctagcagcaaattaattgcaccaaagcaaaaaaggcacgtctttgaaagatcttatactactaaaaaaattagtttttcccgatagcttaaacagttggataaagtattaactgtcacatattcgattgtcgcaaaataaatagaatcgaaccgtcgccaatcaagcattcccgacagtttaaaaccgtcgtctatagtatagtcaatattattaaaccgtcgctaatggattccattaaaaaaaatatcgtcttcatcctcttccaaactacttcccgcccgcatatgtcacagttgctccaatactttttcaagcttcatcctcctccactattattgtgctcgttttcatcctccttgaaattttcttttacaagctttagattgcttttaacttgacgatcctcgaaactttcttcggattgcaagcttcaaatttattttgcactcacaaagatcaagatcaataaatcaaatcatgacggatagaaatttaaacaataaataaaagaatattgcgcttacctttgtgttgtcacggagagcaggggaaagggacagagcaagagagagtagaggagagggatggcgcggctagtggtcacggaggagagagagttgggaaatgaagtaaaatttacaaatgatgactttaaaaatggaatttatttttggaggggggaggttatatcttaaagagacataaaataaaattttgaaattcaagatgcagggggaaatgaaattttagatttgaaacgagttaaatttaagtcgaaaaaaccgttgcctatacattgcctaacagttttaaaccgtcgacaattctcactaaaaatacacatacaaatttttaacactaatatcgagtaccacgtttgtatagtatgagatttcacttaaggtattaaataacaatgctcttttaacaaaattaacacatgatttttacgatgtaactaaaaagtctgtaaatcttatagtataagttttcacttaaggtatcaaatattatttttataaattatgtcataaattatcattttttacgttgtaactaaaaatctaataaatcttatagtatgagatttcaggtatcaaataacgatgttgttttaacaaaattaacaggtggttttttggtctctctcgtagtttaatatttgtatctcaaccacatagtgtgataggatgggacccatttatatttactttgatatgaatacaaccatatataattgtatggttgattaggactattctccctctcaatgtcccacaatatataaaaacgtgcatatatattatattgtttttggaattttatggaaagaattttagggtttttgctacacaaacaaaggatagaacaatggagataaagaaactgacaaaagggaaatagatttgagaaataattaaagagctacacaaaaaaatcttataaattattatttttacgttgtaattaaaaaatctgtagctaaaaatattagttataaaaatcacaatttgtagtgactaaatatatttttagtcgcaatacttgttgcgattaaaactaaaatagtgacaatttatatctaaatactatgtttagttacaagtaatttttttgttgtgactaaaagtcatattcaatcaaaaaaaaaattgttgtgactcaaaaattgtcattaaaagtgctttttttttttttttcaaaatttttaaaatt

SEQ ID NO: 114522 - DNA, 2891 bp, Cannabis sativa
gccaaggtcatcggtgcatgaacccgacggcggatgaggcggcggtggcggcggagccggcggcgagtaatcctggtgaaagagattccaatccaaatctaatatcgaaaagtcatggtccgcaaggccatggctagccgcgagggctatgacgaaggcgcagtagaaaacaatggcgaaatggagagcagaagaagagtactgaaaccgagccattcactagcagagtcagtcattagattgggcggtcacaatttgattccaaagtcaattggatgcgaaatcctagcaaaccaaccgaagaaaccaccatcggaattaatcacacctcttcaagagaaaaatcaccctcgattgattactgcactgaaaaccctagaattcgctctgaaatgggggcagagaggaaagaagaagatgtggggaacactccacctttattaactttttgggaaggtgtgggaggttatcagaagtatcaagtacggtcgcacctacatgagctcgtatttgaagtgattttttattggtagagttgttactctttaatctttggctgaaattaacaaccagtcaaacctattgacctaatgtatgtcggtaagggttatggtgaggacgagcgtagacacttttatccctttgatgaacccactcgctccggtatggaatagattaactgaaaagaaaaagaaatcctcccaagaaagaaatgaatgtaagaaaaagaaagcgaaaacgacacaagcgacgccgtcttaggaatgataaactcaaaaccttattaggtagttggttggttgagccgacacgacgtcgttgagcctttccaagttctttccagtaagaaaacaaaccacacactcacccacaaaaaaaaaaacaaaaataagagagagagtgacaatcacgcgtggtagaagagcgtgagtgcgtgtgatggcggtcggggactattttcaatggctttatcgtcaggtcggggatgagagaaaaattaagataaaagcacccgttggggacgtaagtttcgtcaatgttccgaaccagcaagattcgggggttagtgttgtgagtattaccattttttttttaaaggtaataatttacacttttaccttaaaacggaaaaacaaattttttatttttaaaaatacagtatcaataaaaattacgagagcggctccttcttcgtgtcttagtcgaaccacacccatctcaatctctatgattttcattctcaacacaagaagattgaataaacttcgaagattaccaaaaacgaatcagaaaacaaatacaaggtacaaaaatttcttcttcctaattaagttattttaaaaaaaaaaaaaaatctttcatggttataaatattttttagattttgaaaatcagataaataattaatcatatagaaaattggttgatcttaataaataaatgagaccatattacaattgaaaaaaatactaatgcatatgttatctcgatttttgcctgtctgacgtggcatgtctacgtggttgatatcagcgtcacgtggcagtacagctcaccaacaaaaaggccaagtcatctactcagcacttaaaccaacagggagtcctagcactcaaacgagatgatgaatgacggaccaaccacctcaaggaggctggtcggccacccctgtccagccctatggccagcataggccagccagcttctgaatagcacaaggctagccagccagacattggcctggcaggactttggtgtgcaacttcatgcgtggtcagcaagctagactgcgaactgggccttaacagctcacaaaagtagagggaaagtatctatttttaagggtcattttagtcatttgtattttactaattcaatatgtaaatatatgctcattttacctgataaaagggtttaagctctcctatataaagggccttaactgaaccctaaaatcttaagtctgaagtcataagttaaattctaagcctgaactctctccctctcacacacgtccaccattgcttctctcttaacttgagattttccatatttgattcctacattgtaaccttaagagctatctcaaatcccacccatagtgatctgaatagtattatctctcggtattaatacaactaaaagagaagtaggtcattacccgctaactaagggggccaaacctctataaaatcatgtgttcttttattttcttgttcttattgtgtaatacatggcaagcatcaacattaatacgaccccgctatcggttggccaaatctgaggtcaacagtttgatgctttcattaagagtgagttgatatcatatctaattaaatgtcatggttaacatgaggagaactctggctacaccatctgcatcatcggttcttcctcaaggtcctttgactacagatcttgatgtccatgttccaatgacgactggaatttccatgagcactacaaatgtggtcaatcctaccatatcggtaggtgccacgaatctggccactatagttggctagggtgcacaaacatctcggtggatctgaacaatcagcctttgcctctaagggaggaccctccactggcgcctcccacgaaggaaggacccatggggaacaaaccctaggaacaacaaccagacctcgtccccggtactatgccagagagaccaggaccaggaattggcgagcctgctattggcaagccccatgtacacttaggagaagatcttgagttagccagacttagagaggttgtctgccaagctaaccaaactaaaaaaccacgcattgctgattgcgatgtattctctcagtagagacgcatattcttgagatggatggatgaccaagagtacatcctccgattgttgggttttatgccct

SEQ ID NO: 114523 - DNA, 2217 bp, Cannabis sativa
acataatggaaagtattaaactagcaatctaacctcttttggttcagattcttcagccatttttggtggtttcatcagctgataaagctcatgaaaaacctaactttacacaaaaacctacagccattaaaaacaaaagaaaacatgaatcaaccaataaatcaaaaggtaataaatctcattacttgtaaaaacaaccctaatctaaaaaaattacaataaattgaatccataacaatccattatccatagaaacaaaattcaacaaatcaacaaaagcaaaagccccttctttttctttaccactaaatgaatcaatcaaaacgaaaaaaaaaaaacaatcaaatccaatagcataaactactgaataaaaattaagactttgaattgcattactgttattaagagaattaaaaaaacaaacaaacatccaatgccttacaatacagaaaaataaaattccacacgccaaagagacaatttccactcgaaaccgtttttcttttttattttttgttaatgttcaaaaataaaaacaagaatttgactgagtaaacaaaccttattgggataaaaaaaaaaaaaaaaaggaatagatagttgtaatcggcaatgagaatgaaagcaatagcaaaaaaaacgtagttttcaatgaaaagtaggagagaaaaaaaaaaacataccaaaaaaaaaaaggaaaaggaaaaggaaggaaagggtaccttacgaatacgtgtaggtgtaagtttggagcaaaagcttaacctctcttctcttctgtttctcttcctcaaaaataacaaaacaaaaccttatattacaaactcttttatattattccctaaaaaaaatcctttatgttattattattatcatttattatgtatggtttagaaataataaatcaatattggtgtttgattagaatataattactggaaaaagttggatctaattataaaaaccaaaagatttcctaggtggcctatttattgtggtttgataatttttgcaaaatgatccctaattttgacaactaattacaaatttgatagatatttgaaatgattaaataacttattaaatttttaaacttaagtcatttttataaattattaaaactaagcaaaaatacaaaataatataaaaggaaattatttttaaattcaaatttattattattatggtaattggatattagatggagagatattagtttgtgatgatcttattaataaagatgcatttttttagatgctactttgccgaaaaaaaatatattaaatgttatttattttatttaataattatttatgattggtgcaaaatagaatagcactactcaatcaaaatggataatattaattaattattaattagaaaacaaatgtttccaatgaggttttggcataaattatagtattaaaatattattaaaatattaaagagagagagagagagagagagagagagagagagagttggtagtgtgtgtgatagtcataataaaaaaaacgtaggccgcacgcagtatttaacggaaggaaaaacagagaagaagaaatagaagaagagaaaggcataaaaaaaacaaaagatgtaacttcccaaactaacaaacaaataaacaaaaataaataaataaataaataaagttattccaagccaaaatgccatatgatatggtcttacttacttatggatggtcaggaatttatttctctttttctatcttcctttttctatacacgttttcgttttggggtttggactttggccttgggcttagattcgggttgtaacttagatcatatatagacagatattagatgataatatagttaaaactatcttataaagtgcacgtttttctctatataaataagtcgaatggttggaagcatgtatatggaggaagtatgtctttttttaaaaaaataaaaataaaaaatcactaccttttctttcttaaatattaactataataatggtgtttaagaaaataaatagtaataataatatttttatatgctaaaagaaaaggatatttaatagaaaaatatatttctctttgttaaattagagagatattgggaatgagaattatcctaaatttttttcatttataaaatatgactatgtaacagaatttttggtttaaccatttatttaatattttttaaaaataaaaactaacagagattttttttttttttt

SEQ ID NO: 114524 - DNA, 1700 bp, Cannabis sativa
ataaaataacactatggtttaacacctctcgatcaatggtgacacttcgatcgcagtcgaacttgtcagagatggactcatagagctgggagagttgtttgaccgtggttatctcactctacaactactctgacagatggccaaagtgatgattggagataggtactccccgagagattcacaagatcacttcacccattctagatctgtttagatctgcactttcattcagcaaaatcagatttggtcgctcaccccgtttgcccgttcttcatcttcaactgccaaccattcacgagttctgtttgttcgttcgctaaatgagattaacatcttagatttgtgcttcatccatttggtattgtagagaaaaatttccaaacttgaattgttcgattgagatttttttaggtattatttttgttgtgctttttaggtgttaattagatctgtgaagagagaaatatagtgtggtggcatcgatagttgattgtggttatggttgtggtgactgtggtgtggtagcatcggtggtcgattggttatggttgtggtggttgtggtgtgggcgtagtggcaggatggtggtggttgtagtggttgttgtgggtgttagtggttgtggtaatgtaatgtgatggtagtggttatggaaaatacatgtagcatgtttacttgaagggaatgtgaattattggtatggtattgattcctatacaatcgtttactaaattttagaaagggagaaatagtgggacacactcaaattagggagaaaataaaaagaaaggttatcttccccccatttttataggggatacctttctctttcttaatttattttattttaattttaattttattaattaaaaatgaaaaagataaatatgccctttaaaaatctataaaaaataaataattacatgctctaacaatttcaattttatcaaattaaagcatttagattacctttcccagttataataaataaaataatctgattttagttttctttccgtacattttaataaacagcataatgaaatattttttctgattattttctattttaagccttttcatttcttctattgattattttgatttcagttacagtttagtaaacgcaccaatagagttaggaagaagaagattgaagaaaagagaaaacgatgggaaaaaaactaatttattaatttttttaatattattttaattttcctattcttttaattatttttattacttttttaatatatttttaaaactaattttaataaaaaatgggtcaataaagacttatcacgtgtacatatgtgtacactaccacatgtctaattgacatttaacaacataaaatagacataatagtaaatagcaaaatagaagtgaggttcggatggttttattaccaaaaaatcagctcacgggattaagtgccacaaattgtataatttatgtaattttgtcgccaatatcttttttttatacaatttttcttttcataccaaatatgagaatttattattttttattttctatttttttttcccatattccttacttttttgtttctcgccaaaatccaattttcaaacatagcctaaggagtgttatgtaaattaacaattaacccaagatctatttgtatataacatagaacacaataataagatataataattaggtatgtgtacctg

SEQ ID NO: 114525 - DNA, 2194 bp, Cannabis sativa
ataccgtctggcagtatttttgtaaaaaaataacaaaaattagtataccatctaaatttcccaaaaaaaaaatctctctatatgttttgggcttcaaaatcggtgggcactttaggctccaaagccagaggccacagcccatgatggagtccagttagtaaccgcttttccattttccctttgttcgatcatttggcgccagagtaaccgcttttacggtcttccaaggaaaagattgaaagaacatatgttctggtacattactataggttgtcaagttaatccaatttaatggcttctcccaatccacaatttgtagtagaaaaaaccaagatggaaattaaagcagaatcagttgttattccctattcacaacatgaacagtttaaatataccccaagcagcattaagaaggacgatagagaagccaactctcctgaaattgatcaccaacaacatgtcaacacaaaaggtccaaaaattatgattaaattgagacaagtgttcttttctattaaaagggtttttgaggatcagtgtctacattataaccgcggagaaaacttggaaaccacacggatctaccaagtttggccaggaaaaaatgtaaacttatatgtgactagtctataatcatgtttgagttaaatggaatatatatatatatacatttaaattcatatatatatatatatatatagtgacaacatacgtacatgtatattttgtaggtgtttttcttccatggacgactagtgtgtggccctgatccaaaagggttgctcctaacaacagtttccataattctgtgtggttggattttttgtgtttatattggagaagatctaccaaatcatcgttccaatctcataatcacaatctcagagatactaactttacttgttagtcccttgctctccctctcgatatcatccttaataattatcttgtaccaatagtattcctaataaattttatgttacacatttaataaaaataatacaggttcttgggaatttgatcctagtaagttcaattgatcctggtattattcccagaagccaagaagatcaaatggaagaagaattaagtagtagtagtaatagtagaagtggagtcagaaaaaagaagattgtagtagttaatggagtggaactcaaacttaaatattgtcgcacttgtaagatatttaggccaccaagaagttgtcactgtgttgtgtgtgacaattgtgtcgaaaaattcgatcatcattgcccttggattggtcagtgtattgcactggtatgcctcaatagtcaattcaatcttaattgaagtcaattttaacaacttattagagtttctgatattgattttgctgtttttttctgtgggtgcagagaaattacagattctacctaacatttataatatcagctttgtctttctttatctatgtattatacttttcctgctggagaattcaccaaaaagttgtgaaaaatgggagtaatctatttgggttggtgaggatctgccctgaaactcttgctttggtcttgtttaccgttgctgcaatcatgttcttgactggtctagccatatttcacttgtaccttatatcaacaaaccaggttggctttcttttttgatcaaattcacttattgttaaaatggagttttatgtgctaattgtttgtttatgtgtgtagactgcttatgagaattttaggcagagatttgtgggttccaagagcccatatgataagggagtttgtggtaacattaaggaggtattgtttgtgggaatgccaccttctaaagttgactttcgagctgaagcaacatcaagatcatggcatccaacggctgcagctactcatgaagtttgagattaattatgaaccacacaattatgatgtaacaaaaatatatttatatattatactataattataactataatatagtagtgtgttgtatggtagcatggtcgatcgtgattggaaaaattactatgcaaagtgcttgaaaataaaatataatgatttgtacttgagtgattattttattatatcaatcgactgtcaagctttttgcatccaaataatttgatttcacccatggccggccagagggtggggcagccggggccttggccccaggccccacaatttcgaaggccccgaaaaaattaaaattaatattatat

SEQ ID NO: 114526 - DNA, 5971 bp, Cannabis sativa
tttttttttttttttgaaaattatgctcttgtttatgaattgattaaatttttttgtaatgtgttttatgctaaaagttttaataagttgtacttgttattgtacatagtgaatatgttccatagctttatgcccacattaaactaaacaaaaaataattgaaggacttaagatgtaatttctaccatatggcagacttgcaaatgcatacaagtaatggtaaattagcattgcacaataaatacattaaagtacacaatgatttatacttttttacacaattcttgtgattctcattattatgtttttttttttgttactattttattgctttttgatctcatttaatatcaatttcaccttaatgatgtaatttatgccaacactaaatttcgagaaggtgatgaactcaaaattgatgtaatttttactttaattttatttttttttgtctttaattaattaaataaagttgattctttataattttttttttttgctataaagaatgatgtcttaactcatttgacatttacaagtcttggtcaaagttgtgaggttgacttgagtatcttcaaggtactctggcatgtgggcccttgtgcaagagtagtcattttattttttttgcaaaaattgggtataacatttgcatattacaagagaattatatgctctttgttgagacagctaataacagtgttagttaaagctgttagtttgttataagttgttagtgttgggaaaaatgataaacttcaagcccaataaaataataaataaacgaagcaaaacaatttacgtagtttaccaaactaccaaacccccaaagaaagatatattttacttatcacttcaaaattgcatatgctctctatttcagtctctccacccaaatctcagtacacattttgtttcttcctcactctcaccacacaacaaactcacacacatttcttttttcacaactcactatttttctccacacgtatacctttctttcacacaaaatacatatttataaagttacaaaatttaggtatcaagacaacttggagaccaagacattccaatttttcttaagaagactcatcaaaatttggtcactaagattttctttttcctataattaataattacttaaaagaaaattacaactttacaaatataaataagtaaataatttaagtcaaactccaaacattagctacaagtttataattagtgagcttgtatccatatgtaacaatataaatagtattggattctgtactataatcaataatgaaaccattctttcaattttcaatcttttctcttctttactttctttctttttttctttctcttttccttagatctttctgttaagactttctttcactatgtctcgtagacttaacactcttgctgctattactattgtgttaatttttaagaatttctattacttttaataaaaattaaaaagtaaagaaaaatttagaaatcaaaaattttaaaaatactttgacatgaatttttttttatttttactctatttttttatttacaaaaataatttttcagtaaacataataaatcttttttttagttgttttatagtttatttatggttgtattataattggcatgagattatattttcggttattttatagtttatttatagttatcgtggggtttactttttgttgttttttagttgtttttctattctttgctgagcaaagtgtatttttataatttttaaattttgaaagtatatttttataaataaaaactttaaatcgtaaaattgtaaataaaacataaaaaaaagttacttttaaaaatttccttaaaccaaaaacataagtaactaaaacattacaaattattttatgaaagatacacattctcattgatcattgcattgcattgcatcttctacaaccaaaagctcttgctgcacaatgaagtaatcaaaatttaaattacaaccattatatctatcaagaagataagaaaatataaagagaggtaaagaattttaccaatttagcttctgaacatttgtagtaacttcttcttctgaattgctgctgttacatgagcccaatcctcaacatcattcaacagcttgaaatatgcatatctcaatgacttgttgaagattaaagtcccacaaaatccccaaaatccaaccataactcccaatgctaagcttatgtaaaatcctttggtgataaactcatcatcatcattatcattgtgattttccatagcttcattattagatgtagttggcactttgtcatctgaacaatttattggaagtggaattccacaaagtagaggatttcccatgtatgcagctgcatcacgagattggagttgagtggttgttggaatttcgccacacaaattattactcgacaaatctaatgtgttgagacgatccacttgagacagacttgggggaatctgaccgaaaaaattgttctttgataaatcaagaacatctaaagacttcaagtgaccaatctgttgagggatatgtccacttagattgtttcttgacaagtttaaggaaatcaatccaacaagttcagtgatgtctcttggaatctctccaataagtttattgctggacaagtcaatgctcttcaaaagtccaacatttttgaattcagaaatcactcctttccataccaatgccaatttctcacggttgaaatcgcttggaacctcttgaaggcctttactgctagaataagcatcctctgctgatacatgttcgttttgatttaattctttcattgctgcaatgttaccaagacaatttggaatttgtccagaaagatgatttgaagacaagtccaacaactgaagattcactaagttgcatagttgtaaagggattgttccattgaatctattggagcggacactaagaatgagaagatttgttaggcttgtacctatccatgatggtattgggccagacaatttgttctctccaatatcaaatactaacaactctgtcctgttctttagtgataaaggcaactcatcactcaaattgttgtttctcaattgcaacacttgaatgttacttaaaaaaccaaaggagaagggaattttgccagataacttgttatttgccaaaataagaattcgtagataaaaggcttttgaccaacaatcaggtaactcacctgacaattgattgtgtgagacatcaagatatctaaccaaaagtaaagaaggctcacataaggaatttaattgtgaaaagctattgttgaaaagatttagtgaagatatcccttgtactaaaaaacttggtattggtccttctaactcatttgaactcaaatctatatcaggataagttgttccatattcgtattcagttgataaattgacacttggcttaataccataaaggcttcctctaagattattattagacaaatctagaagagttaagcttgagctaaaattgaataaccaatctggaatggaatctgaaattctagaattggagatatcaagtactgaataataatcctgagtttgtagccattttggaaatgaaggccctaaagtgcaagatccaagatgtatgtaggacaactgaaagggtggaatccaatcagcagcaatcctaagaactagattcgggttagttgataaatccaaagtacttaagctaatgaggtttgacaaatgagcttcggataaaacatcattgatagagttttcagaaagagacaaaaacttcaagtgtgataactgactcatacttttggataatccactaaactgatttgagtaaaggcttaggctagttaaagagggataaaaggtgaaattaggcaatgatcccatgatatgattttccgccaaatccaattcctctaaggagaaattggcacattcttttgagggtgattcagccaaatgtaactgtccactaagactgttgttgtatgctccaaacgtctgcagttcacatattctccatattgatctcggaatttcacctttaagctcgttattggcaatatcaagatttctaagggcaatcatattcccaaaggactctggaatagaaccgttgagttgattagagctaagatcaaggtatttaagggaaatcaaatttccaagtgattttggaattattcctatcaggtgattttctgtgagatcaagatgtgttagggcaatcatactcccaaaggcctctggaatataaccatttagttgattttcactaagatcaaggtatgtaatggctgtcatattagtgaaagattttggatgaaaaccatctagatcattatagttgagatgaagatctttaagggaaatcaattccccaaaagattctggtattattccttgaaagaaattgacgctgagatcaagataggcaagggaagccatattttcaaacccttttgttggaatggaaccttctaattggcaaaaggaaagatcaagatgaacaaggctagtattatacttgaacacccattggaatatagactgagacagatggttttcagagacatcaagaacactcagaaatttagaagagttaataacaagggattgagatggtgaagaagaaacaactacatcagcagcaggaagattacaatcacttagtatcaaatttgtcatgaaatgaggaaggtttactactgcatgcacccaatcattagctaagctcatgtttgtgccactcaagtcaagtactcttaaagatgaaagatgtgaaacccaatttaagctttttggttttaacaaattattgctaagatcaagatactctaagctggaaaggtttccaatatgaggagggatttctccaactaaactagttgaagagagattgaggtaccttaatttggtgaggctgccaaggaaagttgggatgacattgtcatcaaagaagatgtggcttaagtccagatgattcaagtactttaagttgaacaatgaagaactaatattacctcttagaagatggtattctggatactcagcattactgtgaccaaaagttggaagagaaagatcaagtttggtgacatgagcatgaccagagtggttgctacactgaattccaatccattcacaacactctcttttatcttcttcttctccccaagaggaaagcatgttctcctcaacactttcatcattagcaagatggtgtttaatctttatcaatgcttgtctctctgcttcattacacctgatttttggctctgcaactccagcatttacactcaagcagtaaagcaaaagcacacaaagtacaacaacatgagggactgaactgctcatcgtgaaaaatggaatatgtgtgtggttattgataattaataatagttcatctttggagaataaataaatagaagacactaataaatatgcctgaatatttagttggattttgtcaaaataaattctttgcgttcaaattttgaaaattttccatgtattaattgagatatgtactatggaagagcagcgtctgttttactagtcaagtcttgagcaaaacaaaaagactttttaagtagtagaattcttctccgctttattatttaaagtacatttaagtaggagaatttttaacctaagaccatcttaatttcaaagctataaatatggtggtgtattgttgtcttttacaacattttacttaagtctaactccaatggtaatatacatgtgtgctaaatttgacacaactaaaaattgtgtcaaatttagcacaaaaatagcatgagccaaattttagtccataataaatactatattttttaattacctctttatcactcattaatactatatttatggactttgaataagatatatttataaaatattaaaacaatataaataaaattaattattttatatattttaaatgagcattaatgctaatattgacttttataac

SEQ ID NO: 114527 - DNA, 4702 bp, Cannabis sativa
agagagagagagagagagttgtaattaaaaaaaaaaaactaaaaagaaaaccaaaagaaagaaaaattatttttttatttataattattttttattttttaattttaaaataattttttacgtggattaataaaattgtaccatgtatatactgtgtctacgtagatgtacacgtggacaatctaacatgacacttaacacctaaaatagatgaaaatattaaattcctaacagaacacaggtattgaaggttttaccgccaaaatttgagttttgagggttaagtgcaagcaaagtgaaactattaggggttttgccacaattaactctatataaaatggttacataaaatatgtaaccagcatggttacatttacttttaatcgttggattattaataaacacttgcaattaatttataaattaactaaaaataattaataaattaccagtaatttgattgtaacctatattattttatttacttataaatttttttaataaaaaataaaaatatttataaatattaaaattgttttattaaaaaattttaattaaaaaataatttcttaaatatagttaattataatcaatttaagtttaaaaatataatttttaccacttagttacatgttatagcaggtcataaaaaaatgtaaccatcatagttatatttttaatgtaaccataatagctacatttttaatataaccattgaatagtcacccattgttattattattattttttgaaatcgacttttttttatctcctatttatttatttattgagagaaagatcaaactttcattcaacagagaactaaatgacatagttcattacatagctcaacgataagaaaaagtaaaattaatcctgataggggcgagcaaataatagcaaggtcaatataccaacaaatttaggtgcacgcgtccatggtagtcataattattgtaaagtaccatattaccataggttgaaggtaaaaaaatagaacaaggatacaaacccccaaatctctaaaaagagaaagtccatagttggaccaaaaaacaaaataaaacaacaatactaaataattaatatatctaaaacaaaataacacaaaatgaaataagaaccatagatcctagttcaattggagaggaagagacatctagccacgagcaaaattttgacgccaaagggaaaatgagaccggaccacaaatccagcacaaccaatccccatggttaaaacgaaaggacatggaaacaaatccagcaacgtcagctgagaatggttgacaatccccatcggagacccataattgcattcttcgaatcctcaaacaaaaatccaccgacgtagaccacgaaactccaaaaccatcagcctcccacaaaaggcctctccgtgaaagcctacccctaattggctttcccattttcaaagatcaaagatccatggccattagaaatgccatcaacctccctctcgaccaaagaacaccaaacgcacaacagggccgacgactgggtccttagccaagagaaaagaaaaaaaaaaagaaaccctagttcagaaaaagagaaaaaaaccccacagagagaaaatttttttacaatagagggttgaatctcttactttttttatctcttagaatatcaaatttacccctccaaaatgattgttcaactaaatcaatcattttagtttgtaccttctcactataataatgacataagggcattgacggatctagacagagtgtctcttgtaatgaccgtttgactttatttcccagataattaagaatttatttaatattttgttagtgtatgcctcttagtagataattaaggcttattttcagaaatagcctttagattattatttttgtcaattatagagatatatttgaattctatgtgtattacatatgttatatatgaaatttcatgtttttcatattttatgtcggtaatagtagaatgcgacgatttggtcaatacagttactttgatatggtaaagtatcttaaatttagtggggtaagatagttgggcatttggaatattgggactttttagagttatagttttgaaccattttactcctaaattgatagattagttcatgactaagtaaaagggaatattagtcttttacctttatttgttagtaagtaagattattctaatccctaaatattaatgcttttttctttttattgttgaatttaataattagtttatctaaaaccaagaaaagtcaaaactctctctctttttacatttttttcctctcagcctcaccctagcaccacccaaaccagaccaaaattttaaactttcaagcagaaattgacaaggatttcaagtgttagcaagtgattgtctaaggtaagttccttccttctatttctctttgatttcctagcaagaagttaggttttttatgcatgttttggggttttggtgctgtacgagatggggttggtttgggattgttttatggagttgatttaaagttaattatgttgttatatgttggtgttgttggttttagcaaagttcgatcaaggtttgagccttcaagctcaaacttgatcctttaatggtgaaattgattttaagagcttgcgactgtgtttagttgttgaattatgtttgttggatccaaaataggggttctggagctttgtagaagttttggagttcttttggagttgaaatgatattttggaaaaatctatagcagaaaatggcagactgttttttcagaaacggtctaccatttttctctagcagtgtctcagaaaaacggtctaccgttttcagggaaacgacctgccattttttggagattttcccaaaagcctattttgtcatgtttcatcaataattacgatattgccacgctataaaattgatagggaaactattagttttgggtgtaagtccccaaaaagtaatttagtgggtcacttaccggtttatgtaaattttgacttaggaccttaaatcgtcgagcaacagtttccactcaggttgaccgacacacatgaatttgaaattgaggtaagattagtataatgatatgcatgcttacatgtttagcatacatattttattatagcctagtagataacatatcagtagagcggtattagtgtacataaagctacaccgaataccgaaaaatatatgttttgaaaagtatggattgatgctatcacatcagtatgacctgagaaccgcgagtataggttgatattatggtcaattgtactgtcgtatgaacgttccagacctggtacattttggatgcatgatagggttgtgattaggtgtatgggcatctgatcacgatctggttttatgtttatgcttatacttttcttactgaatttgttgaatcacatatattatttacatgtgtaggtaaaggcaaggcaaagatgagtagcagtgagcttgagctagatcaagattgtacatatcaagacagtaagacatggagtgttcacatcttcgggacagttgggcttttattttgatagttgctaggcgataacttttataatacatgtatttcaaaagctattttaacttcttaaatagaatcccaaaatatgtatatgtatatatttatttaagtttatgttaaattatgaaaattttaatttttatgttttccaataaactttttgattagcaaaggagtccataataattagaaaatacagtaacgtgcctaatctagtagggcattacatctctagacaagtaaaaaagcaactgcctctatttgattttttatttattaacataagttacatgtatttacaaaaattacaaaagcaaccgtctctattagatgttactttgtaaattaacctatgtggaattttgatatttaattacatcatagaagtatgacatataatagtcttagatatcacttgtactctttagaatctatatatatctataaagaaatacaaacaataagtttatgtcaaatcttaaatttttttactatattttttgtgaggtttttttattttgtttaaaaaataatcacacaaataaaattatgcacacactttcttcttcaaatacattagaactaattccccacattatttataaatcatttagacattattcatatgggctctaaatattacttttagtatgtcatattgatttgtttaagattattcttgttaaggatgattaataaatttttatgatttatatttctacaagtagttatttataatttaataaatattatatatatttattttaaaaaattcaaactaaactattttaaatgaaactaaataaactactttttatctattttttattcattctaaaattatttttttttaatttattaaagacgactaagtgaaaaagaaacatatatacataagatgtatgtgtgaagctatagacttacaagttatcatatatgttgacagctaataagtgtaagttttggagttcttagtccaattaatgcttaaaaagtattaaccccgtcatttggaacataagggctgagcatcggtcggtttggttcgttttttctatataaaaaattagaattcgattttcgatctggattggtgtaatccgaaaaccgaccgaccaatccaaaacctatcttaaaactgaccgttttgaacctcggtttggtcggt

SEQ ID NO: 114528 - DNA, 1899 bp, Cannabis sativa
gagattttaaaacatctaacatcttattggatgcggtgtgtagtgttgtgtagcttatcacagtttacaatttagttgtacttgagacctatttgcttaactgtagacttaaaatttcaggattacaatgcaaaactttctgatttcgggttagctaaagatggtccagagggagataaaactcatgtatctacccgggtgatgggcacttatggctatgctgctcctgagtatgtgatgacaggttagtggatacaactcttctctcttttacttataaatggataaagaaaaatatgtagccagagattccttcttttatgttttacttaattattacttcattttggtatgtttgttcttatgtcaggacatcttacttcaaagagcgatgtttatagctttggagtggttctacttgaaatgttgactggccggagatccatggacaaaactcgaccaaatggagagcaaaacttggtggagtgggcacgaccacatcttggagaaaggcgaaggttctatcgactattagatcctcgacttgaaggtcgtttctcaatcaaaggtgctcagaaagcgcttcaattggccgctcattgcatcaaccgtgaccagaaagctaggcctttgatgagtgaagttgttgaagtgctaaaacctcttcctgagatgaaggacatggcatcgtcctcatcttacttccaagctcttcatgtagagcgatctggctcggctactagaatgcaggcagggcttgctaggaatggacaaccaacaagaagcctgtcagcatcaaatgctcagcaggcttctccgtatcacctcaatcagcgaaactggtcaccgaaaccaagagaacaatcttcttcgaagtgagtgctgattgaactttttgatgataggctgagagattgagtaactaatggtactccaatcttgatgaccctacttaaaggctaggaaattgtgttgaaaaagggtcaaagaatgatccagccttgtttttcatttcatttaaaaatggtacagaaaacacaatttaatctttttggatgcttgtttatggttgaagaaactttagtaaatatcatatatcatatatgcaattatattgcttcacaatattggtgatttccccagatattatgatgcatataatctgtttttccataatatcatcattttttttttagtttagaacagagaacaagctctattttcagaaagaaaaaaaaattgaattttagaatacattattattattttcattattttaacatatttagaatttgatattttatatacatggatgtgttaaaaattgttaaacactggaataaaaaaatggtaatttcctcaagaaaattaaagaagtcgaatttaaaaggaaaataaaatcctctttatttatttttaaattggaagattgaaaatgtagatagtattacaaattcaaaagtactagaacatggtgacaagtagcaagaaacatcattgggtttcatgaattgaaacaatgtcattttcaacatccaataaagtttctgctgggaacattagctgttcaagtgaaatattactaaaacgtttggctaacaatcttttgggagcaagaagttggtgagaaactagcttcattgttggtcgacaatttggtttggcatttaggcatgcaaacccaagtgtagcaataagaacaatatcaccttcaataagtctatttcttggtggtgatgggcgatggtctattatttcagtcaataacgtgtgttgaatagatgatgaagaagatgacaatttggacaaaagttctccaggatgtttacccattaatgtttctagtaccactacaccaaagctataaacatcacatttctccgttatcgccattgtgta

SEQ ID NO: 114529 - DNA, 1871 bp, Cannabis sativa
tattattattattataccttaccttttttttatgttacacgaaattctccattcagattagaccacttgtattatgtacatgggtttatattaataagtagggctaccaaacccaatgctgtaaaaacaaattaatgggttaggtaccctgataagagatgtatcttctagtctagtcaagttaatattcatattctacaataatcttatcttataatagtggtttatcgtttgctaaaacttgttattttttgacaaagtttgttaaaacttgttaatacatctaaaaattggaataatcttcatgagaaagattagtgatgctgctgtgtcctcttttgtatccaatgcgcttgtgggactgctgtcttatctaaaatgaaagaaaactttcatgattttatacaaaaaccccaaaacaatgcttcaaaaaccccactactacaatagtatagagtagttaatagttatgtatcaattaaagatatatagagtatagcacttataatattatattataatgataataaaggccatttttgtatggcaattttttgggcttactcgtttcataagggggaaaaaagtacgtgacaaagacataataccaacacagttatgtatttctagtatgattggcagataaagaatattgtgtcaaaaaaagagaaaaagaaaattgaaaatagtaccatacaagttactctttgtgcaagcaaagctctctctcaaggggtttaatataaaaactactctgttttccttccaacctttcacctaccatgaagtactagagccaatttcataatggggtggcttcactcactcgtctccccattgaagaagctttgggatcgtctacactcacagcatagaaaacgtatgtaaatcttaattttttgctagatcatgatcatgttatatgttcatctatttctttctatcttttcttttatttcttaatagatttttctcaacttaatttcaggtagagggatatatatattatataaagatgtaaaatcatgtccttgtgaagatgtgcaagttctatggtcaatattggttgaatcagctggctcagcttctttgcatcagaatggaagagtctctcctgcattgtaaaaataataacagcctaaaatggcagaagagatgatgattcaatctcgatcttgtgtacatgattttcattacattatacatacacatatatgtgtataacgtaaataattatccttgttgattttcctgttttgtgtggaaaaattgtatattatttgggtttcttatagctgaatatttggaacttgtttattactcgaatacatatagcttcactttagattttttttttttttttgccagaattgctttagattggaatggtcagtttattttcttaagaaagaaatagaggttgagatttcatactatagaaatgtacaccttaccacaccgaaaccatacccccattatgtctttgtctagcttgtttctttctgtgtgtggtcctctgcctttggctttaccaaaaacagggattttattaaagacttggccttttttttttttttgatgagcttaaagacttggctgttggcatacaatgcttcaaccatttattcaattctcttggttcggtggcactgaaaaaataaatgacattgtttccccaaaaaattaaatgacattatgacaagagtaatgatattagacaccagtagtggtactaaacattacttaaaggtaacgccttataattggttaatgatatttcataaaagttattacattcaattatgagaaatgctaaagggcaccagtggtgcctaacaccctcttacgtgtcaatatcgctattggtccaa

SEQ ID NO: 114530 - DNA, 2139 bp, Cannabis sativa
gtaaaataatttccaacacgtggttggtttccctcatgtttagaactcatttttttgcttccattacggtggtccagcagcggcaatcttagatggacgttggtgattcgttggggttgggcttcatggtggagatttgggagtgcctttgtccttgggtctggggtgcaactcctcttggtggtatggttgatatgtgtggttgtggcaataccctaattctgatttgtcggtgtttggcgatcttattaatctcttttggtgtttttatttccattatttattttttagtggttgcttcttttacttgtaagcacactgtaaatttaaatttagccctaattaattcatgagaatgaaacaataaattagagattagaggaagcatactagagtccatagaatcgaccattgaatggtatgatcttccaatttaattctctatccccgcttgttccccattgggcatggaacgggaaatccccacaaggtccaatttatgttgaacttaagtttatattaaaaatttaattatataaaaaagtgaattacataaaattattacattacaaattatttattattaaatatacttatttttattcaaaacataacttaaaaatttatatgaagttactaatatactagaaaaatacataaaaaatattattaaagaagtacttagatattaaataggtccgaacgggttaggggcggggaacattaacatttaaggaaaattatccatccttgccccgttctttatttagatggggaatcctcacgaagccccatcccctttgggggaatgtgcaaccctagttgcaaacacaaaggcttctcaccaaaatttgagtgacatattggcttgagtaagaagagtaagacatgagacctttgcctacaacatgcctttactttctttctacaatactttattgttgatgagtgtatggatataattttattccaacaatgttatgttcttaaaatagattatattgaggtttatattcacctattaggttggtcaaacacttttaatttgtgtttgcaaaattttctcaatgcaagtattaaattgtttgaaaattagtttctgaaataaaaacttgaaggttacaaaatatataatatagattagtatgttaatattttcatcaattttgctaatatatattatatagtaagtttttataattatatttaaaggtaacataaaaagaaaaagtatataaatgtatcttaaacaatacaacaataaaatataaaacccgtagatttaaagtagttaatcaaaataggtaatcaaaatatatatgaaataattttatcttaaagtggatatttttatagaaaataacaagtttgtgtgttattaatatcctaagcaactaaatcaatattaggttactttccggttcaaacggagtgtgttgctcttgtgatggtattgaactggattttatccttagattttattgctcatatagttgaaactgattgcctattagttgtatctgctttcaataaaaggtaatatttttttaatgttcttggatttttgttagatgatttgataagtttattgtccaaattttcaagagtatccctaatttatttcgttgcccgaccaatatagctgcacatatattagaggtatatgttctttggatgaatgaacaagttgtctgattaaacaactttttttattgactttgggatgcttaatttattggttttttaggctgtgaatcattctgtttttattcaatgatatattcattatttttttatttctttaaaatgaaacatttgagaacgtgagatgttaaatattttggtattttggtatgttatgtcgacatagtaatgttattattgtacacaagttcagtttttagcataaaattgtagaagttcgtattatatgtattgggaagtttacatacattactaactttttttaatttattacattctactgtgacacgcggattgtaacattttaacttttttttttattcggcagttactgtcttgattcaaatcttatatattatttatggcttacatgtgtcttcactgagttttgccacttcattttttgaatttttttttttcaaaaaagctttgatt

SEQ ID NO: 114531 - DNA, 1967 bp, Cannabis sativa
aaattattttaaaaaaaagttatccatgaatttctcataaacgcaagaattcagttatataggcacactttatatagaatagatatattaacttaacgtagatatatatagagtgatggagatgataaaatggtagtagctaactaactgtgccagaataatacaactaagacttagcatactaacagatttgcctttgcagctgtacataagtttcgtaacctcaactacaggaaatgattaagaaatattaatatatctttgctgtaaagttaccttttgttttcactcttttccaacatttattataatttatttgtattgtaattggtagtttttatatggttggtgttgtatcgtgttgttgttttgtattattattttattttgtatggtgatatttggttatgttaatgtttattagtgtgttatgtttaaattttattttatggagttgaccaaagtttgacaagtttttcttttaaagttttcaagttatatagaaataagtttttttcttttcatttttattcattatttttttcactagtattatgttcttgcttttgttttctttaatttatagggaggtttgtagtaatcatgtaataaaagctctatttttagccgatgcattggattggtctcctacacttgggttgcctattagtcaatttgagtgtgattatttagttgtgatttatgctttctctaagagatcttatttttggttttgatcatttaggatatttattagaggtttttactaaggcatctctaatttatgtatgacacacatgaattaacaactcagggtgaatatcaaactaattttgatggattaataccattttttttttctctatgatatctcaaactcttattatattcaatgaatgttcattgttcaatacatatatatttatactaagcgtggagatgtgccacatgcacgtaaccccatcaaaacttataagttataatcatatatcttattttaatcaattatatttgaacaaagacataatgtggtataggttcacttattgaagttaagattatcaatcatcctgtttaaatgtaagcatatataatttgttatactattatctactaataaacaaaatttagaagaaaaataaaataataattaacaaaaatttatgaaaaatagaaaataacgacacaaaaaagattactatcatatgtgtgacaaaagattgttaaaaaaaaagtggaaaaggcttaaaaaaaatattttaaaagagaaatggagaaaaaaaaatgagagacgttttgtaaaaaaagggaaaaaaaataggtgaggtttaaaaaaaatgacaagaacattaataattggtacaaataaaccaaaacacacaactataaacatgacaaaagaaatacacacacaaattactaattagataatcttatttagtttgagaaaatacaaaagagcaaagactataggaaaatctcacctaagcagtgtgcaacaagtaaaaaagaaaaagcattactattgagcacctgtaatgacatcatgattagattatggattagcaaatgtaattagcattaactatcgatatttaatgattatacataactttatatttcttatgggtctcattttcagaaataggcattagagttataactttccaattctggaaattttattaaactctaagtgtattaattaagttataagcaaaatctacaatttttaggtttttgcttggcgacgatagaatatgcgacatatggctgatttagtcacatgagttagtttagaatctttttttagcagggtatttataagttgacatttggaatatcgagattaggcaaggttatggtgttgaactatttacccctaagtcgtttttgttgggttttgtaccctcaataaaacccattacaatttgattagttatcaatctaagaaatttgaagtgatt

SEQ ID NO: 114532 - DNA, 5182 bp, Cannabis sativa
  modified_base (4831)..(4835): a, c, t, g, unknown or other
  modified_base (5134)..(5135): a, c, t, g, unknown or other
gaagatcccttcaactcccagctgcctcctcccccgccaccactaccatccatgacgggcttttcagctgctgatgagattacttcagctgcagaagagcttgcctcagctgtagaagagtttgcttaccaccaacatcaacaccagcaccagcaccagcaccatcatcttcttcctaattctcaagaagaagcagccattaatatggagcttcagcaacaactcgcattcaacatggacaactcttacaacactgatatcaacaccactgctcagttggtgtcatttgatcatcttcagcatcacaatcatcatcatcatcagcagcagcctcaatgggataatgaagacatgtcttacaacaacaataatcatcgccataatcaacatcatcaggagcctgctgatctcctcagcctcttccacttgcccagatgctcggccacctcctcctcatccatcaccttcaccaacccgaccccaccgaaaacagccaacttcccaaacacttccctggcctttctgggagatgttccaatgggaactgacagccctccttcctcgtctattctgtacgacccgctgcttcatctgaacttacctccgcagcctcctctgtttaaggacttgtttcagcctctcccaaatggctatgcctttccctcctcatcctcaagaaatggatccttgttcagtaatggtgtaatggatatggatggagaggggagtggtggggtttatcaggatggacttgaaggaatgcagtttgaaagtggtgtgttggagtttgcaagggacagatcttatattgacagaggaagagatggcagaggaaccaaacactttgcttcagagcgccataggagagtgcagatgagtgacaagtaccacgtgttaaagagcttagttcctaacccaactaaggtaatttgtataaacaataataacctttctttctctgatgtattcaactgtttaacctctacatacatacatttaatttgttagagatttaactgtatctctgtgtgtgtgtgtgtggtatggttaaaagaatgatagagcatcagtagtgggagatgcgattgagtacatcagagagctgaggaggacagtgaatgagctaaagatactggtggagaagaagaggagaggcatagaggctaacaagaggcgtaaatcagaggaagatactgctggagaggtagagaattgcaacatcaagcctgaacctgatcactcctacataaggagctcttggctgcagaggaaatctaaggacactgaagttgatgttcgcataatcgacgatgaggtaaccatcaaactcgtccagaggaagaagatcaacctcttgctcactgcctcaagagttcttgatgagcttcagcttgatcttcgccatgtcgctggtggacatgtgggagacacttacagcttcttgttcaacaccaaggttagttggttctactctactgacctatttttcttattatctatctttacaatttgactttgtcttctagagttggttggttggtgatgatgatgatcttggtgtgtgttgcagatatatgaaggctcttctttgtatgcaagtgccattgccaacaaactcatggatgttctggataggcaatttggagtcattcttccacttccacctacaaatagctattagctatttgacaatctaagatgttatcactttataatatatatgttacagtttaatatgaagttggtagactgagagacttattaatagatataataaaccttcggttgtaggaatgatggttttagacctcattctgacaattgggggaacatacatattataagtagaggttatggttattagtatacttgtgttgtgatctcttaatgctactaacacttgaggaacacttgaagtttggcttattttctatgagaataattttcatctctatgctaaggcttccaaagagagctggcctagacttgaagctcaatctatatctttcttttcttttcttttatgaacaaaggatgcatgcatgaacaaaatttccatgacaccttactacatgaaaaggttttgatcattttgttctaggagaaattgcttctcattgtgatgtattggtaaatggtaatggtaaccttgggcatattggctggtctagttcatcttagtgttcacccgtctcaacaactacaaaagactacttgtgggaaatattgaaaccgttattttcaatggcatctcttgttaaatacaacactcaagaatgccttctattacaaggggatatcagttttataattaagttaaagaatgataaaatgcaaccacattagtgtaaagtatcaaatttgtgatgcttgcgattttagcccattaaccacgtaccctttacacaccctccttttcttgagcatatatgaaatatgtcgcttcatctacttatcaagcagtccagaatatgaagaataaaattatttctttgtgatcttgggtgatttcatggaaaatcaacaagaacagcaatgtagcaatggtttaggaatgtgaaatgcctcaacgtgtactagaaatttccttagtgaatcatcatagactcatagtgctaaaaggagcagtaaaggaacacattacatggaggctgctaatgcccgaaaagcacaaatcacatgacaactgctttcatgatgttaaaaactctaacttattgcctcttgctgttgaagactccaattggtacttcatgcagctcatgactttgactaaaatccaacaccacctatgctgcagttcagattgttgtttgttgaggtgtcctgtaaaaaaaaaatctgcataagaagatcaaccggttgtctctgtgtccaagaactttggttggatatataaaacattgatgacagatactatgacaaattctgcagcttatcattcagcaattctatattgttccttcagacagtttattccttcttcggaaaccatgcaagccacctggtttggatgataaatttgttactgttgctttggtggtcacttaggcaatgcagatgtctgaaagccacttcttcgattgaagcagttgagggggcacgaaatgggccttattgtggaagtctcttgatttctctcatgttgcaggttggctactctatataatacagtactatgacagtaaacataagagggcttgatagtgtgtgtgtggcttggagaacatgatttcaagaattaaaatgaatgcgattatgttagtaagttacaatgtcagtaaagtgatgtgatgtgattcatatgtttgtcaaagttctgaaaaccatacatactatcaaagctcaagtgatcttccacttaaggtatgaagtgaaaaataagaaagtccagtacggataaaatcaacaaatacaatatggatcttgcactcaagtgctttgtaagaaaatatatgtattgttttttttttcaaaaaaaaaaaaagtaaatctctgtaaaatctacaaaaatggaagtatccactgttaatacattttataaagcagtttttcattacattttactcggcttacaatcaaaatacacaaataccttccttattgtctcattttacaccccaaaaaaaagcaagctcctaaactcaatgcactgaaagtagctcccccgacaaggaggaaagacaaagagatacctatccagcaaaaatgaataaataaaattcagaggagccaatccatgtttctatcttggcaagaaattaagacagaataatttgacaatatattagtgtttcaagcttaagtaaattacaaccacattgaacgtaaggcagaataggttatagagaacatatagctcatgtacagtaaaatattatttagaaacctctcctaataaagcaaatcaagtaacattatcattgatttgattcatagttaacacacaacataatatggtgcataagcctaaatttaattcaatttattatgagcaaacacaccatccataacaaaataataataataagagtatatgactctcccatgaaagttttccaaacatatctttcgatgattatgctaaattaacacaacaaatatacccaaataaagtttgatgtcaagaacgaaacttcaatctctgcacattgtttaataaagaattgccttccattaccacattttctccctaaaatttacactttacaaacttcaagtacaacccgtctgtgtaattgattcctaaacagtccttacgcaccaaaatcaatgaaaacccaacaaaattatagtcagaagaaaataagacttacaagtaagtataaagaaggcgctcatattaaggggagtttaggaatttggccttttcttaggagagaaagagtgtgctcaggtacatcaataagatcggcaatattgtggagtgatcgctcttccgaagccactaagaatatggatcgagcctccgccttcttcgacaaccgtgcggcccaagtaagtggcagctccggcgagttgaggcttcgcaatatttgacgatacagagacagaacacgtcccttgttccgggccaaatcctccgccgtcgcccatatcaaacctttcgccattgtcctctcaagtcttaaccaagctaattttcaaaccaaagaagaataaaaatcaaccgaaataatatatggaaaaaatctaaccaaacaaaaaaattggagaaaagtttcacttaattcaatctaatttaatttgcaagatgagatgtattagattaaatgttgatagacaataattaggttatgatgttaagtgtaatataatatatatatatatnnnnntatttatttaattttttttattaggtaatatattcttttaatttttgaaatagagttcgagattttgatctttaagaaaaaaaatttaattattggtacattagttatgtatatattgtaatttattatattcttaaccaaaactcacataattaaatttgagtatgtttatatatagatcgaatttataaatttgatataaagattttttattctcaaactttacgaaaaaatatagtgtatgaatcagtttaccataaataaaacaaaaaataatcaattccttattacaaccattnnaattttaaatataaaataaataataataaaattaaaaatatttataa

SEQ ID NO: 114533 - DNA, 4179 bp, Cannabis sativa
  modified_base (1225)..(1232): a, c, t, g, unknown or other
aaaatataataataatatggagtgtgagttagataatggtaaatggcatggaagtgattaaaatttgacatattagagagaaacgtgtaggcaattaaatgagtaaaacaaaaaccgtatatgatgtaattatttaaaaaaaaaaccgtataaaaagttaaaaaaaatggtaaaattgaaaactaaaattatggtaccgaataaatgttgaaaaacaaaaaaaaaatgacattttatgtaaaaattcagaaaaaaatagtgtcttatctaattattcattttcaaaacatatataaatatagctagctatcaaaccccaactagtttctaccactctaatagaccaggcccatttccatctcaggagtaagagcagcaaagcaaagtccagcccaatttactatgcatggtatatctaataagatacaaaacagaagaaaaaaagacgttgatatttttctttataataataaaactgcatattctgtaaaacttttcaaaaattaattgtgaagaatttctatcataagtagtatttttgtttctattttttttaaaaaaaaaaattgactcgtgttgtggtgctcaggtgaagttatttgatccgttcctatgattttttttttggtaaagttgatctgttcctatgtattaactagttctaaataataaatagggatagactacgtaaatgttattattcaatccacaattattgcttaacgagacccgtattgtgttcatacgtaggagttgttgggcttgtaaacaaatgattaataattcaatttagtagttaggaacaaaagttttcacattaacaaaagttcaatttagttgcaatatatacataaattttaaggaaattagttacaatatttgatgtagtagcagaggagaaaatgacatatggtatccacctacctagtttgatggttcacctctacacaagaaatactataattaatattatatatatacaatagaagttctatttaataataatctattcaataaaataatctcaaatttattataaaaaaattaaatctcaatttaagtcacttataaataaaaataaatacattttctaagtctcatatgaataaagtatacttttatataaaaataattacatctcaataaaatatatatttaatataaatttatttatgtaaaattaatatttttttttttaaaaaaaattataatacatgtataaatnnnnnnnntactcaaaaataattctattataatgtaatattaaggatagtttattgttattattgttacattaatatttttggtgttttgaaaactctatttagttataacctttcaattagaatataatttacttagtttcaagtgtattcttggatagagattctactatatatgaaagaagttttaatggttacatcaaatatgtaaccatgatgattacatttacttttaatcattggatcattactgaatggataaatgtaaaagttaattaaaaataataataaattattataacttgatactaacctgattctattttatttttaaaaaattattaattaagattaattttattttaactataatggttagatttatttttagtcatttgattattattaaacagttgtgattaatataaaaataaattaaaaataataataaattacttataacttgatactaacataattttattttatttattaatatattttattttcttataaaatattcatcaaaattaattttattttaaactacatttaattattaattatgtttgttcaattagttactaaagggaaattttttaatacatgcttaaaataagcataaggtcttttaatattctatcccaaacaatataagaatttaatactctaaaaacccttaattccaataataccctccctatttgaaactctcactctccctctaactctcattctctcgtttatctatctttctctaactccctaaacccacaccaacccgattgccacaaccatttgccaccaccggatgcaacatcgatgaaacccaacgagcccaacaaaaccaccacatttgacgaaaccccaagcccagacccagatcgatatcgtgaaaccaaatttaaaatcgtgaaactccaaacacacatctaaaattgcaaaaaaaaaatatttttttttaaatttttttaaattttaaatgggtttttaggttttttttttgtttatgcttcatcgtaaggaaatttgtttgttttaggttcaatttttgtatttttgtttgaatttcactgacgcctgttcgagttttgagttttcagtcaattattgacatgtcgcgatattgttcgtgacatattttgatttcttttcaaaatgttatggtagttttttctattagcgatgtttcacaacatgttgcgacgtgtttacgagttctttttggtcagatgtgcctttttaaattttagttgtttagtgatagtttcacgatgtattgtgatatgattggcgacgttggatgaaatatcccatgataatattgtcattatacatcattaattgtatcgcaagatatgccgccaacatgtcgtgaaatatcgctaaacactaggccacgtatctgtaattctattttgcgatgattcatgacatatttgcgatacatgttacgatattcattcttttttttattattatttttaacgaaatttcttacaattttgcagatggctcctgaacttaaacgtccaatttctcagcattttataggacgtcttacctatcggggtacaaataggtttagagatatcaaagtcaagtttacagagcttgagttgattgatacaattaaggctagccctttctgacacctctgggaagctggagagttgactttctctgacgctttggtccacagcctcctcttatggaagatgaaagttgataatgaaaaggaagatgaggtttggtttcatgtaggcaaaaatgacatgagatttgggcggataaaatttggagttattaccggcttacctatgggtagtgcccctataaagaaagaaatagaagccaagtccaaagaccatctagtcaggacgtattttgaagggaaaagttatgtgcagttggattcattattgctccaactacagaggtacgaagtaaaagatgatgcctacaagcttagactgattgctttcattgaaggtgtattagtatcaaaagaggaaaatgtccaagtttggcctgacatgttaaaatttattaacaatcttgaattcttcttcaagtatctgtggggtgagcatgcttttcgtaagttgatgcagacattgaataagaatatgcaacattacaaggataatgttgacaagaagaatgggaagaaggttgcttaggaggcaaaatacaccattagtggctatgtacctgtcattcagtactagacatatgaagccatagagaaagtgggcaagaagtatgctcaatacagtgggatcaagttccccataatggtaaactggaaagctgtggagggctagcaaaaacaagatgtcaaggcaaccgacattgcactattgttcaacactcaggtatgtttcttttttgttctgcaagattttttttgttaattcagtaaaaatactgatttaaaagttgaattagttattcgcaacttatttcgcgacgtattgcgatttcattcgcgatttgtcgaagtatagtgctttttaaaaaattgtcttctaatttgcgacttgttttgctatattatgcgatgtcatctgcaataattttatgtttatgcttactttttaatttgcgacttgtatcgtaacagtttgtgatttcattcgcgatttgggtacatatatttcttttaaaatgttggacctattttaactacatgctattaataattttgcggcatgtcacgattatttacgacttagttcttgttgtgatattttgcacacacaagtgtacgtatcgttacaagtagtaaactcaccaagagtgtggtcgatcccacagggattgtagttaagtaggttaaaattaaacttttaattctatttggttaaataaaaattaaggaataaatttaaaataagaaaactaataagaagcaaataattaaagaaaattgacagttaataaaaactagggc

SEQ ID NO: 114534 - DNA, 3772 bp, Cannabis sativa
attcatatatattcccagagtcgaagacagagagagaagaaaattaaaatgggttggtttgtaagagaagggagcagttcatcatggaaagtagggtggacagaaagaacacttgcatcgttaagctttcctcctcttccattgttggcaatagtgggaattgttgtcgttttactctccgtttcgtcgtacgccaattacaggtcacacatgcaccaaaccaagatcgcctttaagatattcctcttattcttgcctttgctcttgattttattggcaaactctgtcgccaaatacggcaccgttttcgtcattactccaaggacaaagcgagagtattcttctgaaggtgggaagaataataattctccttggggtgtggccatgctacttgttctacttatgcttttgatctcttataagtcttattttcattctaagtggtggcctccaatttggggatcctactagttttctcaccatattcccctcatctattacattaaataaaattgtaataataatttatagtttttttttatatatatatctgaagcaaataatcttttttctatattatcaattacttcactagttcaagttgatcaaattcttaattaattgtattcttatgtcaaatttatactttgggagaacaagaagaaaaattgatattagttaacgatattttataatagttatcaaattaaattatatggaatccgatactttaattctaccaagagcgatattataacttgaagaatgttaaacactactgatgcccgacctttaacatttttcgtgtagtcgtgggcaaatcgacacaggaagttaggtttcaacttccctttggcttatagtattgaaaaaagtgcttgaattaaatcgtgaattttgatttgaaaaaccaactttgccatgaatttctcataatagtatgggagaaaggtccaaccctatacataatagtcagtgggacttgtagtccttaaagcacccacaacagctaatgtataataactacaaaggttaaaaataactaagagttaaaaaaaatgtcaaaaaaatacatacaataaatgagctaaaatagctcaaaaatttactttatgaatagttactgaaacatgtagaggtgatcattagcattaggcagaagaacatggctacacaacaactcttactctagcaaggtatctagttccacaccaatccaccccattcccaaacaaatgtttcaaccaaataattggtgcctactccttaactaaccgaaatacataatttacatgaaaatcacaatataaaaaagttttctaatcacacaaaggatgtgagttcttcaacttgggaactttgaatgtggctgaaaacagttttggagtcactgacgtgggcacaacatcgtcatctgcctttctcttcgatcttttgctaccctgatcgcaagaaaatatcataacatcaatttatatagattaaaatacatatgttttaactcaaattttcaaaggaattaaacatactaggctcattcagacataatattgaaaagatcataaaaactaatatgttcaactttttgtcaagaattatcttttacatacaggatgagcagattttgaaaagcacaacagaacagtttaatttcataccttttcagagacatctgtagaatcagtatcactcgtcttgccccacaaattagaagtttttgttctacttgtgcaacgagtcagtacaggggtaattgaagcacttctagactttctcagaagatctacttcctgtgagagtctgccagtttctgcctttaacttgctagattctttcttcattttatttaactcacttgttaatctggcaatacattcatccttacaattattagatgactgtaattgctccatgcctgatataagattctttagtttctcatctgcttgttcaatttcagaattcttactccttaaatttgtctccaaaatattgtactgattccacacaaatgtcttctctgccaatagtgcagatacctcagattgtttttccaaataaagtttatcatattcctgctttaaacttcttacttcactttccaacttttcatatcgatgttcttcactcttactatttcccaaagtctttgtatttctctctctgactccactctgtaaagaccagagagattatcagcgtgtaaccattaacagcaaaaatagtatataaagtatcacaaagaataaagaccaattacgaagacgtacctctggctcagagcacttcaatttaaacaccttaaaagcttccaactcagtttgtgtatactctgcagtgatagagcgctctaaggttataaagctaaaagcagaaactcaaataaagtattgcatggtctctgctaataataaaacattacaaactcatctagtataaagttggaacctcatgaaattaggtgaatgtgggctaacaaaagaaaagcaaattttatacgtgaaaaacaaaatttagccatgccaaagaggaagagtctcatagtgacagtagaatacataaaacgcacaaacagaccaaagaacttttgagtgttaggtgatgtgttattctattctattcagttccttagctcccagatgctttgctcacaaatgccaattctcttccttcttatcgagctttcttgaaatgtaaatcttagctactagctttattggagattaaacaaatttgggggaggaaataaacttcaaattcacccttattcccatccagaacaaatcacaccaaaaaaaaaaaagtgaacaataacatactaaggcaagaaaactaagcacattacaagtattataaagaagaggtttttggtactgaagaaagaaagagcaaccaacctaatcttagtttgtgaatatgcgcatccctatgcttcaaacccataaccaattcagccttggccaattcaagcgagcctgtcatatcatgaactaacaaatcccgcctcgcctgcacacgaggtaacgagagaatatattttttcaaaaaaaaaaggcccgatttttatcctataaaagaaatcccaagaaccggaaaaccctaaacataaattacctgagaaatttggtcttccaagaggcgaatatcggagacccatcggtcttgttgcattatgatacgatcttcgaggattttgcgctctttggcgagccactcaagttgaatctgctgggtctgcaacatctccaccaaagcgttaaagatattttgccaattttgctgatcggagggagctttaggccttctagttctagccgtgcccattatgaaattacagtaaggtcaagaagaagaaggagaaggagaacaggaattctcggtgagcgatagtaaagaaagcaggaatggaaaaaaaggaccgttggagcgttgtagatgaaattcaaatttaacagtcgactttccgtgcgaagatttaacgtttcaactactagctcttttatatatgccccgtttcgctaagctctgtgaaattgctgtgtttggataagagaattattaaaaggggagtggtgtaaacttacattgtgtttggttgtatacggggtaacatataattaggtaaacaagggtataagtataaagtttcaagtttgtaaatcgtacgagggtataagtggcataaaagtgtaaacttatcaaaagaaaaaggggagttctatttacaccccacaaaatgataagtacaccttattattaaaaaaaatataaa

SEQ ID NO: 114535 - DNA, 2820 bp, Cannabis sativa
ccaatgcaatagcagttatatttacaaactcaatcttaaaaaatcagaataaaaaacttactaaaacaacacaaaaactaatgtaaaacaataagcagatataactacttagaaaaataataagcatatatatataaattatactcacacttagaaaaacataaaagaaccacacactttaaaaaataaattatggaaaataaccgtaaaacaacactaaaacaaataaaaaaaacaaaagaataaacacggtataaaacttataaaaatacacggtaacgaagtaaaaaataccacctagcagtatttttataaaaaaaatggcaaaagtcagtatatcatgtaaattttccaattgtatttgtattctgttataaaaagataagtccactcgccattgtagcaaatttatcataacataatttgtttaagttgcggcattttggtccaataaatttaccataaaatgagcaagattcgaaccctttctggaccaaagcctttcaacaacctcttgatgattaaaaatgggaggaagtggttcattccacttagtagcatcatcaaatttggcatttcgcctggttgacagtaataaatcctttttcttcatttcgtcatactcggtgttataaatcttcataaagagtttgtcagtcgcctttatctgggcatggtcttcttttgacaatgaagaaggacagatgggtaaagtgatgttaagtggaggaagaggtgaaaggtttattctatcccttggcactttgttagaacaagtgctccacctgtttgacctctcacttccctaaatgtccactcatcttcatccaattgactctgagcctcgcttcctgatagcagccaattaatgaagcttttccttagcctcaactcttgttctcttgctatttccacctagctcggagtcagaccttttcctttgagggaacttaggtcctccaccatcatcctcctcttcatcgtccacgacaaccggtctctactggagaggaactattgccaaggtagtatcatttactccttcttgagaagaagaatccactgctgaagatgaattttgttctctgttgaacacccaacaacagtttatccatcagtttaagtttctcatggcaatagccaaaatattctttgttccacttactcagtagtcgtccggtagaagccaattttgtaacgagttgaaaactttgacaccccgcacagtaatactcaacgcctccttgaccacgtcaaaataggagggatcacgggtcgtcgatgaaacgaaaaaggcttcttgatggtctcctagtccaataagagatccaaaaggatgggagcatgctcagaagatttgatagtagtaagggaattgacgaccgctctttgaaactagattaaccactcaagagccccaataacccgatcaatatgctctttaataagatcagggaactaacatttgtttgaccagataaagtaattaccgacactcctaagatcaatgccccctgtggtcaataaaaaatcattgagaagggcagcctcacgatcagagactaaactaccgccaactttgtctacttgatccaaaaccaggtttaggtctcccatcaccttcgacaggtcacgtagggaacctacatggagcccaaaattttcccaaaacccgctacgatcagtcctagatgggaggccataaacaaaaaaagccacccaaggaggcttgttaaggacattagaaatctagcacaaatcacaaactcatccacacttatgattttaatatcaacaccttctttccaacagaggcacatgccccctgccgaaccacgggcatccacctcaacaacatcaaaaaaccccagatgcctccaaatattattcatacgattactcgaactcttagtttccattaaaaacatcacatcaggattctcatcgaccaccagaccccaaagggtcttccttgcccgggtttgacccaaaccccgacaattctaggataagaaaatcatggggcagtggggggcatgatacgacctgcctcctcgaccacagtaaaattatggatttccaaatagcttgatccatcgagtttctgagtatggatcacattagcatcaaacagaagagacgtagcatcggagaaagttaccaccaatttacttgtctcacttgccatttgcaacataagggaagagccatttccttcatcagcacgaatttctgaatatagcctatcgtcctgctccagggaaatgaggctatcaggcttgttcaaatgattagaggttttcctacacttgttgacctccctgaatatatcaaagcttccctgctcgttgggcttttcatattgtttgttccccagaccattaggagtaatactcatgcgtctatttccttcaggcccgcgctgcaccaatccactcctggggagttatagctaagttctccaaaagcatcaactggttggatgtagtctgactgaagtagggccttctaggccaaatcttttgaagtatcccctatgaagtcgatccccgtgcttttctttctttttgacccaaagagtggcccatcaagggaatttttgagcccaaatgcagtttttttggcaactcctttaggcccaattaaattcgagactttggtttttggcctaccacgctttctagacctatcctttgaagacgaggctcaaaacaccagaggattaggtaacaacggctcagagacttctctgtcggcaactggcagccccatggggacccccgacggcccacgcacagagaaagtatggtcccccaccat

SEQ ID NO: 114536 - DNA, 2833 bp, Cannabis sativa
aaatcctaatgaaaaataattataattaaaattaaaatactaataattattaattaattttatgcgatttattaataagtaaagatcttttagtaattatttttttaatttaaaatattgaaataattacaacaaaactcattataattaatttaaagttattatacacataactttaattaataaaaaatattatgaatgagctctaattaaaggtaattttatgttcaatcttattttttaatacatttaagtgccaaattagtgtatcagtccaagattagttcaaattatttaatttttttcttttaaaaaataaaaaattatgtaaaaaaaaatgtaataacaactataaaattaatgattgttaattatattcgctcctcgttgaaattatcttcatcaatctaaagattgtaaaaaaaaaattatcaaagtagattaccaattaattgaaattgttgttttttttcataaataagcataacagtagaaaatagtaagcaaattattaaaagcaaggagaaatctaactgtaactagttgaataaaaaaatgagtttgtggcggagatgtaggagattgtattgaagtgaaaatttcacgtaatattaggttgggacaaactgagaccttaatttctaaaaaaaaaatataaaagagaaagatgcgtcaaacggttgttgcaaaataataattagatgtaatttttaaaagtttattttagatagagtggaaatctaaattttgtaccaaaaaaaaatagaattttattataaatattatagttaaatggtttaaatgttaaaaatattataataggaacctaaatataaaaataaaattatttataaatattaattgttaaaaagattttattaaatatttaaattaaaattaattattttaaaaaattattaattatgattaatttaattctaaaaaaataatttttatacatcggtaactttttattataagtaaaaaaaatataatcatcatagttataataaaaatgtaacggttaaataatcatccctttatataaataataattggtttaattgattcaagagggaaaacaaaagatgcttttgccgacaagaaaatatattggtagatttagaacttagagctatcattttgactacttatttattttttaggggatcatttttactattagcccctctctcacacacacatcaaatattttgtagaaaaattggtattattaatgtctttctcagcttcttttttaccctctcacctcatgaaaagataatgttgttaactcaaagtgacacctgtccctatccaactcaaatgctccaaaaagttatacctcttttcctcacaaaaacccactactactactactacaccactaattattcaaccctatttctcatgtcattagaagaagaagaagaagaaaaacaaaacacaatacagtagagataaccaattaattacccaaaaaaatatttcttagtattaaatgaatttattttaataaaataaaaattaaagaatgaaaggaagtggtgaatggtgatcagattactccaccaccaaaccataatgtttttgtctcatctctagtgcacaaaagctacaagtagaaaaaaaaatggcgggaagagcgaggtagtccgtacaaagatcccgcaatctacggtcaccatgatggaatgggaccctctcaggtagttgacacgtgcgccatcccaagtggtccccacaagactcgtgcacccacgtggacaaacgtactagctgtcggcaacagggcatgcctcgattactgagccagggcctctcctcctattcgacacgtggccaatgaattgaccgttggatggatgagtcgtggagagtactgtttattccgtacgaggaggagttgggtattgtgcctattttaatttgtatctatctttggccgttacctccttttgccatatataaggggaacgaaatcgaatgaaataaaaaaaaaagaaatcgaatgggaataaaaataaaatatttacattacttaattaattacaatggattatcagtttatcatatctccacactcaggggaccacttctttttttttttttagggaaaccaccactttttttttaaggaaaaaaaattgttggtttgtttagggaattgatttttcgtttagggaattgctttattgctttgtttattataaagtattttaattaatgattcattaatgtgtagttggaacaatgaagaacatgtgggctagtgtataacctgttgtgttgaccaagtatccatcactagcccaatagctagctatctcatcaatctctttttttttcttttctttgttctttcttctaacgaaaattacaataaaaattgatgaaaaaatgtaatcatattttcatctttggcaatttgtatttgtttttcttttcacttaatatcacaaacttcttattggttattctcattagagttataatatattttggatttaagcttttaaaataagaagtatgaggaacctcataactcggtaacatattcaagtttattatgctataaagttataaaccaatttgcacattacaaataccttaccttaaaattgctacttgtgagaagagaatattgcagagattatctacttgtaattaaatactataaattctaagttttaaagttaattacaaaataacttgagcaaatgggtttacccgtaattaacgcttgtgaaaattacatgaaatatgggatttcataacaaagttagaaaaattatggcatttttaggtttgccactcttctatggcatttttt

SEQ ID NO: 114537 - DNA, 1243 bp, Cannabis sativa
aaaaaaaaaaaaaaaaaagtgacagagaacatgtattttgattaaattgaacttaatataaagaatttaaagttgaaatagaaatttattattgagcttaattttctgcgttaattaatcatatatgtgatttacatatacaatgtttaattaattaatttaatatataaattagtaagcacacaatttatgtcacagtgtctcactgatctctctcgacaaaacaaaataaagatatatattaattaataattaggcaaagcaaataaaagaatatagcattttaattaattgcacacatggctagctaattcaaaatggttgtcttatctcttatatgggtatctaatcactaatcagccacagttgccttacattcttttgggttctttttggttacattctcatctaatcagcacataaaaaatgtataatatatctttaataaaaataaacaatattaaatattgtagtcaaagatatgatgatttgaagaataatatactaattatagtgtctgtatagccaaaacactaaaacacaagagctttttttttttttttgggtaaatcagcttaaaaaatgtattatacacaaaactatatacaaacaccaatcaattagttaaacccaatctatatccactttactgtttttttttttttaatttaactaaacacaagagttactaattatatataataataatttggatcgtattaaactaataacatactcaattaagagaggtccactctttaattaatattttgttatttctacttaatgataaactagaaggattcctatgatgatcataataaagtacgtaccttttaaatattacaagcactcatgtctctaaacttgttggacccaacaaagaatcaatgactatcaaggagtggcctgcaatatatttatatatagttaaaggccagcaatacttattatttaatctattatcaaaaagaaagagaaattaaattgtataatatttagtagttaatatgtgtttagtaaagaaatgatcatttttgtagaatttgtttttttttttttaaatacattttgatttgatagtttcatatggtgtttaaaaggtcatataaacaataatatataactttacccttcacttattaagtaacctttgaaaagtagtgattatataaatatagggatatgattttgtcccgtgatgtacttttacggaatgtattccgtggtacattagatgggt

SEQ ID NO: 114538 - DNA, 3692 bp, Cannabis sativa
  modified_base (3639)..(3653): a, c, t, g, unknown or other
cgctcttccgaatgattttgcttttcttatagtgcatagtattggaaagtatttggttcgcagacgaggatgggaggttttagttaagagagtttatgatgtctgagctcttgtataacttcaagttgggtgtgttctgagagaattggatgcatatcccttcagcctaaataaacaaaaggatggcaatcaagaggcctttttggatgtttttgattgtgactaattctgtatatattttacaaagtttttggtaacaagtaacaactattctggaattatttaagctggcatggtttgtaaaatgaattttactgtagtgctttgtggatataacttccgttagaaatttatataataattttaatcttggacgtttgaagcatcttggttcaattaattgttatgttaacttgaatcttaatagttcattttttttaccattgtttgtatgatattcaacaatcaacaccctataaacattggataaatctttgtattggtttacgagattatgtgttttagtggatttgtaaatgatgaatctgctttcacacttgctttgctttctcttaggcctcctgaaattgtgcaatcaaacaaggagtacactgaagacgatgtcacagaccaagtgctcagagggtcttctcccttagggtcatcagggcagggatcattggacttccctggtctacacaatgacattaattcactcggacaacacttcaactttccagggctacgaaatgatattgacacatttgaacggaacttgtttggtagtattggccgtttctttgaagctgctgaggatttgagggatggcttctgtaatgcatttagggatccacgcatctttgatggggattcctcatcttcacctgcatctaagcatcgaggggtacctatcgagagcaatccccagaagggagaaaagcgaagaaacttcaaatcgggagatatagatctttctgggttaacaagagatgtttgaaactttgaattgaagataaaccaagggatttatctcttctgaaataggaaaagtacataaacttatcaaaaatagtttctctctagatattgttcctcctaaatctaataaactccaccatagctcttttatataaaaactaataattttattatgttggctcaattcaaatatagtaattattataattttattgttgaaactattttttttttagaagaaccgcgtttgttgaaactttttctttattaattatctaaaatcctaaaaatcgtgtaaagtacaatctgaacttatttattttcatataattacggatatatgtattatgtaacacactgttatgactttctaatctgaaagtgatttaaactaaggtttttggggctttgaaaaacacacacacacacaaaaaaaaaaaaaagtgttttgggtcaatgaacatgtttatatctagtggaatgaatatctagtttttgtttgatagaattatagaagtgaataataataaggtagtgtgcagtgtgcacgttggaaaaatcttaattaccaaccaaagaatatgacccaccactacttatttagacctaactcaaaatcaaaaccctcagccaacaactttacccgccaatggagttgaccattaacggtcagagattattattattattttttttaaaggaataaggagattagtcttcgaataaaaagggcaaaagtagataataaaataaagttattgtttcataggtttatttttttaataagagtgtgtaatttattattttttttaaaagaaaagactaagttgttattgaatgatggatagaatttaaaacaaataagttctatgggatcttgtttcttaaattagcttctaatcttctttttaggggtactctactcttgttaaatatattttattttatttatttatttaaaaaaaatgatattttttatttgtatgaaagagatactttttaaaagtaaattattgtagtggtcataggtatagaattatttttaatatgttattgttacaccaccttgttattgttatggtagtacgactttattcatttatgagagaagattttagtcttatttctttttgagatatttggggaatctcaattggcttaaaccatatttgtgtaattagtagattgttttgctatggttggtcatttggtcatttcttttttattctagattgaataatagggttattattactcaaattttattggaagatctttggctaatagtcattgacattgtgatttgttagatattcatttagattggaaatctagcattcttcgcacttttttgatgctacaatgctgacgattgattggtattttacttgaaggtgttattagggttaacactcctatttttgtaaacgacatggattgcctatatcgttaattctgctctttgagtgatatattatcatgtaatggattattgtctaatttgcccataaacgaaaatttttagttttctctctcaaaaaattaatagcatgatttatatctgttaattttatttttagcatttttaattagataaaaatcttatattatttatttattaattttgggtgagttgttatttggttttcatatttttatattgatcaatttatatatgcaaggaaatatttctagctttttatttatggaaaataaggtataaatggtaagtttgatcactcatcttttttctatgtatccaactatgaatatctagcttcttaatatgtttgatcagatttcttatgaagaaaactgagaaaaagaaagtcccactgctcacggttctgtaggtacagaaatagaaattcctaggctgattgaagatctattttaagaaattatctagcgagctattaagtttacatagtttatttttcatgtttgtatcttagttagttattctttctaactaacttatcccttttcctccaactatattctgttatgaatacagctggtatttttcttactcaactatataaactgtaactttgtattctgttgataattaataaaaacattttatttttctctgtttttctctttcgcaaaatggtatcagagcagggaaagaggagctttccctgaccgatccttgtcttcctctccgatcgtcttctccggtgacgagtatccttcttctcctcgatactctgtttcatcgtgctttcttttttaatcttttctttccatggctgatgaagatcagatttctactcaatctgataatcgacctgttagagttcttgaaactccttcgactccaatttagtatggagagcaacaatctcagatcagcagtgttaaaaatcccatggaagatcccagcaatccttacttccttcatcacggagacaatccaggtaatgttcttgtgtcttaacttttaactggtcaagataactatgtttcttggagtagagctatgcaactttccatttctgtcaagaacaaaattggttttcttgattgctctattccaaaacctcctatcactgatcacgtattgtataatgcctggattcgtaacaaaaatattgtaatctcttggattctaaattctgtatcaaaggagatatctgttgggttttatgcccnnnnnnnnnnnnnnntcaatataatcagatttgtttattaatatagatcagaaa

SEQ ID NO: 114539 - DNA, 3120 bp, Cannabis sativa
taaaattttaaaaaatgggaaattgacattggtttgtgccaattattttatacaacccataaccaccacatataacgaaaccaataagcataacaccacacccaaagttcatcggaaatgttccagtcccttcctcttattcctgtccatgaagctcaaagaaaaaaccaacctttcgaatggaattagtctcaaggcttgagtaccaaagctagaccaacctttgcactcttttcaattgccctggtatccacttctcctgagatggtgaagagagactttgggcgccactcatgttgaataagagcacttgccttcccataattgttcactctagctttcaaattggtcaagggatcaagtgcgtgttgtgtgccaatagtgagagtgttttcattgcttgaaaagctatgggaaaactctgcaccaacgttagtgttggtaagggggcttacagtatggtagtacgatgcagtaagggtgtcacctttatcatttctgcaaatatcgcacaactaggaataaatatttgcctgaaaagattaagcaagtaataaataagaaaaacaactcacaatatcagggaagcaatgagatcattgtgaatgaaattcaatcctgtattaaatttggtgaagttcccagatgctgtatcaaaggacaaatctgttccaactgccaaagaattgtttccaatcacaccagaaaagttgacactaggatttgcggtcaatccaatgctagtgctgatcccagcatactcgtgctgatattggagctcaacctatcacaccaaaatcgcgatatatggtttatgaataccaaaaagatctgccgattaatacagacatgttcacatcaacttcaaaacaataaagttactccttaccttcccagatctctgatcgggagcaataaagctaaagattgtcttaagtccaggtgctggttcatcaacggtgatggtggtgataagctatagattcatgtcccaacatttttcaaaagatcagcaacttaaaatcttataatttatcagcataatgatgacttttactcaagaattagattaaaagtataaccaaaaaaaattgtagtttatctaaacttacattagagttagtgtcaacttttatgtcagtcgtgatattcttgttcttcaactgagtgctcaaatctgccaaaaatagctcgcctttcttaactccagttgaagtaattgcctgagacgagtatgaattttgcatattagagaccatcataactatccaaaaccaatactattaacggactatggaagagtaatgctagtacaatagcatataaaaagcaaaaaaaaaccaaatgattccagaagacgtaaaaataaggcaggaagataagaaaaaagacattgcataactattgtttatagtatttggtacatgcatattatagtaaaaaaaaacactacaaatgaaatccgtattgaagtggtttaactaaccatggttaatttcaaagaaatataatttttttacaaagaaagtcaaaaatggatcaattgttcagcttgtttagtttttttcagcaaacttaatagctcaaaaacatggtttcacaaacatatacgttgcttattcaattacactaaaaattccattcactacaagtgataaatccattaagctttcttcttgagcttcccagaagatgtaagcaaaatcctatcgcaataccttattaccttaaagttcactatcaacaataaaagagtgcataaacatattttacatgaaaacgaagtcaactctagataattagtcatccatcagaattcaattgtttttcctccgaattcaaaacctccatttaaatatatctatacataacatcaaaattaaaagaaaaaaaaatacggatatgcaataataatcactttaaaagaaagcttacaactccgttagaagtataggtagtgacagtaaacttatgatcagcctgataatctctgtacagaagatctgcaaaacgtaattgatttcacaaaaatgtaattagaccttgaatatatctatatacatataaatataacataaatcagaaagactgacctctggctttcttgccaatatcggtatagagacctggtcctttcaccatttttttccccgagaaaattcgaagggcgataaagggagaaaggagatagtttggaatcggaaccagttgtattgtactgtttgaaattaggggcagaaaatgagagaaatggagtatagaagacgaaaccctaggttcggtctacggtgcattgtttgatttggaccgttggatcatgtattgggtaagattcgcatcgctggccgtcaatctggttgtgataggggttttgggccttgttgagttttatgacctcgagaatcgggacaaattgggttcggcatattcgcctcatggtctttttctgctacgtgtttgctatggaaaacttaaaaaataatttacataaaatattattttttttaaaaaaaaatcatatttaatagttgaaattacgtaaattatgggaaaattttaaacatttacaattttatgccatattcttttaactcatgtggggtatggacttttaaaaatatttttcatttttgtgattttatttctgccacatttttgtaatttatttttgtattctcatattgagtactatgaagtcattccatctacgaacttagatttcattttcgaacacaaatattgccttagacagtttgtccgatcgccgatcaacgcccaccgtcctccgatcgttgtcctcagctccggcagccagaaattcagtgtgccagacttaagcaaaactccttcccgaccaaagttcctctttctggcacattttttgacgcctgtttctactccgaccagtctaaacccagaactttgacatcaaaccgagtcgttgtttcactgcctattttcgtggtgttcgacttccctgctccgactgggtttcagatttggtttcagatcttgttggaactttgtgaaatgttgaaaaatgatgtgtgtgagtaggagtcccacatgggatagaaacacttcatttgaagtgtataactagtgcaagtttgagatatg

SEQ ID NO: 114540 - DNA, 3083 bp, Cannabis sativa
caacaagtttaaaaagcaagtattgtctgctgctttgactagtttagtttatcagatttggaagactagaaatgacaagctttgaaattcaaaagctggagatgtaaatagagtaacttgtatagttaaagaatcggtgaaacaaagaattaacagtgactcataatgattcttatcttcgcaaatgttgatatcttgtatagaatacttgaggtcttttggttgaagatgctcttacagcatctccaatagagatgaaaataagtgatacaaatgtaaaatatgtcacaaaacaaaaagtgatcaaattttggatcacaacatgatctaaaatttgcatcataataaatgctatgtttttatatttatcattatgacatttttaatattttattattaattttagttaacaagctcctttacattaaatgacttgcattatcattattactattaaattttatatttatctttgcattattagtattagtttatagtctttctaatgaattattaagtaggcattaaatgacatattaaattttatgtcaagattttataattatgcattgaagtacaattgtaaaagttgatgtaaaaatatcataaaactactttttgtgtcaaatatagctcaacttttaatcttcgattggagatggtcataatttgtaaattagatttgtggagtaatgaaaatactatagctgatttatatataaaaaatcaattaaagtgttaaatttttatgtaaagtatataaaaactctatattaaaaatataaataaaatattaaaaaaaaattaattacattaatgcgtaaaagagtaaaaaaataatttttattatagtgtaatatttaatctatgttatattttgtaagcacaatttttgttatgtgtataatttagaccacaagggaaaagggatctttggtttggtttgtttgaaggtaaaatctaatattttattttatttattatcttatctcatttttgattgattcaataaattgataattttattttttttttataaaaaaaaattaatggagtatagttttaaaaatttagtagaattactaatatttatataaataaaaaataaagaaaaaaatatactgtaaaacttatgcaaaacactttttactattttttttctagtatttttcttaataaaaattttgagtacttagagcacttctaatggagtattataaatgtggtggcgtatatagttattagttcatgtttataaaattgaactctaatattagagcatctcaatagttataaatgtggtatattgttattttttagaatatttttctaaaaattaattctaatgttgatataaaatgtgtgtcaaatttgactaagctaaaaattgtgctaaatttggcacaaaagatagcataaactaaattttagcccacaataaatactatcttcttttaattatacctctttgtcacttattaatactattgactttgaataagatatatttatacaatattaaaataatataaataaaattaattattttgtatattttgaatgggcattaatggtaatattaatttttatagctaatttgcaccttgtgcattggagcacaaatacaaaaatgagtcaaatataactttatggtatattttagatcaaatttaacttaaaatatacaccatccatgggagatggtcttagagtataatgtgggtaataaatgcatatataccacatttatagtacattttccttgcaaacaaaattataaatttattgtccttaaacctaaaatcttttgtaaaattgaagttttcgttcggtccctgatagtgtcttaaatagtacactatcctaacaaattcaaacaaattcaaacgatagtacactgacgaaccttgatgaaaattacaattttattaacattgagtatttatgtcgtaaaaaagaattattgagtttatgttcgttacaaattcaaaactttagtacttactccacaattatccctaatttttaacgggataagttgaggaatacctactttttttaattaccattaattaaaaatactctcatattatatttcattatatataatctactcatttttatgagtaagttgcctaatatacctttgccttccatttaagtgtagaacatgatttaatctaatgatataatagggatatcatttgtaaaagtgaatatatcttaaaaatatagaaataatgataaaaattaaaacgaataagtgggtatacaataaaattttcacatatttaacggtataactagtatacctttatttatttatatggtaaaataaaaataaaatataaaaataaatatgtattgttatctaatttattattaagtcttacgttcatatattaatttaataattataatgaaacatatatccccttataataatgttatgcaccgcaatataccctaaaaataaacaactttaaccaaaattataaggagaacgggatctatcatctatggttttgtttgccaggaagaggtgaaattcaattttttttttttctattatgattatattatctcattttggattgaatcaataaattgataattttattttttaagaaaatattttttatataggaaaaaaaattaaattttaatgtagtataattttataaaatttagaagacttacaaataaatctatatatcaaatttatgtaaaacactctttactatttttcgtcataaaaattctccaaatttcaataaagatctttcacatcaacaagaaaaatccttgattagagattatagaggagagttgggagagaataatataaatcatttacttattcgacagaactgttcgaacaacgaagcatatatcgcgcatgcacgtcacatttattccttcccatataaatctttaatggttctgtgcaacggcatgcattattaatattgatgatcattaaggaagagaataatattgactctaaatcagatttctatacaaacatttatgtgttaaaagaaactcttcccattaattaaatataaataataataataata

SEQ ID NO: 114541 - DNA, 6712 bp, Cannabis sativa
atgtgtgattggtttgaaaaaatgctcaaaaaccgcaacacccgcaccgcgaacacccctagtagacattaaaatggagagcataatttagtacataagcaatcactaaattagtaaattgaatgaaattggacaaaaatccttaaattcaataatcttaatagttcggagagaatttgtaatggttaaaaaagttcaaaggacatgatttagtacatattaaaatttaaggggcgaaaatcctcattaggcttttagaaatatcatactttttttgttttaataataataataataaaaagatattattttgttaagcaataagtaacaacattacaatagtgattcttagcactttttctattttattatttacaaagaaaatattatttaaaatatataaattggataaaaaaaataataatagaaatatatcttttagtgcaatagaaatgttaaaaaattatatattttttaggctatgtagccacataacatttagtaaaagataaaatataaaagaaaaatatgaatagtaagtttaaatttaaattataatatttagaaaaaagaacacttacatttaatataacataaatatatatatatatataaaaaataacatttctttaaaaaaaaaaaaaaaaaaaacaagttatttaagacatacccttctaaaaaaataaataaaaaagacattaataatattaataatgtgagatttatgtgataaagatcaagtctctaatgtctctacaagttttaaaatggacaactccataagaaaagtgcttccattgtaaaaagtgaaaccaaacaaaagctattccaacaattccattccttaggatccaaccaaacattttaccccaaagtgcttacaagttacaatgcagaagatcagacaggaattggcaatcccttctttgccatgctgtccaggacatcattgagagcttgacataacccaacaatctgttcatatttaaatacataaatacatgtatacatacacattttctatataaattttttttaaacaagtgaagagaccaaaaatcatgaagatgagatcacttaaacgaacaatattagtctcgttgtgccaacactgcaaactctatgaaactccccacggtgttcaaaatctagtagtagccattgaaatgtatgaaaaagaaaaatcaataattacctgttgatcccatcgctgcagttcctctgtgtcatcctcgaaatgtatgacagcttccacctgacatacattgtgtcagattagtgctgctttggtgtaaaatagaaaaacaattttcctttgataattttgaaaaatgatggtggttgctgctgatactttcaaattatacagtactcattagaaaaatatatcttccgcacaagatggggcgtgcaagtttcactcagctaatttaattcataagtgaccttcatgaaaatgagactaacagaaggctagatggaaaaaaaaaaaatcatgcataacttaaatccttaaaaatgacacctgaaagacagatgccacattgcatacatagtaatacctggtcgatcctctcattctgtcctcatagatcattcttgacgctattttttcagcctacaagacaaattacagcactttcagaaagaatgagaaataatagctcaagacaaattactcacttgagctagcctcaactagtgaagaataacactactcaatataaatcataatcaattacttgacacaaagaagcaactaatttgcagaatctaggagtcttgttagtatctcattcctatttaaatcaatcactggatactaaatttaaaaccacagatcctctacattcaaatatttatatttttatacatattttaaaatcatttgcattcaaaaattgaaagaaataaatcgagttgagtgaaaaaagtaaataaattaaaaatcacacgagcttaattagagagaaaaaaaataacaaagaccaagaccttattaggttcaatgcccagcaaggtgcccaactcatggaagctgtaaagaagaagaaaagcagctgttaacattatcaatcccatcaaaataataaaagaacaaaagcattggaagcctaaatatgcaataatgaaaccaaatcactatcctaccttatgtttgtgtaaagtttgctcgcactcagcaaattatgctcaatcatagcacgatcaaggacagtgaagttgtcaggtagaacagctttctgttaaagttgataaacgaggtctcataaatcaactttctcaacaatgtgattaaatgctgtatatacaacaaccagaaagaagaaaggtacctgatgtgcttttaattctttagcaaatgcatcgatttctggttttcttaaaattctctccaagtatacctagcatcccaattgtacagcaaataacgtttcaaaagtaagcaggagaaacaaagtaagaaagcaaccagtcagcacaaaatatgatgccaataccttttggagaattggataaatctttaattttgcgcacctttcatcctaaacaaagaatctcaaattatcagagcaatacaaggacacaagaactggaaaacatatagtatatggtcatcttgagaagctaattactttgtataaagttgcaagaacacgagaacgttgcggtcctgcagcagccagaattgtacatgtaacagcagcagatagagcttgttccagtgcttcctcgtcaatctctctgaaattaaaataataatttaaaaatatatcatccatagtttctcactaaatcaggcctgaggctcattggagtatacttacaaccaacgcaaaatcataacaatttggttaaaactcgcattaataactacaaaattaaattacataatacatactcttctcctattttcctcttctcaatttgagaaatgtcataataacgtaatgctgcctccaagaacttcctcttcaaatctaaaatccttgcataacatacctggcggaaagaaaggaaagaagagggagcaatgaaagaagtaagaacctgtcaaatttggtgaaaatgcaaaatttgacaatatcacctcactgtacgtaaatcaatgaaccttatattgtaagttcagtacttcctgctgactgctgctaaccaagaatgaagccttattaataaaagcttctgcgttaacagcatcatcatcctacatcatgtaaaagcaaacacatcaaccaaaaagttggagaacatggcaacaacagcatactaaaaactgttcgatttacatttaagaacaatttgttaaatagttattttagtcttttttattattattttaatcttttatgttagtagcctatataaggatttcttattagttgtattcttttacttttgattttgcaattgaatgaaattctaatttctcttcacttctttattgattattcttctcttcacaaataattatcatggtatcagaaaaagatttgtgatagtcaatttcttaagcgtaatcacagcttttgcggatttatcagagtaggggtctgtacaattgtcatccgtacagttcgacattccaattttttgtttgatttcttcaagttttttcgtgattcgcatagcagttttgggtattgattttcacagcacaattttaaattttcatcagttttgtatttggaattttttttgcaatttgttcttttttttctacaatagctcccaataaagatgattcccttcaagcgatcagtgtgagattggatggaaagaattatttatattggaattatgttatgaaaacttttttgaaaggaaaaaagatttggggttatatttctggaacaaatagaaaaccagcaaatggtaatgcaaatctgttagaaaattgtgattaattgtcattttactcgtcaccatctgaagttggacaccattactttgccttttgttccttcttcgttgcagcttgctggcttttttactaagtggcatacgatttttcgttttcgttttcttttaaggaaactctcgatgcttcttgcagcagcatcgtaagtttgagggaaggtgttaaatagttatttcagattattttaatcttttatgttagttgcccatataagattttcttattacttatattcttttacttttgactttttaattgaataaaactctaatttctttgcatctcttttttattaattattcttctcttcacaaataataatcaagttgtgcatagacttcaagtgcgattaaatattttctaagaatgatgcctgaaacagatatcataatcatctgtttgagtttgaccaccttatcaaatcccaatgcaaaagaaaaattactattcctacactgtctggacgtagagaaattgatccaaatgagggactggcatcaagtaacatataatacattcaataactgtctaataaacattctttagatgtacctcaagataaaggcgagctacttggacacattttgataacctgaacgtatcgtcaatcactctgataaagacattaaacaaaattgcatacggttaacatcctagcaaatggcaacatactcactttcatgagaacaaacatgaagaaaaaatataggatcttactctcagacctcattccagaatctagatcaatgccactgagcatctgagcagcctttgaccactgctgtttagattcatacagttcggcaagtttctctcgtatgattagcacctgcagcatttttaaaaccaaatacaacaaaatcggttaagtctcttcaacagtgttgtgcaaaaacatcaataagcatctccgggtaagataatccaaggccctatcagcttccatggggaaacggtcaccaaaattctcaatcaagaacaatgtgcattgaaaactaccattgtagaataaaatatatatataaaaaaaaaacatataaatggcgaaacgaacttgttcctcaaacgaaacaacccgtggctgaatctgcgcaaggatataatgggcaatctccttctgggtttccggctgtaatagccctaattcttgcgcaaaggtctgcagtagttgacgagaaaccaccaatggtacatcgtcagataacactgcaatacaattatgaaaccgattaggagaactgagagccaaataatcatccgaaaaacggtttaagaaaaccaagaattgaattgtgtgtgaaaagcaagtcaattagagatgttactatggtcaataaacttcttggcctgagttgtgtcgttggaagaaattacggatgagagtatgtgcttgtactgctcgatcttttgccgctgatcagatatcgcagacgcgttcgcgaaggcgctctccatggaaacagaaatatcgacacccacgactgctatggtgaaggagtagaggagtcttggaaaccagagtccccactgaattttttaaaatgatttagccaaagaatttgggactgcttttgtttgtttggttgtagaaatggaatatcatacaataatttttggaaaattttatttacacccttaaagacattttattattttttttgaacaaaaaagacattttatttattaatttttattttaataaaatttatatatttaattatactaaattattttaattatttaaatttatatccttaaaaaatatacctatcaaataaaaataaattataatttaaatattacgaccaaaaaataaaaaattatataaaattttctttaaaaaaaataaaaaatatttataaatgatttaaaaaataatatgaaaataagtattgaaattaacataaaataatatgagaaaagaattttaaaaatattaatagtaaattttaaaaattatttaagtttatttttttattaatgaagtgtatttatcattttatgaggtacaaatagaacttcccataactttttattattcggaattttacttgtatcccaaaaatttataaaaacatcctatttaataatttacttttataggaaattaaatcattaaattttttttaaaaaaaattattcttccaattcatattcttcaaaattatacttacttatcaaacaaacaaaaataataaattgtattttaatattttaaatatattataaaaaaaaaattaaataaaaaataatatggaaaattattaggaaaaaattaaaaaaaaaatattcatgatttaaaaaaatgtaaaattaaaattaaaataagtaataaaattacataaaaaaaaatataaagagtgatttttaaaaattattttaagcttattttttttaatgttagaatgtacttattattttgtgggatccaaatacaactctccttttaggtaatatatttaaagggcccttatgtagttctttagttacttttcagggattaaaaacttcaaatatgacaagaataatgttactgtttgtcatttctttgtttacatgttattcccgatatttgtaagtagatgaaattattttattttatttttcattttgtttttaaatgtaagttgtaatagttagatattttgagggtatagttgtaattttactgattttttttatttatagtaggctaattagtaattgtttcctccgaacattgacatgtactaaatcgtgcccctgaagttttttggccgttagaaattcccccgaactattgagattgtt

SEQ ID NO: 114542 - DNA, 5796 bp, Cannabis sativa
  modified_base (1340)..(1347): a, c, t, g, unknown or other
ttcatgggaaatttttaacggccaaaaaagttcagggaacattatttagtacatgtcaaaattcggggggaaaaattactaattagcctgaatgttaaatgacagtattattattaggggcactatattatataacaatagtatttttaaataagagtagtttttatttgtacctaaaatttatgaatgcatttaatttgaataatttttatttcacataaaatatatattatcataaaaaaaaaatatatatctatatttaattatattagtttttttttttctattaatttaaattcttaaaaaatatacttatcaaacaaaaataaaatatatttcaaatactataacaaaaaaattaagataaaaaattatgttaaattttattagaaaaaaaataaaaaattgtgaaaataaaattaaaataagtattgaaattaacacaaaataatatgagaaaagtatttaaaaatattaagagtgattttcaaaaattattttaagtttaattttttctaaattttaaagtatacttattattttgtgaggtgcaaataggactttctataaacaattatattcatgacaattttgaatgaatcacatttattaaaattagaacttgttggtttaaaaacaataatattacaatagtataatattttgttactaatattttggtatatatatcaaatatacatatcattaatttattacaattcgaatgttcatacaactcataatgtgtgattcaaaatcccaattaatttaaactaaactatttaagatcagatcaaatgaatataatattaaatgatttcataaagattgtttatgattctttagtttggtaatagttttagactttaccaatagttgaaaccaaactgatctacttaattataaaaaatatgaatgcacaatttttaaataattttacaaattaggagtttttctttctttctttttttttttcgcaaaactacatattactgttttctcaaaacatttgttatatatattgtgttgtttttatattgttttcatgtgacattataaaatataattaaaaaaattgtagttataatccttaaaaattattttaagactatatgaaaatgaccattatttcctaaatgaaataacttttctgtaccttttttcactaatttctaaataaacacttcataaattttttatatttacttaatatatatttattatatgtaaaatgtgattatgtaacacaattctttgtttaacggtatttttaaattttttacattaactttaacagaatatctcaattacttaccagaatattctttattaattttatnnnnnnnntatatatatttaaaaataaaaatgatataaatattttatataaaaaaaattaattttattatatatatttaattataaaaattacaactatatataaaatatatatattaaaattttaattttaccacaaattttttattttaaaaatattaatgatattgttaaaaaaaaattattaatgatatatatatatttctaataatatgtacactttataataaccacacttttctaactataacttataagaatgtatctatcactatcattatttttttaagatatatatttagacataatacataaaatatattttaaaagtaattaattttctaattaaactcaaattttatcataatatttcctaatataatttttatatataaagagatcaatataaaatacgtataaaatatgtataacaatgaaaatcattcttttattgtacatataaaatatgtatgtatataatcacatctaaacagtacactaatgtagtcggccaaaaaaattctcaaaaatcaaaatctcaaaccctattttaaaaatcaaaaaataaaaatacattaccttattaaaaaatattaaacatacttatactgcacttaacattacttaattaaaataaaaactaattatacgtacattttgcacgtaacatcaacctagttctatataatatgtggttatgaaaatataatatacaccataatttaataaaatataagatatatataatataatttcatgtggtatactaaatgaacacttagaaaattatacaaattattatgctaaaactataacataaattatataaattactatataaaatataatctaaggtgttgtactaaatgaatacttacaaaattaagtaaattactattcttagactacaatataaattcctaaattactattctaagctcacagtatagcttccaagtgccaaaatatgtgctcttaactatagataattttaattttttttttttaatatcacactataaaacatagttatctaaagatttttttacaatacaacttttgaacttgacttgtaaattattctaatttttctaaaatattaaaggatgtcttaaataattattaaaaaaatcattaactattacacgagtaaggtggaccctttttttgggaataaacgtaaaacatattttatttacattttaaaatagagggtgacaaatatataacttggtaaatggacaggttgggttaagatagaaggtgagggatcagctctgataagggcaaatttaaaaacagaagatgagacctataattgtgtagggactgttttggctaagcgtggatgttggtcttttcttaagggtggatttgtccttgaaacaccctccaatttatcaatattatattttcaggtaactaaaactttttaattttggttttttaaggataaattatctcttaactaattcttagttttgtagagctcggatgatatagatgttggtattaacattgcaagctcttcactgcaaccattttccaatgaacaatggagaataaatcaacaatatatagtcaattatgtcagtatatatactcacttccttagctaaatgtacttgtcaaactcatagaaactaaatggaattgtaaagtatttatgatgaaattctatattattaatgttgtagaaaaggaaacgtgctgtgacagtccatgtctctaatgaaaatggagaaaggttacaaggagccacaattttgatagagcaagtggctaaggatttcccatttgggtctgccatagcaaaaaccatcttaggaaatttcccatatcaggtgattagcttaccaactatttgataaaataattcaccacttaaatcttacttgattgttgatgttttatttcagaaatggtttgccaaacgattcaatgctgcagtttttgaaaatgaactgaaatggtatgcaacagaacctgaacaaggccaagttaactataccatagcagatcaaatgttggagttcattcgagctaatcaaattatagcaagaggtcataatatattttgggaagaccccaagtacacaccaccttgggttagaaatctcacgggttcagaccttaaatcagctgtggagtttagaattcaaagcctattgagcaaatataaggatgagttcattcattgggatgttagcaatgaaatgcttcactttgatttctatgaaaaaaggcttggccctgacgccacgctaagtttctatgaatctgcacacaaatacgacccattggcaaccttattcatgaatgaattcaacgtagttgagacttgcagtgatgtgaactccaccgttgatacatttatttcaaggttgatagaactcaaaaaaggtggagttttcatggatggaattggtctagagggacattttacagtacccaatcctccacttatgagaggtatactagataagttggccacactaggaattcccatttggctaacagaagtagatatcagtaaaaccctcgataaaacatctcaggtgagcaacaaagcaactattaaaagtctttttgaacttgttaagtagtattactattgtgaatggcttaaaaattatgttcttttgcaggctatttacttagaacaagttttaagagaaggcttttcacatccttctgttaatggtataatgctttggactgctcttcatcctaacgggtgctaccaaatgtgcctgacagacaacaatctccaaaatctcccagctggtgatgtagttgataagcttttgaaagaatggcaaacattggagttagagggtgtgagtgataatcatggatcatatagtttctatgggtttctaggtgagtacaaggtcaatgtcaagtatcaaaatagagctgtaacttccactttctcactctctcaaggtgaagaaactaaacactttagcattcagctctaattatcttatacaatcccacatattttcaatttatcctttcaaaaaaacttaggaattaatttactctaaaaatttgcttaagtgcatagccaataattaatgattcaaagtttgcattatcttatttagaagttaggtttagtatttttatagaataattgttatgaatagttgaaagaaaaagtattgtagatattggtccacatttttgcataactttttgcctatgccatgatatcactcttctccttctatggtcttggtcttaattttatgagcttgcttaacactcatctgttcgtgtaaacttcaattgtttataaattattaaagttattattagtaattattgggaatcaataaaaaatgcaactatgacatcgaattattcagcctattaaggttatgatatgatgaggtcccacatgaaaagcttttgtcatggaggacctataagaaattatctaaataataatggatattacaataatgagcattgcaacgtatctaataccatactgatgtagtgtgttatgagtggtaaatattttcttatattatttatgtaattaaatatgtgagacctaatattaaattgtaccaataacaatatcactatttttgatgcttggtaccttaaggttccttttaatatttctctacattatgtcgcaggcatgcaacaacaccttttgatttgggcatttaaaacctgatataaaaaatttcttaagactaagatttgtgatggatcttaataaattagttggcaaactaaaaattaaatttccgtgcaaaggttctagattttgcttcattttcttcagtcaatctaatcagtggtgtgactattgataatttgataaccaaatagaattcatcaccatattactaatttgagtatctaaaatcactgcatacatgtttacgataaataatataaagtatacaaaaacacatgtattgattgagcttgttcacctcgtttttagccatcgacaatgagtcaattaaaacaattagaaacaattaatcataatgattaagtaaaaagaacacagagattgttatagaagtttagtcccatgatagtgggcttactcctcttttacttgtattaacatgtgagagaagaagcaagaagttcttaatcttcctcaaaaacttttatagaaattttagcaacttaagtgctctattgaatgaataaaatttagatccatctgctatcttaatttttatcctcgtgacgtggcatgcttacatggaaaaaattagtgccacatggtagtacaactcactaataagaaggccaagtcagtacctgaacaaacagagaccccggtactcaaacgagcatcaagtgatagaccagctccctcacagtagctggccggccacccccgaccaaccctatggctggccaaccttgggactgcaccatggctagccagcctggtctcccccggggctt

SEQ ID NO: 114543 - DNA, 3639 bp, Cannabis sativa
ttggtgtattgtagaatttttctatattattttgacgaattttgcacggtgaaatcttttaaattattattttaattttacttaaaaaaaagtttaaattttaatgataaattattaaattgttaataaatttaaggtgtcatttagaattgttaataaatttttgacgtttatattagcatttaagcagttattattagcatttgactataaaaaatagatggcactttaaatttaagcttaaagaatataaaatataagtgaatgataattgaaagagtttaatcaaaaaaacactattcttatttatagcaaattaaaaaagattattcaaattaaaatcactttattagttattttcttttattttcaaaaaagattaattaatggaatttttgaagatagttttgtgctatgtgaataattttatgatttatgtttggctaaatactaaagcttcaatttttataataaaatcaaaaatatatgttaattttaatgagtggcaaacaaaagccgataaaaaagattgaaggggaatatttgatatttgttttgttaggaaaaaatctagaagatacgactcaaaattcattgtatggcacacgtgtctttatctatttagcctcacacgtgtgaatggaaagaagctagagtaatatgagactattcaaattaaaatcactttattattattttttttaattaattttatctttaaagaaaattaatgagtgtgattcaaaaatatcaaataatcttattttttattaaatttatacatacactatttaaaagataattaaaaaaagagtaattatcttttttaaatttaaacaaaatattaaagtttccaattaggataaggatatataatattgatgggtatatatacagcaaaacagctcaatatttgttcacatcgaccattctctctttctctcacaaaattataataagtctaattaattatattttctatttccattaattaaaaatggcaaagaagattaatatgtttcaacaaactgtaaggttgtacaatgattgttccgattatattcttcaagtgaaaataagatcaaaatctcaccaaacttctaagatagtcgaaattgaaccttgtgagttcggagatttgttgtacgacgatgtttgtgaacataaagttattgtaagtgttatgtttttcaagagaaatggagaggtgtacgagccatttcctcacgaatcatttaaaggaattaattatattagatattatcaacgcgataagttgattcttcgtgatctagttgatggagcaacttttgatagaatgcggtaagcacagtgttaatttgtattgttttgagtatattttttttagcattgtactaaatttaattctttaattattacgtgcagtataccttggaaggtgggtgtgtatttgaagatgacgatgacagaagcgaatgattacataaatgataagttcgaagaaatgtttgagcaactgaatagtattcgtcatcgtctttgtcctactcatacaacaacaacaacaattagagagcctctactaaaatttgatcatatgatttgatgatgatgagttcttgtgtgattattcatatcactatttatttgttattaattttacaacgtattaattatcatatattagaaactactttacaatattattaattagtttttatgttattcatatttgcaccattttttataaaaagttatcaaattataattttccttctacgtcaaaattgtatatactattcaatttggagaaataaagaatgcataagagttgaggttgtgtaagtaactaaaaaatgaaaataaatgaataaataaaatcctagcaaataaaaagagtgataaaagactcatatcttgatggtctccatagctaattaattaaaaaaaactacatagaaacgatctcacaatacaacgcaatctgaaaaaattaagagcatgatcatgatgatcatttctcatgtattgtgttctattatagcttaataacaattataataaatagaagaagagaaggagacatgttgaagtgggagaaatatgccacttacttcatattattagatggccgatgatggggacgaaggtaaggaatttgagtaggccacgcgggatgtataagagaaacaacacgcgtattcatcggtgatgtaggcggaagacaacaaagaaattcgatgtgaattcgattcttgccaagtattcgacattgaaaaatctcaatattgtttgatgttaaattatcgttgaagcgttgaaagaagaacacatttccatcatccgaatggaaagcaatcatagtaaatggtagtgagttgacactaccacattgaaatcccatcatcatttcatcgtgataatgcaccaaattccaactacgtacttcatccttatcaaccaattcccatgccatgaattcatacaaatgtgtactcttacaccaattaaattgcgctattcgcagctttccccgaaccactccaacatgcaccttggaatttaaattacaatccgaaagacaccctttgcaacctaataacaaaggtaactttatcaaataagaaagttctaaataaggattcaacgcaataatacctccatttgtccaactaccgtaaagccaataaacaactccattgtttccaaccgcgtttgtttggaaatgccacctattcaaagccacaggagatttgaagcttgaatggctccattgtccagtctcagaacaaaaaatagctaaatgaattaggtacgacgattctacatattcgacatcattttctttcgtgctaactttgacaaccttatacttaattataggctcatcaaaatctcttaatattcctaaggcatacctataaagtttatgagtggcattaggagaaatgggaatagcaatatgttgttttgtaaaaggattgcatacatacaattttctcaaacttcgttcaaccaacaataaatcatcgaacgatgaccatatataatcatatgcatcgccgcccttgatatcacaccaacgcatacactccaatgctgatttttctccatagtgaaaaatctttgatctctctgagaaataatcgaatgagaatgaagaaacctttgacacattttgtaggtcttcggccacttcacaagaatttctaaatagtagagtgaaaggaagcgactgagatggagaaggagatgtcggtgagttattaagtcttttttgatgatgatagtgaatgaatcggtgtttgaaatagtcatgaaaactgaaaatgatcgagtaccaatgcttgcataccgatgcacattccaccaaacgtctaaaatcagagactcttaataatatctctaacaatatttcatcagagataattgacattattgacactgataatgtttctatctctaaccattgcttttcaccattattcatttgaaatttcctaggtcgctcatactcatagccaagggttttcattttctttcatatgaaagtatagaaaaagatggttgagaagttttaggtataatttatatatataaataatttttatatgcaaaatattatagtatttttttttttttttgagataatacaaa

SEQ ID NO: 114544 - DNA, 8063 bp, Cannabis sativa
ccaaatctctattaattctagcgtttttagctacaccatcagccacaacattacaactacgtttaataaaagagaaacaacaactatgaaactttttagacaagtttagaattaaatagaacacttttgctaccgtctagtcaggaattgcttttgttgttaaagcctgaactgccgttttcgaatccaacaggatatgaacttctctccacacaacatcaactgccctgttaagagcaagaaaaattgctgagagttcagcttccaaaaccgattgtgcctgaatcttttgcgagctgacaaaccagcaaccatttgacatatcaacactgattgcagcaatgcctgcttccgcttgaacccacgatgcaacagtgagaactatgttacagataccattagaaggttgattgatcaacataccagggctctcgccaattccctgccttcccagaacttcgcttatttcaccactacaacagtgtctgtcaggaatagataacttgaaatttgccaccttcttttcaatttttaataaggctgcatggacattaacagcttggttctggagacaaaaggaattcctctgatgccatatttcagtcatgatgcatcctaaatatgttaacaaatccttcctttcaaaacgatcgagaagatcaattaaagtcaccatcatactgatcatattataagctggtagacatcaagtttcagagccaagttgcatccaaaccagatggctttggaaaagctacaattccagaaaaggtgaaaagcactttcctcctccacttcacataaactgcacagtttatcctgcagaaagtgaagacgggatttagtaggaattgcctcactcagtattctccaaagaaaaactaaaactcttggatgaatgcttgcttcccaaatccacttccatatcttttcctctagcgcaaacctcacaatattttctataatataggcagctttcacaggaaatttacctcttggattttgcttccaaaatacctgatagggaaaaggaattctaggaatcttcataatacggttccctaactcttcaccaaaaatctgaaaaattacctctgcattccactcatttccttgggatacatcccccaaagtttgtattgtgtaacctctgtctctaatgttattcattagtgccacaaattcggagtactctagccatggaatccaaggttggttccaaaagttgatagaaagacccgaggcagcaacagacattgagcctttgaggatcgttgctctggtatccaagatgcacttccattggtaggaatcgttgctcttctgcttaacacaccagaagctctcatgtttacaatattttctcagtaagcatgagacccacggtttatcttcatgagtggcaagactccaagccagcttagataacagagctttgttcatatcttcgcattttcttaaacccaaaccccctgaactctttggttgacatattttatcccaagccttaaaagccatgtatctattcttgtcaacgtttcccaaccactagtatttcctcatcaaggaatctgattctcggcaactggacaaggggatctttgaagtggacatagcatagattggcattgctgaagtcacagatttgattaacgttaagcgcccagcatgcgaaagtagcttcattttccatccttccaatttcttcattaaaccgtctttgagccttgtgtaatcctccttttttctcctcttgaaaataaaaggatttcccaaatgcctctctcccccactcacttgaacaatattcagggcgctcagtatgctattttttcttctgctgcacaggttccttgagaagagaacactggatttaggcttgctacaagtttggcccgaccagttttcatagattgatatgcactcaagtatcttccttgcttccgtttcatttgctcgggcaaaaagtattgtatcgtcagcaaacatgagatgagatactaggggggctgtttgagcgatcttaattccatgtacaaaacctttctcttccgcattgcaaatgagttttgaaagggcctcctggtagagaagaaacaaaaaaggagagatggggtccccttggcgcaaacctctctggggaattagctttttaagggggcttccattcaaaagaacagagtatgaaacacttgtaacacatgacatcaatagcttcctgcattttccatcaaagccattagcaccgaggactctgtctaggaaaacccattccattttatcataggccttgtgcatattgagtttcaccgccataagaccaccaagaccttgtttgtgccgaatcttatgaattatctcctgagtgagtatggatgattctcctatccacctaccagggataaaggcagattggaatggggaaaccaaatcattcatgagtggtctcaatctattagataagatttttgcaataaccttgtaagagaaattgcatagacttatcggtctaaattgatccatactcataggaaattccactttggggatgaggcaaatgaaggtattattgagtttaggattcataatcccactcctttaccgtggcaaccagatttgctcccactacatcccaatatttcctgaaaaagcagcgtgaaaacccgtctagtcccggggccttgagaggatgtaatttaaagacagcttccttgatttctatatccgaaggaatcttaacaaaatttgcatttgcattggtatcgatctttttgacgaaaagatcttcaagattcccatcaataaatggccttgccgaagtgaaaagctccaggaagtgttgattaattacttctgcaatatgcttcctatccttccaaactttaccatctttatccttgattgcccatacattatttcttcgtttccttatgactattacggcatgaaaaaatctggtgtttcggtctcccaaggacagccaagtctccctagacttttgtctccacatactctcgagcttggaccaagaaactgccagatttgcatgaattctcgattcttcatctctgaaagcatctgggcaaggctggttctaaatctattccaatcttctctccatgtttttaatgtcaccttcatttgctcctgtatgattcttcttccaagcttgtaaagctttcttcgaattatgaatattacgaataaaagaagcagtggcattgtcacctgagaaagaccaagctttaacaatttccttcttacacgagttctcccaagaacaagcttcaaagaattggaaaggaatgaaccccctagcagcaaacaaatgagaatcaaagataatgggagcgtgatctgatattgcaataggcaaattcctgacccctgctgaggcatactccagcaaccattccggggaacataaagctctgtcaagtctctctctaataaggcctcccaagaatctgttattttgccaggtaaatttattgcctatgaactgtagatcaacgcctccagtattgtccataaagctccttaaccatttagcgtcgacataggaaacttttcggcctcctaccttctcctcttggctataaatacaattcaaatcacctatcaacacccatgggagttgacaattagaaaattcctcttccatactcttccaaaaagcctcttttgcactcatatatggggtgccataaaccgtataaagtttcagtggaattggttttggaagtcccacacagtagcttcgaaaaagcctttagagaagtaattaacaaccgggctgatattattgttccacatcagacaagaaccacctgccagaccataagcacccacacacacaactctagagaaccccaactttctagataaatcctccatattactcttactaacttttgtctccataaaaaaacacagtccaccttatacctactaacccaagccgagatagcttggggtgtcgggtctctcgcgaggccccgacaattccaagagaggcacttcatggggctttggggggcttggtaagggccgcctcctcgcccatgagaaaattttgagagcttttaacgtgaacttcgaccaaattaagggtatcaatgagatttttcggagtaccatcatgaacaatttgagctggtccatcttcagcaataggagctttaccacgaagactaacatcagttgccactgccttctttgaacgatagccctttcttctacgtttattatttttcaaggatgaagaagaagctccagagcccatcttaaaaagagtgttgggggccgaagaaaactttgggagatcaggaataactgtggagaattctatagtgttttcttctgtatgttggacataggggatcaaagtgaggctggcctttctttttttaggttgagggcaatggtggactaaatctgaaacatctactgggtcatggaaaagagtgggaattggctcaaacttgtcaactggtgcagggcccattagctcctcagccaatccaatttcttcagcataaatgggccaaggaaaatgggggggctcaggatgtttatgaggttgtctagattgacataactcaacatgggccttgtccaccatttgatcataagtaggcccaatgttggccatgatagttgtaaggatactattatcagctgagtttggtgggggcctagatgaaaacttttttaaaatatcatcatcagataaagtactgtttttactttgatagtgtcttcgcattaccctaggggaaactgatcttgtttttctttcctttccaagatgcccagaaccttgaacaccataggtcttgagttctttgcctttacccgatggattcacccttgtattctttaccactttcaaattttttcccaatacagcacctgggccattattgttgaccctgacgactttccttgatggtttcttgcttgttgtttgatgcaagttttgtttcccaccactctcattgacaggtcgttttcccattgctttggagtgcgagtcaaccaccgcaggtgttctcactagagatacagtccggcctacatcttctctgaagaaatcaagctagtttcgtgtattaaaacaactgaaaatcactgattcagccttcatctaaggtccataagcagggaccgcatcaccttgaggaggatatgcataggcggttgaacggaagtaagctttcttgtcatgtccgagatagccacagttatagcacaactttggtagcttgaagtaccggaattgtatccattctttcccacccctcttaatatccagaaaaaaaaccagatatgagttgataagaggtatctaactccacttgaaactttagaaatccccttcttgtgatggttcagtgatctgctaggtcgcttccaataaaacgtcctgctttggatgtaatcgtacgagtattaacaccattaaggtacggagtgggcaagccggaagccatgacccaaaaatttgccttccccgtatccatgttataccagtccccatcctcaagccattctctaatgattagaagcctcccattgatgatccagggtctgtttctatgaatcgccacacaatcctcaggtttatcaaagaaaataccccaaacacccggtttcatagtcttaaatttccagtgcccctttagcttccatatctgattgagtatctctcttagtctagacctggagattccattgccacctagaaagctaactagcacaccagtattgactacatcagctgtaagttcaaagtctggttccagttcaagggtcatagactctaaaaaattgttgtgcaggacttcaatgtctacatttgacttgctgacgttaccgttggtaggagaaaccgccaactcctctgctacctccttattagagccatccataataatttcagacggctgaggtagctgagaaaattcatctgatgccataacttcagaggccccaacaataggaactacttcctcactaatgggatcacgtgggatgccattaggatcacttgggataccaccattatcccccataacacgcactgataaagagacaaaaaatacctttgtaatggaatagaagaaagtggaacaactacctttgaaaaatggaaagaggacaagacagcactttaaaagttgtaaaggaaagaaacatagaaaggcgaagttctggacgatcggaaacgagatgatgtttgagaactgcttaggtttgacatggagtcaagttggatttcccaacactctcacttgagagaatttttgtattcgaattggaacttttttcatttctcacttgaacagcccttctacaccatattgtttggcctataattacttgtaaaagggatgtaatctttattggtgattaaaatagaatgagtgtggctatatgtgtgttgaaagtgaaaaaaagtagtgtctatagaattgttttttttagtgataacttaaattatatctttttatttacatttttctattaacttaaataacggttaaattacaaaacaatattttttttttcttttgaagaactacaaacaacattttctttaggtgatactccaaacaaattgatacgtccataattatttgaaaaacagaactacaattaaattcgaaaagcaacaattattgatttattaaaaacaaaagagtaatttacagcataaatactgaagttttataccgagtaacagataagtatctaagtcgtatttttagcgataaaaataccttccgtcacacttgtggaacttccgtaggtgcccgaccgttaggtgccaaatgagtatctacgtggcaacatctcattggtccagatcatttattaattattttttatttaaaaaatcatttaaatatttaaaaattaaataaaaaatatttaaaattaaaaaattacaaaattattaaacaaaataaaataaacccataataaaaattattgtttaaaaacaaatcattaaagataaagtttaattcaaaacctaaatccctcgtttacatcaaatgtgtttcctatctaatcttttttttttttttcacttttccctattcatcatcttgttcttccttctcaccatcaatcattagatcaactctactacaccacaatccaacctctctcttttactctcttcttcttcttcctttttcactttgtatccaaattgtagaaaattaaaaaccccaaagaaagaatgtgaattgctcgatcatcggttgcctccaaaaccctaagaatcttttttgacacctttactatgccgcaggcatgctggaggagcttcgctctcccatcagcgcaagagcacaagtgtgccaaaaggttgatgataatctcgattgtgtgccaatctagtttcgtcaactcgagttcaatcaactaaaaaatcgccctagaatcgattatcttcatcctgtttcttccccagggacaggctttaatcaggacatggagagttgatttaattgtttgatgtgaaacacttctctcacccaacacttttttcgttatgttcatgaacatttcaagccttaaccgctccgttccactcgaagttgcaacatcaatcgccattttaagcacaaaaatgacctcaaatctcatatctctctcactgctatagcttaaaatccaagccaaagaatcaataaaatcactattttcgttcacaaaggccttaatttcatcattaggagtctaaacgagacgtataatacgaagaacttcttcaattccaaccacatttcctttttttttaaaacacctaataagaaataaagccatggctttgtttactccacgggatcgaagtcactcaagagatctaccagcgagtgaccacgggatcgaagtcagaagcatgcagggttaaaagggttagcaagtttcatgctggaatgaggatcaacaagacgaagaggaccaccatattggaatgtgaatcgtcagggttagcaatttttagagttagtattgttggaattatattttaccagaatctagat

SEQ ID NO: 114545 - DNA, 3594 bp, Cannabis sativa
  modified_base (3541)..(3544): a, c, t, g, unknown or other
ttaaatttttaattttttatttaattttaaaaaatattgtatattttatatttttatttttattattaacaaacaatatcaacttaagtttcatataaaatacaattttttcttttacaagtgataaaaaatataatttaaaaatattaaaaattatttttatcaaatgtatataaatttatactatggaaaaaataattaaaaatatataaaaaaaaattatataacatattttttatatatatttgtaattataatgaactagattaaaatattatcattattataatagaatcttaacaactcgcaacactttaaaattataatttaccaaacacttagcttaacttttctccacagttctgctacaggtgtttttccccacaacacacagcaataacttctttaatttctcacaacacagctatactaaactggctcagaatgcaatgtgtctatatgtgtatagacagattataatgtactaataaaaatttaaaataagatcttatttattatttatttaatagctataggaaaaaaaatctttcataaaattaaacaaacccaaattatttttaccttatatgtatatcatcctatgaataatgaagataaagtacaatcgttaccatttaatttaatttccaattgtcttttacaattttctcttttaaaaaaaaaatgaagaataatgggaaacttttataaacgaatgggaccctcatttatctccaatatttcactttctaaaagttgtcgttcttcttttttgctgacttttaaaatttgtcatgaaactaataattatgccaaattttcgagctttgcataatagcccctacatatatatattagcaaatgatatttacaaacacatgtacgttttcaacctttatatttctgcacatgtgtttttttccttttaaatttttcttaagggacaaaatttagatgatccaccacgtatatatttctttggtacaatgatgaattttattaattgagatgtaactaaagaaaatgatgagaaccagacaatatagtactgtaaataagattctgatacatgcatgcaatgtaagaaaggaagacccatttaaacatgatgaaaataatctggtctagaaagtgcaatttgtccatatatattttgttgttcaagttaaaatgtttgcgtgagaaaaaattaaataaaaggctttttttatttttattttttggttggttttttttatttggctgtggctagagaaatggatctacaattaatttataattgttagttttcaacaaaagaatgatttgggtgccgaagtttctcttcatatatagtaataataataatgtttgacgccaatcatagattatttattatgtgttacatgagataaatgcttacatgatattatatatatatacaatgtataatatataataaccagattttcattctaataacattaatagaaaatgagaaatgctaaaaggtttaaatggtgtttatcagtgtaattaaaaatggaactttaattatataatttaatgtaatgattttcataaaatattgtcaattaatggcaatgtgtcgtaaatagtattagtaattattaatacctaataataatatttataaaaaaaaaattgctaaaagggtgtttaacatctttatcagtatcatactgtaattaagtattagatcttatataaattaaaaaaataatttttaaagaatattgctaactaatcgtgtggtgacacctataaaagatgttgggcacaatgatacccaataggagtgcttttaaaaaaaaatgcactaaaaaaaatgcactaagagagaaagtaatgatgatggactatattgtagtctctcttgagtacatagctcctcctacaaattcacaaaaaatgaaaataaaggataatcgtattgctttttaacaagtgcacaggacaatgagcatctttaaggtaccaatatacaatttctccactactaatttatatgataatatctgtaagaaaatttaagggaaaaaaagggggaaattatatgaaaatagttgaactatacagatgaaaaaaatttgaggacaatatagtgcagaacacattggcaccagcgttttctttttttgactaaagaatgaattatacaacttttcataattataaactattttcaatttaagaatgagaggttaatgtattttctttttatttaactatttgttgtatttatttatttcttgataaagagttgaaatttgaaattggtcaaggaagggttgatgggcctaaaacacctaccacattggctaatgggtccctaagaaattcgggcacttaaattattaatattgaaaaaagaaaaatggggtgggattgggaaaatgataaagggcccccaagtttgcaccaaccagattttgccgaccacccaaattagaatatctctaatctctcagatcgtaagaccctgcatgagttgtcaaccgttggatcaaccgtcattaggtcacatctacggtagagaagcccttttgggtttggtcataggttaagaaagatttgggctcgtagtcaaagtctgactctgctgttccccaagagatattattggtgcacgtggcaactgaaaaggttgggcggtgtggtggggttatggtgaggtgaggaacagcataagaggaggagagccacactcagaatttgcggcgtctaacattccgaatacgttggttgttgtactcaccaccctatctccaactcactgccttactgtaaaatttttcgatcatgttcaacatacatattattaaaaagattaattagaatgtttgcttcggaattttgatacaaattaaattatacttttaaaattttcaaagcattaaaaattctttctcaattattaaaattattaaatttaagaatttatatccaatttcattagttttttttattgtattttgatatctctaaatcatgatcatgactcctaaattttcatctacattaatttttttttttgtaaactaaacaaaaaaatttaaattcaacatctcaataattttaaaaaaaaaaattaataacttgaaaattataaattaacttattaaaaattttgaaaattttaataaatttataaaataaaaaaattatatatagttttttgtaaaaaataaaaacatataaatatgacccaaaacattacaaacaacccaatgagtttttaaaaaaataaatataaaaaaaataggtcctacataaaataaatgtataattagttaaaaataaaactgtatgtacattttctttgaacaataaatataaattagtacatattttgtacgtcaaaaaaatagtacatattttgattactcattaattccctattataaagtatctaaccaagaaaaattaattatacactaaaaaaaaagtttttgagagaaaattacattactcaatcaaaaggtgttttacatagaataattagcttttttagtccctgtatttatgacactatactatnnnnccccttaatttataagtgtagttaaaaataccccctaaaatatatcagtt

SEQ ID NO: 114546 - DNA, 3574 bp, Cannabis sativa
  modified_base (27)..(38): a, c, t, g, unknown or other
  modified_base (398)..(400): a, c, t, g, unknown or other
  modified_base (517)..(529): a, c, t, g, unknown or other
gggattgcacagcttacccggtatttnnnnnnnnnnnncacgggactactaactgtcacatgaggatccttgagaatttttggctgcgacaacccgcaactttttgtgtctatgacaagcctgagttccgagaacaattactcgttattgacttaaaactggcagatgaaagttgggacgaggagtttatacgagaaaatttcaatatggaggacgctgatttgattcttagcatccctagtagagattgaagcctagaggataaaatattatggtattatactaataattgtgagtatacggtacgaagcgggtatcgtacaacagtgaaaatgagagaaatggtggcctagtctaattcgagatagctagaagcttaggtggcgtttggttggagnnnatgaaatggaatggaatggaaaggaaacaattttcattccatttctttgtttggttacatattaaagtattggaatgctattccaatggaatggcctttccaccattttggtggaannnnnnnnnnnnnttgaaatggaaggaaagaccattcaaatgcatgataagtaaaaatttaataattttttatgcattttaaattttattctattccatttctattcttatgttttcattcctcccagccaaacgccaccttagtgaaaaatattgtggaaagctaaggtacctccaaaagtcaagcactttgtctggaaaggatgtcacttatggcttcccaccaataaagtgttagctaaacgagacatggatgttgatccaagatgctccagatgtacgggtgggtgtgttgaggatgttggccatgtgttatgggcttatccgttgagtgtaagtttggaagcaatattgttggtgggatcagattcgaggacttcaaacttcagacacaattttgatcttccagcgactacacatgtatggttcaaagactcttttgttcttttttttttgttattgtgtggcatttgtggaatgcttaaaatattgtgattccccgccagggggggggggtatggcccatgggtaggggaccttttgggatagtgcgggaagaagataattaaactagataaagatatgtggataccgccaatagagggattgataattatcaatgttgatgtgggtcatcgaatggaggatatattagaaacaactggtattgtgatttgaggcaataatgaattaatgaagatgttcaatttgcccctgccaaagttctgtcgataactacttcacctttaattgctaaattgtatgctataagagaagggatccgtacaagattatacaacgtcgcttgccaaggtttcgaattgattgtcttcgtgttgtacaacttattttggacaaaaaagaggagtgtcgagatgttgatagattgttatatgaaattagtctcttactccaacattcggttgttattaaaattaagtatatatcgtgaatgtaatcaagttgttcatttattagtcaattatactttgatgaacaaaattaacactaagtgggtagtcgagttattcaactaaacatgctatttcttttgagttagtttttttttattaatagttttcatttttttttaaaaaaatatatattaatattataatttatataattaattatacaacatttttatttatcaaaatatatagtacacacattaatattattatttatttatttatttctacaatgaggtaatattacaatttctaatttttttttttttttgaaatggttacaatttttaatttagatgaatatatattctttcaaatatatattagttattttttaaaagaaatatacatacattattagttatttagttaaaaaactatatataattaatttttattatgcttatttttttttaaaaaaaaagactaatttttataataatatagtttaacatggatgcaaatatcatttctcacagtctcacacgcattaattatttttttttttttaagtttagacaaattttcagaattgttaatgccattcgtagtggacgtatctaataactaattaaatataaatgtagaaaaatacaacaaaaagtgtttataagagaaaattgtaatgtgggcccttggtatactgctcaaacgcatgtgcaaactccaacaatatctaaaatgtgttgacaattattcataaatctaagttatatatatataaaaatttacaagtgtttaaaataatttaattataaaaaatattatgatgaaaaatataattgtaaaaaaatatgttaattgtgtttaattatgtaggataatatttaattatattgtgttaaataaatttaattgtttagttgaatacaaaaatcttttatattattttaaaaaattaaaataaaagtatttttttattatatttatttaatgttaattatatataaaaataaaaaatttatttattaaagaaatatatttattaattaataaatataaattttattatattttttattaattaattaaaatttattaatttaaaaatactatttaaattaatataataaaagataataatcctactctattttaatatacaatattagcttcctcagttatattactaaagtagttagagtgaattagtgatcctcttgacctcttcctatataactattcaacgttcattaggaggacatccatccttttctcctctaactgaagttgcgtgtagtgtatggactctcaacttattattattattattattattatttaatattttatgttttcttatataaaattttgtaaaattataattaaaaaaccgtaaaattaagactaatatatgggggcccttggtatactgctcatacacatgatgtacaaactccaacaatatttaaaatgtgttgacaattattcatatatatatttaaaaaatttacaacctcttacttaattttaatacttgaaaatatatgttaaaatatatatttcttttttaattttttttttacggtggcagtgtttgttatgctagcttacaacattatttttaaaattttataaaaatttcgaataatttacagtaccaaaaatacgtttgaagttttataaacacgcgtggtaaattagaatatatatcaggtcttctaatttcgatactgtaaactattcgaaaattttcaaaaatttacatgaataatactataactataacaaatacggttatgaaaaaatattttaacatattattttaaacgtaaaagttaattaaaaaattgtaattattactcttcaatatataaatatgaagcaaattaatatctcgattaatttgacaatcaaaatatttgatcattaatgaaataaaacttatattactacccaacacctatatacatcttgtcctgcaattaattatattagcatcgactaattaaactcttcgatctatatatgtagacacttgccaaacatttgacttttatgatcatatattaagggaatattatggtgtcttttggtaacatttttgttttttaattttttaattacaaaatgaaagtaaaattttt

SEQ ID NO: 114547 - DNA, 5641 bp, Cannabis sativa
  modified_base (5286)..(5303): a, c, t, g, unknown or other
ctaatgtgtggaatgataatagaatatataagaggaatgggttactcctcccatagccaattggttttgagatgaaatctcattcatcttattcccaaattctccaaaccaaaattaaactctcatccactctcttacaatttttttttcttctcttgtttaagaaccaagccgccctagcattctctatctaggtttgacgaacatatcatatatttattcttatgctgtctccatttcctttctcgaaaaacttatttcacttttaagaatgttagtgaatccaagcccactactgcaactacttactactaaaaacacaactttttgtgtctattaggcactatcacaaagcctcttttatgtcaaaaaattgtgatacaaatacaattgacgctaagtgcacaccatttgccttgagcaatgtcacaaaattatcatatgcttcaccttcaaatttaataatagtatgttgacgacataaatgagtcgtttgcgatagtctctaactaacacaaacagtagaactcttttgtgtcatctccacagtcacaaaactcattttcagcgtctgtataactacctcaaataatatattaaaagatgaagaaattgataaaccgacaaaatcaaatctaaatttaaaaacataataaaaatatattatttatattaaattaaatatatttatttaatacatataataatagatttatctagttatacataaatttgtatatttatttagtttatcgagatttatagaaaccgattaattagagcgtaaggaaaatataaaacaaaaaataatagataaatagattttacgtggtttggccattaataattcctaatccatgagttcgttgtataagccttactgacgagtgtttaagtattacaagtgttaacagtatgagctctgtactcctctcgctcctcttgaagaagaagcttatatgaattttggaagatgttcactaagtaaaaattgttcaccctcctctacatgaaaaataagggtacttataggcacacatgtgggtaagggcataccctttacccacttggagttttttactcaacacgccttaagggcagataatacaataggaggatccgatcgttggtttggtagatagttattccatcgtggggtgcacggaggtagagaccagtaccatcaaagatcaggggtacgtgtcgcccaaaggtctttccttttaaaaccaacctctggacatgccaatgggaaaaaggcgtgtacagtggtccgcatgcactgtactatggcctggcacggggaacaagatttgaccctatgtcagaaaaagcatagtcgtcacttcggtgatctaacaagtgcagaaagtgccatctgcaataccgcatgggaagcgatatccatcataagtctttccgctgcctatatggacataaacgaagagagttttcttgtgaggattttccgggtccagaagaggcatctttcttttcgcatttgggaagtaggcataagtgagcttccgtgcgcccctttactagggatgatgcttcttttgaggaagcctttcagcgatagagcgatatcaaagggcttcaatcggctgaggattaatttgactttctctattggaatccatgtgtcatgccttgcaaaaatgtaaacaatatttagccccaagctttcggggtgctccgtggtccgggagcttgtagtgttcccccgtttcttcatgactaagtcttgacacgtggtgttgattgagatcgctttacatcccgcgagttgctgtttaaaaataggtcagtgatcccgagtattatcagcatggtaaattggcagcactttaaatgcaatcactgacagtacgtgtgggtgaggggcacatttcttgggagaagtcaaaatggcagcaggttgattgagacgacccttcttttaatacgcactttacacgagacatgcagtaatgaatgttaaatgtttgggctgatacagtcttttcgactccccattcgtcaaattaacagatgctttttggcgaaagtgatctgggtcatttacttcacattgaagggacttcaatcaacacataaaccggagtctgctcatcctcttttcatttctttcaacctttcaaaatctttccattctttgcactaggtgactcatatcttgattcaatccaccccctgctagataataactccgacagtcaggccggctacgatcacgtgctcgactgaacacggcacattcgagccatctcgtacaacgttcttttaggtcgtttgccaaacacccagtaagtatcttatcactctattgcttttatgcaaccccatgccaagtgtagaaatgctgagtttaagctaagtttagtgcatacttcatttcgatagaatgttatttgtagaaacatatcattaaagttgacctgtgtgcaagtctttgcatcttgtgagtatttatcttatctgaatggattgagcaaggttgtttgcatttcagagcatctgtgtattctggtatgaattcaggatttgggtcgagccttgttaagcataaactcgaccagttattaggctggcctaactttcccacaactgttaagagaaaagtgcagcaacctactcagatgagggtgcaccgaggggtagctcatccgggaggggtgactgacccttccacatgcactcttgagggtcgggcgttgcatgcttgataataattttttttgactttattattccgggttgactcatttattttgcgttagttgttcttgtaggtacttcctggagtaaaaatgctgggcttagagagagaagtttgttctacaaatctcgttagtggaggtggtcccagagggaagaggaaaagataggatgacatgctccacactgtgtctcctgatctgtcatcattcatccaactgtcccacgaacagtacccccagcagcaccgtcagtagaaatcgtaaaaccagccccatcaacattgggcccgacaccaactatttactttcctactaaaaattccttttgtgggctttaaattccccatgaagaccattcttcttgaccctaccgctatgttgagagcgggggaaattgaaaatgccttgaaagaatggcaagaggaggaaaggagggttccgcgtagaagggtcagtatgcttttagctgtgaagagggttgagactttggagggcctttttacttcagtctcaattgggctaatggacattgaggctttagaggagcgtttggctcccaaggtagggagagaaactgcccctttcgcagtagaacttttagatcaagtggctagcagtgcatcccagttgtccttggagacatgggcaacttgcagcagtgttgacgcctttgctttagtccatgctaccaagcaacaagcggtgggggtaagtttcgacttttccatttttgttctcactattatacatagctttctcatctttcattactgtatcatgcgactttgctgacagaaagggccactgaggaagtagagaccttagtcatggagattgagcagaccaatgctaagaatcaacaattgcatgctgctaatagggcccttctggctaaacttgtggaagccaaattattgtcgaggcagacaagactaaggagggcattgaggagagaatgtcctattctcataaacgaaatggcttctagctttatagatttttatttttttggtctaattctcccaacagaattaaacaatcatttgcttccttttctatttgtattggtattggtcatttgcgttttagcaattagcttgaagtgtattgtatgctccttacgaattcatatctttcttctatgaatgagataggttattggtttacatttatataccatacaaattatatccaccttttttctcaagttttgtctaagtgaaaatatcatgacatgtgtgactgataagtaaaaagaattaaaaaataaaatgaataatgttttatgacttagaatagtagaaaagaccgtaaaagtggatttatcatccgagaattcttcaaaagcaacctcaaaactccaatcctgctccttagtgtcccacgggaagtcacaaacaacaccaaggtgttgacgaagaattttcaaatatctggagcatgcacgtaattattttctcacactatcttatattattccttatcctgattttgtgatttttctactttattttgtattcctagctaccatttaacaacatataatagcggaccaaaattacgcaaacaatttaaattattgcagtaaatatacaaaaattatgccattagtaattataatatttacaatcattataatataaatgtatgagtttggttatagtatatatcgaatatgtttttttaagtggtatcatatccccaaggttcaagttcaatacattttcatatttgtggaagttataattctaattttttacacaacaatatttgatgcagttaaattaatttgcacgtttttgaaaaattcataataattgaaaatgctaaaaaaatatccgaaataattgttcaaacacaatattgtacgcatgataacaatgcaagtttggactctgtttatgtcactaaatatttccaatgtcttacgtgtaggatgtcgcccctactctaacgacggtcatgtaaatttaagcgcatagtacaatgaatgagaatatgggactgccggcttgaagaaggtccaactatgatctcatatataaatatcgttagctatcggtaagcttttacaaaaataaatgaaattcacattaaaaataattatcgtcaagcattgtatctcatagcatcgttagagaaatatactaaagaaggttacataacgcgctatgtatcgctaaacatcatcacacatcgatttaagtagtacaaaatttaaactagcaatagtttcaagtagtcatcaaagacgaacacacaaaaccatcgccatgtcaacgcaaatcattggcatcattacaacatccaaataaaatcaaacattaacaatcaaaatcataaaacaagccgtcgctaattaccacgtagacattgttaaaaaaacatgaaaagaaacccattttctcatacctattcccatcaaatgaaaaacacgattttattaattttaatcaacataacatattcagatatccctcttcttaacttaatcaaagtgtataatttaattaatttcaaatctaaaaagtaaaaaaccaaaatttaataataataataatannnnnnnnnnnnnnnnnnataataatgataataataataactttgaaattggagctagagatcgaaaagacgatgaaggtggagaactgaaggtagtagccgtcaagggatgtaaaggtgtgatgtgaatgtgtgtgttttcttttcttatgtagaaaaaaaaaaagtgagactaacgcagagatagagaaatcaaaacatcaaaaggaaagagtttaaatgagaataggtgtatttggtcaaagaaatgtatgttgcggtcaaccttgtaatttttttttgactaattagtaatttttcccccgaactttaacatgtaataaatcatgccctttgaacttttttagccgttaaaa

SEQ ID NO: 114548 - DNA, 3355 bp, Cannabis sativa
acgtgcctcgcacgtagccttttattagtatatacatatgtatctaaaaaaatttgttaattataaaataaaattgcataagagtcaaaataaagacatatattattataaaataataataatatatatttatataaacataaaaataataaaaatatattattaatattatagattatagcttagataaattttaaaaactacaactgattaactgagtaagactgaattaattagtttaagactcttttaataaattatctaagaagcaaaaaaaaatagtaatttcactactagaaaaaattgtatatatcttcaattttttacgatataaaatataaaactcgaagataaaagtagggagaaaatgaacaaaaaacgcaaacctatgtctttggttattttgaaataaccgaaaaataaccaaagacataaggtctataaatccttggaaaaagttgaaacctttcattttctctcttctctcatcatcttctcaaccaaaaccctaataaccaccgaacccgaacaaccatttcctccataaaccatcgttgttgttgttcttcttcttcttcttcttctaattgttattatcacccagaaacaaaaatacaccatagaaactgttttattttaaattttagggagtaaataaactatttctactttagggttttgtgagttttggagtcagtggcgacaatataaaacggtggcttttggagctatttttttaggtctttaagtttggattgaggcatagataactttaatatgtcttttagcttgtatttttgtatgtttttttttgtgagtttgatatagggtttggatatcacggtggtggtcgaaaaatccatggtggttgatggaaaattaatggcagagcttgaaaatttagtggtgttaaatggaagtgattgaaaaataatattgtttaaggattttcattttagggttttgtgtgtttggggcttgacaacgatggtgttaaatgatggtttcaatttagggtgtacgcatcgaattttttttttatttatataaagaaaatactcatgttttttaaataaccgaagacataggccccccacacattttcggtattttcaggacctatgttttcaccttgatagtactctttgatagcgagattttttttaactgtagataaataagcaaaaaaaactcgaaaataaagctcctttttgtagtagtgttttgggacatataaaaatgacaaaagaaatgatgtttatagtgtatattaaaagaccactatactatctaaataatttgggacaatatataaaactatctaaacaagagcatctccaatggtaaaaatttagaggatgcttgccgaggtagatatattacatgacaaaatattgtgatgctataccattagagcgagatggatgctattttagaaatttacatggatgctattcattaataaaaaattaaagctaaaatgttattgttgttaaaaattaggatatatattaaataataatgtgagagatcataattatagtattttcggagagtgctataccatttaaatatttttaaaagtaaaagtgtaaaatatgacgtggaagagagataaaataaaatattacatttttacatgttgtatatatttttagcatcctttaagagcatctcccatagtaaaatttaaaggatacttgaggtggacttataggtagcaaaatattgagatgttatactattagaaaaagatggatgtcattttaaaaattcacatggatgctatacagtagcattgatgctatttttaataaaatattaaagttaaaaagttatgttgctaaaaattaggatatgtattaaataataatgtgtaagattataattataatatttttaaaaagtattatactattaaagtgttttcataagtaaaagtgtcgaaaaataatataaaagagaattaaaataacatattatatttttaaatgattaaaaaattttaatatctttaaaaaatactaacacatattttaagtaccactaatacatttaaatttgatacgtggacaaatattatattcatattgaaataattaactaatggtttgtaggctttggtgatttgtgcaaggtacaccaccacgttgcatgtaccatattggccagaaccctccaaaaatatttgtcacattagtgccgtcaaatcctactttccaaatagtttttttttttctttaggaacttactttctaaatagttaagaaaataaatatgaggcacacatttttatttcgcttaatatttttatggtctttgatttaactcagtcatattataggcagttcaagaggtttcaaccacattattcttcctccaaataataaagttatgattttatgatcgatcttttcaaggtcttataatataattatttgttatttttcagtgtcatcctgaataataattgaaaaaatagattataaaaataagattcgatatattattatatcaatagcaatatgacaataaaaaaaaatactaactattttttcacttcagctatctcgtaacatcgccgtaaaattaaataaataaatagataaacaattaataattgtagtttctatcaaaataaataaataaataaataatagtagttgtaggaatttgtattcccaaattttctacaccactcaataagtttattagaaaacttaaaaggaaaagaatgaccttttactcacaataaagataaacttggtccacacacgtgtaatcttccaacagtcaagattatatgccaacagccaatttatatttttggaaaatcctataatgacccccaaaatggatatatatatatatatgatagcgatacatttctatgggttttagtattttttagtatttgatttgaaataattttttagtcaaattttttctcatggccatgtaaattatacttatttaagacattctgcaaaattttaataaattcaaaaaagtttagtacgtcgaaaattacgttcaagctgtgtgttgcacgcgtgactattttattttataatcgtgtaaaatagtctgtttgaacatttattttctgtaatattctcttaggtaaaagtgtaatttgagcccacaataattgaattaagactatcacagaattgataagtgtggctctacttgcaaaatataagtgatgtgagcgatccaaactctcattctagaaactaggggtgtgcagaaagtgatccaatcaaatcccaaccgaccgatccaatcccaaccgatccaatagaatcggatatccaatcataattggatcggatcggatgcaaattttaaa

SEQ ID NO: 114549 - DNA, 2605 bp, Cannabis sativa
  modified_base (2544)..(2552): a, c, t, g, unknown or other
taaagaataggattttgttaatttggccaaatatattagtacgtagtgaagatgttgtttggtttaagaaccttacgtacaaaataacgtgaattgtttagaaaatgttctgattttcgaagaaaaaaattaaaaaatattttgttaaacaaaacagtagaaaagagcaatgctctgttattgtattatgtacaagaatggtgtcaattacattagtcgtgagagtggagttacatgcccttttatagaacaagggattacaatgttgagagagatagtaactaacaacagaccgtgactaacctattagaatgtgacacctaagctaactaactacttattataataactaacattagttaggcaaactagaaaataacaatattaatattaacagaaagaaaagaatatgtcaaaaaaactaatactttttgcaagtgcttagaatgctgatgactattttacattgcaaattatactaatttataagagtaagatgcatatatattaatgatcctaaataaaatttggtatataaattactgaaaaacataatatttattcatatatattattgtaatacacataatcaatattttacattattattatacacatttttctctataattattctaagtaattattaattttcttgctagctagagctggggtaaagaagggaaatgccagcttggatcatattttgagcaagaaaagtatttgcagtttgggagggatgaaaagcatcccaaaagacataatcagaagcattcgaacatgtcccaatcgataattcattgcacaacaatgaagtctccaacaatccacttccacagcaaccttttcttgtctcaaaaaatcctgcaacaataataattaattatataaatataaatatatatatattttttacatgcatgtattataaatactaaccattttctattggatttgttacaagggtgtagagtggttggtatatgtcaaagacaactaaattaattcaagccagataatctgtttcttaagctttgggaagttgagtttagtcttgtattgaatgaaatagcgtcgtaattcaatctatcaacacataattcactattcccaaacccaaataaggtgattgcccctggcaaacaaccccgtggtacagctcgatcccgtcgaatataaattctaatcacaaaaccaaaaccaaaattaaattatagcatgtaacctagctaattaaattcattatttcatcaaaaaattatacatatatatatatatatttatacctgaacgaatcgagcataacttgtgaggagcacattaaaaaattgttgaatattaggataagtaagttgaagaactgggctgatataataattttgaacgaaatcgcttgtcccagaacttatcacataaatactattagacaatatagaagaagcattggcttcccctaccattcccacaattcttgcttggtattcttcgaaatactccaattgtttacttagagaaaccgcaaactacaaattaatataataaatacacatttgttaattagtctgtaaatatatctaaatatatatacgtaacataacaaatatgaatatagatatttacgtataagtttgcagtagtatcggaatatcctgaaccagcagaagcaaaattagctccacttaaaatattgcttccaattttcgcttcattgctcagataagcaacttggtacgtttcgaataataattgatctttaactgcagaatgatcaaattattatgaacaaataaatttattctaaattaagatatagatatatagatatgtatatgatgatcatcaaattataaattttattaattaccgagaaaatcaatggccaatttgccattggaaaatctaccggtcggagtgtgattgaagtcccttccataaggaagaaaattggacttcacaagcgtcggtaaattgttattattaccgacgtccattgtagagtctccgaacagaaacacagcaggaactctctgctgtgtggaattttttacaagaattacaaggatcaccaatattgtcataattgacttcaaatccatattgatgatcagattcaagcttcaaaaacaaattgatccttataattaattgaaagatgatgagatattcagagactgatgaatgcatgatatttatatgcatgcatggatcatttttcctgattaataattgatcatcaccatctttccatttattttgtttgaaaattaatgatcaactaacaagctttgaatgagtagttagtttaattttttatgtgtgaaatatattatgtaagccaacattcaaagtacattattaattatattaaaccgttttgctatatatcttttctatcttttccattagttcatcaaaatgaaataaataccttattacaaagtaaaaaagaagaaaaaaaaaaccgcacattgtgtatgtatattatactttaagcaaaaatatagaaaatacaaaaatacagttgtacagaattttaaatatttnnnnnnnnnttatgattttatttacagaaaatacggtcttgtactcatattaatttgttgtt

SEQ ID NO: 114550 - DNA, 4398 bp, Cannabis sativa
agaccaacttgttttctgcaacttgttattggaaaataaaatgcctaaacattgtaggtggatttttcatcaagagagagaacacaaacaaaagcttactatggcaagttcacctctcattttcgagctggtgtttttctacttcactttcattgcacaaagttcgctacttgttgggttcctaaaaaaaaagaagttattatgagcaacacgaatatagaggacgaattgagttgtggttgtttgctccatggcccagcatcacgattatagattggacaatccaaaaactcctctgttgaatccacgtagtatgcaaggtcacatagaatttaattttcatttgtccatattttgggtttgttgggttcaggaaggcaaatggttatgagcaacaacaaattcttgaaaaaaccaaagtctaacttatatgagaatgcgttcagagatagtcaaatggttataggataaatggatgaacatttatgtgaaatctcgtgtgcaaattgaatttctaataggatcacctgacttttatttcaatagttggcaagatgacagtgaaatccccatttcctttttctactgtgttgttggttatgcgcgtgtagtttcaattttttagggtatcattttgggtgcctccacaattagtcgtcaacgaataagtattcgcaatggtgctttgggaatgttcaattttgttgtggctttaagtgaagtttggcaagttgtttcggcttgatctttcagttctgaggatgcctttagctattgggaagttgaactttggtgttgtcctagagctattaccacgttgggctttcaacagagcgcgacaaactcaacatttactatttgattttgccttcgagttccaattgtgcatctatatggtaagtatagtttattcaagtggtgaaatgcttggtttcactatatagcaggaagattggccgacaagtacaaaggctcatgcacgagacgttttacttcagactcaactcgttcttgttcatttaatgaagggaggtcaaatgacattgcttgactggttttttcgagcgaggtcaacttgttgaatgctttattttcctctcacagcttgcagaaccaatcaagaggctcactcaaattgccttgttcatccacttggtatagttcgacagctgattacgaatggcactattgtccttaaccttgacgacaaggttaaattcaggtggccggtaatattagaccccgagataatagaacatggtataagaaagtttaatagaatatggtataagaaagtaataaagggtagatgagtcattgtggtgaggatagtttttgagtggtaataggataatataaatagatgagtttagcagagagtgaattatgcaaggaattgagtattctcaaattgcatcatggagagtgagcctaggcctctcgaatgcctagttaccattccactgtaattctattgctgccatagcagctacaatacacaagtttcatacatttttttgttattgctcttgtatattctactattcttgtagtctctataattttgagttgtgtaccagccgattcacttcagaaaagtattggctgaccaaaattacttagaaaatggcatcctagttaaggcataagcccaaatgaaatccaaattatatgaacagacataccatgtgaagtccatatccatcacgatacggagcggcagagaaactcccatctgggctgctgaatttcattccatatgacccccctataaaaccacatataatcaacgtataagagcaaaatgaacaattatcaattaaattaggaaaaaaaaaacatgtttgcttccacctcccatcttgacaaaagagcataggatctacctgcaccccatggtctgccatcagcattagtgagttctgcacgtaatttctcaacttctcgagccatggagactaagttcttctccattgcctgtctctgttccatcagctcaatatttgcttttttctcatactcgactgcagtcctataacaaaaaaaaaatcaaatcattagccagctaatttacaacattgatccaaagtattggcgtatattaagttcaagcaaaaatacacatttttataaatttatataaatataatcagacatccaggcacaaacctagtctgcataagttcctggtgcaggccatcaacctcggctctcaaatgaggaatctgttgattatcagcttgcaaccttccaacttcgagtttaagagtctttacttgggaagacagctcctgcttaaggtccttgagcttctgaacctctccacgaagttgtacagcctcatttttaattggctccgttgctcgaagatcagcctccagcttcatacccttctcataaagctccctagaccttaaatcctcttcagcccgaatctctccaatggcaatgttcatacgatgaagctcctccttcgcagcagcaagctcacgctgcaacgcaattcgatcttcaaccagcctcctattatcacccaacagtctccgcatttcaccgtgctgcaattcaagctcttcctccaacatcgttgggtgaggcatcggtcgagataaatgaggaggcctagcataaggtccttcaacagggtatccacgcctgctattcatggcttcacgagcaatacggtttctagcagccatagtcaattaccctgaaacccataatttcttagataaaacacaaacaaaaatcacagtcatctatttgaattgaaaaccaaaatacacagcaacaatcatgcttcgtggttacttcagttttcgcatatgtgtggcaattaggtatatgacccgacaaaaaagaaaaaaaaaacatatataattacaatctaaaccctacaaagcacaaactaacacagcaaaacgcaaatttaatgtaaattgaaaaagaaaaacagccctggaactcttaccacaatcgagaccggcaaagcggtgaggaagagatatgaaaaaacggcaacaaaggaaaaggcgtcggcagaggaaaatagaacggttgagagggacggtaagtgggagtgagagggagaggcccgtatgagagaaaaagagagaaagagagaaaaagatatgagatctgacaaacgaggaagaaaagagatggatgcccgacccatattaagccctgaatacaaacgacaacgtttttaatgagcgataagggcgcctcaaaaatgggtcttagaaaaacgacttcgttcattaaaaaataattaaaaaaaaatatccaacaaccttggaaagtaatgatcgtaatatttttattttttaattacaaaaataaatattaatttttttttaattataaattttatttaactagactaattcggtctcaacaatgtcaacaacatcaaaaagaagattagattccaaaaaatacgatcaatatataaacgagacgctcgagtcataagatgagcacttaattagcagatggtttgacaaaatgtaaaaaaaaaatcaataaaagaagataaaagctatttataattatcaacgatactaccaaaagtgaatgacaaaacattcaaatttcttatagcttgtactgataccagacaatcagattcgataatactaacactcgaaaaatcacgcttcaaccatgaaagcatttcattgagagccacaacttcagtaatctcttgaagaactcgcccaaccagaattcctgaaaaaatagccacgacccgactgtggtgatctcgaacaaccccaccaaaaccatgccttcctccctcatcaaacaacacaacattaatattcaccttgagtttttcataacttggtttaggccatagcttagccccatccaaaagataccaagtatcaaacaaaggaaacaaactcctttcttaagcttttccccattgattcaaagtgaaacgagctaaattgacaacgaactccacctaacatttcttacctttccacaagagttgattctgtgcgaactaaattgcccaaaccaacatcactacttgaacactttgttcatcacccgattggaagaacaagtgaaaaacccagtctccaaacgaccctataacaattggaaccatagccaaacctacgatccgccaacaattggaaccatagccaaacccacgatccgccaacaattccacgcaaaatcacatgaaactaaacaatgcaaaatagattcacccaccttatgacaaacctggtcaagtaagtttcctactatctctaaaagttacaagcaatttggcagtgatgaaaagtgctacacatttctacacttttcttatctagaaaattctagtattaactacacaaagctaagaaaattagagaaaactagaattaccta

SEQ ID NO: 114551 - DNA, 3891 bp, Cannabis sativa
  modified_base (49)..(74): a, c, t, g, unknown or other
  modified_base (3844)..(3859): a, c, t, g, unknown or other
atcacgtttttccataaacctcgtcgattagcaacgagctgcacagtannnnnnnnnnnnnnnnnnnnnnnnnntgttagttagggtgttacatccacgtggacaagattgatatcacgtggagtacagcttgtcagcaagaaggccaagtcatcatgcacaacatatcagttggagaggagtctgaatacgtaagcgggataaagagataacaaattggcaaacttgaggggtttggccagccctattgccagcataggccggccagcctccaacaaaggaagggtcgggcagctttggccctgacagacactttttttgcctctacagctttcatcctggacaacacttctagctacatattgggcttcaacaacccacaaaaataggagataaactccagttatttacctattcttggggactaattaacatgttatttatttattattttaatttgtaacaaataggtgatatctcctcattttaaacctaccatctcttgtaagctctcctatataaagagcattaaactaaacctaatctctctaagtctaaagttctaggttttgacttctaagctctctacgctctgaagctctaagttctaaaactctagttctctctctctcttctacacgccccctaacagtgtagaagagactaagtctcccacatctctcctacttgagattttcctcttgattctcactattgtaatcttaagagagccagtccagaatccacaataattgtgatttgagtggtattatctctaatatcaatacaaccaaaatgggagtaggtcattacccgctatctaagggggtcaaacctctataaaatattgtgtccctttttatttacttgttcttattgtgtacaggtggtgatattagtcataaatatgactccgctgtcggttgcccaaatttgaggtcaacaaatagaatccaagcaaagttcctcatggagagacaaggtttgacccgtattaacacttaggtcatgcttcctcattctatagtaacaaagttggcttatcattttgataggttttttccaaacttgtgataagagagctactagaaatgtgaaggaattccaggcgtgcttcttttatctcactccttgtaggaaagctttcaccatgatcaatagaccaaagcaacggtaatagaattcaggcaatgttcccttttcagggaaaaggctgaaaaacgtattggttatgctttttgtgggaaccaagttgagtatgaaatagacttcaagcgaatcctctttcaggaaggagggttgaagacttatcaaaatccaagtgatattcccacttcaagactaaaggtgaaaaccaagttgaatatgcaatagacttcgaggaattccccctttcaggaagggggttaaagatgtatcaaatttcaagcgatattatcaaccaagtagtttgaataaaagaaaagtaagaaattaaatgcaaataaaaattaaatacaagaaataagcagggcattgtatgtttttgggggcacatagctaactatactacccccaagtgagctaggaagtttggacgtctccaaattcttggtcactttgtttgaaacatagcttgtgtaggagacaaaaatgtaaattcttatgtaaatttcttctattttcatttcattatactcaaattttacattaagaaagagaattttacaaagaattacatacaccttagaaggatgtttaaatttagatacccctagcctattggtagtaacgatgcaaatggtctgcattccaagtgcgagggatctctgatctgtccattctgtagagttgaaatgttccatttcccactttatgttgtatctcatagggtccttcccaattaggtcctaagacccccactcctagttcttacaaagctggaaaaactctcctcaagacgagatctctgacgtcaaatgtatgactcttgacttttgaattaaagtgcctagtgatcttgccttggtacatcttgagttgaacttatgactattcctagagctcttcattaaaatctattgattcttggagcaaagagtggttctgtgttgggtcgtaagtgtctcgtctaataaagggaaatatggtttctatagggaggaccgcttcacacccataagccatcaaatatggtgtgtgccccgttgaagttctctcagttgctctatatgcccagaggactcgcggaagctcttctagctaatgagctttgcaagcttggagtttcttcttcaacgttgttttcaaaatcttattcatagcttcaacttgtccattttcttgtggtctagccacaatcgagaagctcctcacaattccttattggttatagaagtcggtgaagtgatcactatcaaattgcttctcgatgtctgagacaatcctgtgtggtagtccgacgcgacacacaatgttcttaatgataaagtccaaggccttcttagaggtaactgtattcatgggctctgcctttacccatttggtcaagtattcaacagcaactatggcatacttgactcctccttttccagtggggagggatcctactaagtcaattccccaaacaacaaagggccatggacttgctcatgaggatgatttccgttggtggcactcatggaaccttggcgtatctttggcactattcatacttctagacgtactgtaacaatccttcttcattatgggctaaaagtaacgctaacggaggatctatttggataagcttggtcaaaaagtatggtccccacataaaccttcgtggacctcgtgtatgatggcacttatcttttttccagctatacacctcaggtatggcaccaataaccccttgtggtaaagcttcccatctagtatcacatattggggagcctagtactggacctttcaggaagaaactctgtttgccagaagctcccctaaatttaagaactgttagatgggccatatcgagaagttggaatgatcagcaatggcatttaccccatgggcttcaatacttgaagcttctaagtgggccactggcaccactccatattggatgatctctgggtctatggtgagttttgctagcatatcggcaaaagaaatagtcttggaggacctaactgatgttgtagcttttaaacccttgcaacagctccctaaacatcatcacataggcagccattctttcaactttggtttgatatttcccaaatatttgattcaccaccaattaagagtcattatgcacttcgatatattgggctccaacttcctcagccaatcgtagtcctgctagcatggcttcgtgttcagcttccttgttggaggcaggaaatttaaaatggagagccctttagagttgatgtccttccagagagatcagtatgattctttctctggcttcattttcatttgacgccccatcaacgtaaactttctaggtaggtaactctaggactggttcatttgggaggtcacttaattcgaaacattccaccacgaagttagctagggcttgaccttttatcaacaccctcaactggtactagatgtcgaattgactaagttccatcgcccacttcaatagcctaccaaatgcctccagctttttaagcacttggcagagaggatgatttatcaatactttgatggtgtggtcttgaaagtagggtttgagctttttggaggcgactagtaagcaaaaggtcaacttttcaatcaagggatacatggactctacacctagtagtcctttgctgacatagtataaaattttcctatttaaatattataaataataagtagtctagaaatnnnnnnnnnnnnnnnntcttatttgactaagtatcttatcaacaaaaa

SEQ ID NO: 114552 - DNA, 1897 bp, Cannabis sativa
  modified_base (97)..(105): a, c, t, g, unknown or other
tattggtttaatttatttttttttaattattttaaattaattttttttcttatgttaccttaatggatacccgatgggttccccataaccgatgggnnnnnnnnnaccccgaatccgttggttattaaattgggatggggtgggataggggtataaataggtagcgggaatggggacgatgcattccccgtacattaaccgtccaaattccatctctagttattacctctcaacaacactattttattgaggggttttaatattagatttgtgtcttttcgcaccataatgcatacacaattcattgaacttatcacacataaactcaaatccattatctattttaagggctttaatttttgattctttttgagtttcaacatacactttatagttcttaaattttgttagacaatgattcttatttttcaacaagaaaacccatatttttctactaaaatcatcaacaatggacaaaaaatactggttacctccaaaagttttgatcctcatgacacaccacaaatcaacatgtaggtattccaatatttatttttccttataacggctaaaagaaaactttatcatgtgttgctttccctgcacataagtctcactgaaaggaatgttagagggtttataattcaaaagcaagccctacttggagagttctaccaaacctttctcactgatatggccattcatgcatgcaataatttcaaatctaaattacattttgtgacatttgtagcttgtgcaagtgtcatagtcttaccatataagaggtatagtccatgcttcttaatgcctcttaaaacaaacagtgaccctgctgtgattctcattgttccatttcctttcttgtactcatatccctcatcattcaaacttcccaaagagatcaaatttctcttcaaatatggattgtgcctgacctttgtaagtattctgattgtgccatcatagattcttatggtaatggtacagataccaatgtgacattttttatcattccccatcatgacacttccaccatcaatcttgtagtagtcaataaactagtcctttttggactcatgtaataagaacaatgactattaaggatccattcatcttgaccttttgatctgagctagtacaggcatctcaaactgttgacttgggatcttgaacatcaataactgcgaatacatctccatctgagttatagctatcatccacctttttcacttagaattactgcgcttgtcttcttcctttttcttcttcttcttcgtgtctcttaattcccaatagtttatgattaagtgacccatttttccacaatgattgaattttattgtttccctttgtcttgaattggatcttaaatttcctctgggtcttgaattgtctttggatcttgagccatttcttcatcttgaattttctcttctaggatgtctaccttgagccaatagaacttcattagaccatattcttgcttttctaccttttaccaattcaagttagcatcacttgatctcagagtgctcattacatcttccaaagtgagaatgcccctattatacattataacatttatcatttcttaaattgatcatgcaaaaccttaagaacaataacaacttgattttcttctttaatggttaattttctccatgttagtaagagacatgataattctatttaaatcatataagttctattctaatgaaacaataacattcatcttaaaaccataacacttccctttcaagaagatctttgttcgttttggtgatagactatctcactaggttgttactgttggaaatttattttaccacgatcttagatctactcacaagtatgtttgttaacaccctaaataagaactttctaaaacgataaatta

SEQ ID NO: 114553 - DNA, 2190 bp, Cannabis sativa
  modified_base (2157)..(2165): a, c, t, g, unknown or other
gttatgccgctatgatatcacccaaaacatatacaatcacaaacacaacatgcttgtataatatgttttatgctaatcttacctcgtttccgtgcttagatatgtcgatcagcctaagtggaacagcaactcgacgtattacagggccctatatcataacattcgtaaattgatgagagacacgctaaaacacttcccgaggacttaaagtcaaaactagaaatatccttatcgataaataacgtaattatcacctatatatcacaaaaatgggaaaactagggtttacaaaattgtcccaaccggcaaaccggttccccaatcggaatcctagtttgataaggtttcctggggaccatcctgtcgaccggttgctacaggttcacctgaaccggtcgaccgatttagtgcaggaaccaccaaaaatgtcctagcaccacaaaacaatcccaaacttcctaatactttccagaatacctgtatacgccaaaaccaactcaacccaagcaataaaacacaacaaataacacagaatatcaaaacaccattagagcactaagcttaagttcccaaactccaacttggctcaaaccacaccaaaacccatcaaactagcttaaaacatccatcataaacctaccttaacttcagagcacaaaatcatactaccctaatacattcagcaacctaaacccaaaattatacattatacttaacataagcttaagaaattgagattcgagaaactaagaatggataccttgaatcaaagcattcaatttttccaccaagaatccttgatacagatcaaacaactccaccctagttgctgccttgaagaagagagagagagagagagttgtgaagagaaagagatgagtctctttctagatttctctatttttctaaccttaagtaaaatcattttcttttaattaaatctaactttaatatcagcctctaatgttcacaaaagacaaaaaaggaaagtttctagtataatgactattttgcccttaacaaaagacaagcttaccaacataaaagtataatttggtcatttctaaatcctgacactttcctgatatttctaatgcctaactattttgccccgctattaacattctaaatcatacaaaacgtaactctctaatggcccaacatcgctttccactgctaccggactaaaacaccgaaaataagaaattcacatatttagcatagttaatacatactgaacttaaataaatctccacaatatataaaaattataaataataactcaatctcataattaaaccctaataataaataattcattgtattaaagttaggcggtcattacattatttacctaaaaaaccaatcacaatcccattcattagccatgtttcttgttgtcgatgagatctaaacaaatcagatagttttctctctccccatgaggtttagcccttgtctgtagcgttttcgaagttcgatgagctaacacccaattttagattttggaacgatggtggtggattgataatggtggtggccatggaaggtttgtgatgaaaaagaacaaggaggcatgaatagaagagagaaaatgaataaaaaagagaagaaaaataaaacaaattaatttttttattattttttattaaaattaatatttggataaataaactttcaacacgtggcattcttgtcaaaatttaacaaatatgtcaaattgggtagtgacggacttacaataaatgtgaccttgggactattaccatcaatttttgaggttaaggatttatcttcatcaaagtgaactttttggagacttatgcagtaattttttctttaaaatatagtgtaattagtattttctactagctttcataagattttaaaataatttaccatactgaaaattaggggtatgcataaattgatccaatccaatgagaaccaattaattcaattaaaattgaccgccaacattggatatctaattgtgattgaatcgaattggatgttaattttaaatatctaattggatcggattgaatgttggatgaagtgtctaaaaatttaatatatctaatatccaatcgcactaattagtattttcatttagtttggatgagtaatcatattttatagggaaaaaaacagaannnnnnnnnaaaggaaaaaaaattacaaaaatac

SEQ ID NO: 114554 - DNA, 4426 bp, Cannabis sativa
ccgtccaaaagaccgacaaacgtatattcttgtgtataaattgatgaataggaggagattaggtggtagagcatattagcaatattgggattctatcaactctctttgtatacataatacaaacaaaatcatgatgttttggtcggcgtctaatcttaattaattcattaaacatatatatatgtacaaatacaatagttgaagggctgtgattattattattataataatattattttcaattattctgatttttattttgtatatatatttcttttcatggggagttacttccttcttgagattgagcttttatataagatgggtcattatcatcacttcgatcgagtattggagaagaaactaaaaagtttatcaccatacacaaggctgttatatacttcttggtttttctagctcactcttatatatatcttgagattcttgatttggttggtctagagtttggtgctataaggagctaagaaatgaaagtgaccacaagtttaggatatattagagtggttggagtagtagtaggagtacatatatatagatatataggaacaaattatatttatacatacgtatgacataaatttaaattgacatatttttaatggtatataagtgaaaatataaccaaaaaaaaaaatgaaaatttgacgtgggacaaagatatatattcagacttattaagtgaagttattataatgaattcccgaattcggttcaaacacattataacgtttcagtatttatttattttcttttttgaggaaattggaatatttaattaataggtgtataatgatggtatttttaaaggaaagagtatgagggttagtaacccactacttaatcatattgcttagagttgcatgatttgtacataattccttgtcagatgagaaatgatgttgtatccaattctaggagccttatcaatattatatatcattgaaagtaaaatctctgagtgggatagatgttaaataaagatgattatttagtgccatgaagtcatgaaagcctgtcctataaatttatatatataactctttaagctttgacttcttataaaacttcatcagtccgtgtaatatatatatacaaacacacacatatatataattagaaattgttatttgtaagtgaattcgatgttgtatatatatcatactttttcaactaaaaaattgttctaagtggcctgcatttggactaaattaaatgtcaactaagtctaagaaaaacaagagttgcaggcatgaactcatgagccttgacattattaattaattacatatatataataatgtgcaaagttcatgtacaaacattcatgtttatataatttatgtatatatattatattataaggcactaatggagtcaaaacacaagtacatgaaattggtactcgtacgcaaacaaacaagaataaaaaatgaaatcccaaacttcttcgacatttatatataaataagaaaataaagttaggatatcaactcaggtataaaaaaattatctgtccaaattaattaaacaaggtatgatgaccttaaatatgtgatttggaattgttatatattagcataaaaattagagtaaaaatctccaaagaaatcaacccatttatgttttgaaaattgacatttgaaaaagaaatctccgatcgatcttgaacttttttctcataataataataatagtcacaaaagttaattagataagctaagtaattagtggtttagcggtgtgccaccttggctacatgtaagtaaagaaaaaggtatctcaattaccaattgaattattattatgagtcctaagctttgcatttcttgtgatgcaaactttgggatattattgtggattgggttcttttgggatttttcattagtccccacaatcacaatttttgaacccttaaatatatattatgggtaaataaaaaaacaccctacttgcggcatgtgaggtgcatgatgaagaggtgtgaacattaactgagaaacaaaatgattaactcttttgtggggtcagaactgatagagaatccgacataataatctttgcttttttttactaccaagtgagaatatatatgaatttagtcatcataccctcccaaaaatgttgcataaaatctagtactttcagaacagaaacaaattaagctcactaaaagagagtttggttcttctctctctcactattccacaactcaaatcatttcccaggactgcttcttcgcttgttgactccgcaactaaggatttagtgttgaagtaaaaaaggaccagaagaaaaagctagctactcatttatggtaaactcattgaccccacaattatattgggtgacaaatttttatatatatatatataaaaatatttttcaaggctgatatatgtatagctagctcagtgtgttataatttggatgtgacataattaagtgagactgtttttatgctataattcttttgggacataattgcactactaatagccagcacatgcttgcatatgaataaaaactatattatatgaggaatccaaagccaaaggaaactaaaaaaaggtgaacacaaaattggaaaaatgtatattaaaaaagatctgtttctcattaaggattgctgctaaatcttatcaaacatgccttgatattgttggtagaccttaaacaatatcacttattatgattgtattgtattaattagacaaaacgttatatatttattaattcctagctcttccttaataaaatcccctaccaacccaaaatctcttggcgctttacaatattataaaaaaatcctcttaattattacttttttcacctcacatattctaaagaaaaaaaaatattttaaaataaaattattaattatatgcaccttactcacatattatgttttgaaatttgtaattatctcaaattttgacccaaaatcacatgtgacaagatttttttttttttggaagaaagttaagtgcatggatggaatggaatagcatgtagaatggagtgacaattcttctatatacagatatctttttttttggtttgtcaattttcactaataattataatccattttcgaataacttttattcttagccacacccactacctagtagaaacctcactacggaaaagaaataaaaaaaaatagaagcctttagtgagcacttttagtgataatataaaaatttgtgataaaaaatataagtaatgtttcatatgaatgaatagaaataaaaataagaatgagaatataaatgtaatagaattaaatttaaaatacataaaaaaattaaaaaaaaattattaaatttttctcattttttattgaaataatcattaattccatttcaaaatagaatattcattttattaaaatgatggaaaagtttcattaaaataacatttcaatattttaaaatgcaaccaaacaaaataatataataaaaattatatctttttttattccattacatttcattacctctaactaaatacccatatgtgtctatttccatccttttaaagtaaattaaaatttaaaacaaaaaccaactatcaccctctcattattttattcgttaattaaagtagcatgagtatagatagatctagtttattgcaaaattaatttcattcaattccttcaactaacaaaatccaataattttgattctaataatatatgcaaacaacatattattcaatactcttattggtagcttaagtataaagaaaatttcattaattttggtattaataaagattctcggtgtaagagctaaaataatatgttgagaagtagacattgacttcagatttgatttgagttaaaacaagagaatagacaaaaggctataattttgtctataaaactagtgccaagtggtgcttgaagataaattgaagaagataataatgaattctagcatacaacttggtgttatgtgatattttcaaattagaactttcaaaaacctatcttcttaattggtggggtaaacatttttctgtattctttacatgtacgtttagtccggaacaaacatatatctgtgttggagaacccacttttttttttttttgaagaaaagaaaaacagacataaaacagattgatagagtgtctgaggctgatggggtcctcgtttggaaattggaaaaagaaatcttcttatattcatttcatgttgaattaagttcaagaataggacgataaagaatttgagaaattatgttacactacagttttgtgtgtataatgtatatgtacattctcatagctaaatgatgataatatatattattatgggggaaattccactctatactctttttatattgttctgtttcatttttactatcttttttaaaatctatcatttttacct

SEQ ID NO: 114555 - DNA, 6121 bp, Cannabis sativa
  modified_base (199)..(199): a, c, t, g, unknown or other
  modified_base (621)..(634): a, c, t, g, unknown or other
ttacataaatgacaattttatttagtaattaattataattattaaataaatagttttaccatttatagaattaaacttggaaaatatagtattactaaaataagaataagtggttgaaataaagtgacaaaattataactagagagtggtccacctagtggccgaccttagtgtgtaattttgcccaatattttattcntttttaatccatataattcaaacttaagccctagttgaaacactgctctcatctcatccaattgattttcaacctaccaaatctagtttctaactgtgtcagacaactagtagatgagagacaccttctatacagttttcgaaccctccttcattgttcttcaaccaattcgcccataatgatagagtgtcatgcccacacataacaagtcaagtactcaatcatagtgcgaaagatggtggtaacaaaacccggaggagagaaagagatccaggctcagatcttgataatactttgtgacaaaaaagaacaagggttagagatctaagcggaaatagtcatattattttgctgcaattaatgtaagattttctgaactcttatgtgtctaattttatcgtattagagatattcatatttannnnnnnnnnnnnnatacttgttagtaaatttagatcccggtaaaatattcccaacataaaccctaccaacactcgtacagtagtagtacgtagtgcatgtggtacagcggtcgtaccttagtaacgaacattcttactcatttgataagccttgtggataggtgtatgagcgcctaaatacaagtcggcaatatattatatgttatatgctttttttactgagtttgaagctgaacaggagtgagtttcaagctcgagggatgattgcacatgtcgagacggtgcgacctggagtgttcggtcttgtgacaacttaggctgtattttgtagttgctgtgcatcatgtctgtacaaattatttttattatgattgtaaaagtttaaatataggatcctcgtttgtgtaaatatatatatttataaagttcaaagttttatcaaaaatttaatttgacataatttttaagaaaaactctttgattagcaaaggtggcaaaataattagaaaaatcactgtagcgcgcctaagtatcagggcattacaatctaggtgttgctcttgtttcaaaaattctcaaaggcagtgagaattacagtaccagaagaagggcaatgttgattgctcttgtagctcgagataaggtcaaattcatcaatgggaagctttctcaattcgatgatgatcacgaagactgtgattgctggtgtagatgcaataacactatcatttcttggattttacatgctatttttgatgaatttgcagatagcataatgtaccatgacaatgcagctgaaatttggacaaagttacgtgagtgattcaatgagaagaatgctccatgaatctttgaggctaaagagactatgcagagtcttactcaaggatcgaatactgtgactacttattacactcaattgaaggctctatgggatcagatcagagagtatagaccaaaacctatttgtacatgtggtgctatgaatgtgatttaagaatatcaagaggaggatcaattattggaattcttggttggattgaatgattcttatagttttgtcagatctcagatcttgatgcgtgatcctctttcaagtgtgaacaaagaatatgccactgttgttcaagaagagagacaaagaggattcactaatggatacaatagttcatcagatttggacaaatcatcatcaagcaattctagacagtttgctagatctattcaacctttttgatcaaagtgaaattgtacacattgtggcatgaatggacacacaattgataggtgctataagctgaatggatatccccttggtcataagcttcatggaaggtttcctaatcgacagtgtaaaggacctccaaggaagtctgctggtgtgatttttttaggcatggatgaaggaaaaccagagaagatgccaatggagagatatcttatttctagtttttcaggtgttgaatgtcagaaactcatggcattacttgctcagaaaaccactgagactaacactcctaattcttctgatgaacaacctgtagtttctcatttttctggtaagaattcttttgttcatagtaccaattagatcattgatataggagccacacgtcatgtgtgtcctaatatttctttgttcaaaaacacctacattgattctaatctaaaaactgttcttttgcctaatggtttatacactaaaatatcttggctaagaataattgttttagttcctgatcttgttcttgaaaatattctttatgttccctctttcaaatacaatttgttatctgtcaattctttaacagctacaactaattgcactttcttgttctctcatgaaaattgtgtcatctgggacactttaaagaccgaggtgattgggatgggttggcaatttgtattacttaaattgtaatcagatcagtaattagaacttttcttctatttccacttctatttctcattcaagagtttcaaataaaacagtttggcactatagattaggtcatccttcttgtgtaaaaactcatcatttgaataaagctttaaagtttcatgctaattctaatttcctatttcattgttccatttatcattatgctaagcaaataaaattgccatgtaatctaattacaatattgttgaatttttttttgatctaattcatgttgacatttaggtactttatcacaattattgatgattgttctatgtgcacctggattaatcttattaaacaaaaatatgatgcaaaaattgctataccttagttcataaaattagtttaaaaccagttcaacaaaaccattaaaggagttaggttagataatgctaaggagttacaattcaaagacttattcagtgaacttaggattataaattactattattgtgtccaaagacctcaacataactctattgttgagagaaaataccaatatttactcaatgttgcttgagctttgttatttcaatcctatgtcccactggtgtattggagagattgtgttgctacaactgcctacctaattaacagaacacctacaccaaacctaaggaataagtcaccatttaatgttctctactctaaaccacatgcccatgaacacttaagaacttttggatgccttgcctatgcttccactttaagtcaatctagatctaagttttctcctaggcctgttccctttatttttcttggataccttgttggtatgaaagcctacaagttgcttgatttgaactctaacatgacattcaattctaaagatgtcttcttttatgaacacattttccttttgttcatactaagggtcttcctccttcctcctgcacatgaatcttttttctctaattttcctcatacatcagggtcccatgattctcatacagcagttacttcacaatctcatactgaacttgtcatgtctagttcttttgatatgattagtttcgatgtgtctaatactgtctctccacatactagattagggagacaagtttcaaagctctcatacctgaatgaatatcactgttatttagccactaatgacacttctatttcttctcaggtttcttttgtcactactcaccctttatctcaggttcttgggtaccacaagttgtctcttgccttcagagttactgtacttattatttcaagtcattttgaactagaattcttcagtcaagcccaaggcattcttgaatgggacaatgcaatggtcacagaaatagaggctcttaagaagaatcatacctggattattgtctccctacctgcagatcaacatgtaattggttcaaaatgggtctacaagatcaaactcaatgctgatgggagtgtagagaggttcaaggctaggttggttgccaagggttacaacgaacatgaggggattgattacacatatacttttgccctattgactaaattggttactattaagttggttttatctcttgcagcaatcaaaggttggcatctacaccaaccggatgtcaacaatgcctttctacatggtgatctccttgaagatgtgtatatgtctctacctcaagggtatagacctaaggggaagttgccaacaaatgcagtttgtaaattgcaaaaaacattgtatagcttgaagcaagcttcaaggcaatggtttgccaagttctcaagtgctttaactgatgaaggatttcatcatttagccacagaccattctttattcatcaaacattccaatgtaagtttcatttttctgttgttgtatgtggatgatgtaatcctagctagcaacaacttggttgagcttgaatctttaaaggtcagattgcatgctcgatttcagttgaaagatttaggaaaattgaagtatttcctaggtcttgaagtggcctgatcagagaaagggatctttgtttctcaaagaccctatgcattgcagttgttggaagaccttggttatctaggatgtaaacctatgaattcaccaatggaagctaatctcaagcgtggacaagatgagaaagagaagcttgttgatcaaatattgaacaaaaggattgttggaaaacttcagtacttaacaattacaagaccagatatctcctactcagttaacaaactgagccagttcttgtctacacctagagtcactcacctacatgcaactcaaagggtcctgcagtatgttaaaggtagtactggacatggggttttctttgatgtaaattcataagtaaggttacattcttacactgactttgactggtctgcttgtccagatacaaggagatctacaactggtttctgtatctttgttggaacatttatcatctcatggaaaattaagaaacaacactgtttcaagatcttctgcaaagacagaatacaaagcaatggctaacactacatgtgaagtgatttggcttctcttcattctaaaagaactgaaggttgagcatagctgccaacccagtgtttcacgaaagaaccaaacacatagatatagactgtcatttagtgagggaaaaggtgcatcaatgtgttgtctacacagttcatgtttctacaaaaaaaacaaattacagacattctaactaagtcactcttttctaaccaactcagtaccttcaaaaataatatgagattgaaagacatctacactccatcttaaggaggagtattaagatagttttgtattatttggttagttagaaaattagctagaatgttaattatgtatttgttagctatgcatagtgttagtgtgctgtttttgtatcagaatgattttattgaatataattcagtctttctctctctctctctctctcttttcttctttcgttgtctattgagtaatgagctcctttgagctattaaggacaactgtaaaaatatattttttttttgacaagagagctccagtaggagctaacacacagctggaactaaagcattccaacagcattcttcatcttaccacaatgccctttgcgccaggttgtgcgctctgcaattatgagatctcttgacatgccggaggtggacatcagggaaggcagataaagaacaacggatatcttcgactacatctgcaagagctgaaaaatcagctttcttgttaaggactttgtcaactagcaactttgagtccgtctctatcacagctaacggtatttgaatactgataacaccactctaagctagcacgcagagacaaagcctcagctattagtggcggcaagttcccagccacaggtgcggagaaaccagcgaccgtactaccttgacaatcgagaagcacggctccaagacccatcttactctgagtctgattattgctgcatctgtttgaagaagaaactggttttgtggaaccacctttggtgtcctgtctgaaacctgcaaattatgaactccactatatttgttcttcatagacatggctgcattgtaatctgaaatgtaagaatcaatccaagcaatagtgtcattagg

SEQ ID NO: 114556 - DNA, 2015 bp, Cannabis sativa
aataccagcagttggcttcttgggcttgaccctgggtgtctcttctaccagaagagtctcaagattcaagctgtcaggaagaatataatatctaatattgttgcccctcacgctaagatgatcaagggtaactggattctttcccttcaaagtaagtttcactgtcttcaaatgtgtattcatactgatatccactcctgtggccagccataattcaaacaattagaaaaaaggaaacatgcgaatccaacttaagactccagtaaagtcagtaagttccatgtaaaagtatacagtaatttactttaccctcggcgtataaattaggccactatcacatgaacattctacatgaaaacagaaacatgaaacaacaataaacatctattgtgtgaaaattcaacctatggaaattgcatatgtggtaatttaatcatagcaacactcataactaaagaatacatgccggaacttcaaaatgtcaaaaagagaaatgtgatttctcaggacaaatatgacagctattcctcgaggagagggttgttgtatattgtatgacattacaggagctacactacgatgtgaacccgttaactcttcacttaccttcaacccatattgaattacttcaatacgtctaaaagagttattgatccagacaacatgaaaaaaaaaaagtttttcaaaattgacataaagggctaaagcaagagtaagaactcaacctcagcaactttgcagagttgccgaatttcactagcttcactttgcagggtaccatgtaaatttttaactcaatatgataaagttcacaatagcatcgttaaaacaaacatacagatcacacatccctgaagattttcttagaaagggggaaaaacatctaaaaccctaaggaagacaaaccctctccgaaattgcaaatcatacaaatataccataaaaaccttgtcagacactgtctatggaatatattagtataaaaatacaaacaaaacacaaatgacactcacatatgcatatagcgaatacccatttctcaaagcttagcttcctttttctacacaacaatttggaagacaaaatgagtactcccagtataggtttcccattacagtgcaccagagaaatagtcaattatcgttcatataaaaggcgattcaacctaactgtggaaaaacaataataaattaggtggagcagaaagaaacctgtgatggtgccatgaacaacggtgccgtttttgagttcaatagacacagtctcgttgttcaacttcatcaagaatctgttcatttgtaaaattaatgtcaaatacaaattagcacagtacatagacgatagtattatttcagggagaaatgtataaaatcacttacctgacgagcttcatctttaaagctagggatagaactgaacaaccacaaccaaatcaatcagtataatcccaacaattctcaagaaaaaaaaatgagcgattaagtacgagatctgctgtagttaccttccgaaagcaggaaaatgaagaaataaaaccctaaaacacaatagtagggagaaacgaaaccaggactagcggcgagaacgatgagcggagtctcagacggcggagatggaaatggaggagaaacgaggagcggggaaagagaaagggtttatatagataggggttttgaaatgtaaacccgagttatgcatttgggcttcactagttcactgattttagaagagaacaccaaattctagggcaaaataatataacaaaaccacccttactaaaataaatagataagtaatgtagtaatttacggtataatacttaaatttaatttatgaagaaattaaacttaaatatttatgctgtaaattactttaattaataaaatatataatttttttataatatatatttataattttatattattattagcgatattagcgattaaaccacttgaactttacggtttgtaacacttaaccacaaaaattgaatttttggtggctaaactacc

SEQ ID NO: 114557 - DNA, 8619 bp, Cannabis sativa
  modified_base (37)..(63): a, c, t, g, unknown or other
ttaaatgttatttctgatctatatcaataagtaaatnnnnnnnnnnnnnnnnnnnnnnnnnnnagggcataaaacccaacacttatcccatgccatacttcctgatcatgtcatgttactttgccctttccacaaaaaacttctacatataccttcaatttcagtcactatattcttaggcagaactataatttagctccaataagtatgtattgttaaaagagttgaattgatcagaacaaatctaccagcaaaagatatatttctagagctacaacttttgatgtgagctgtcattttttcaacaagaattctacattcagcctttgaaattctcttggagcatataggaatgccaaggtatttaaaggaaatgttacttttacaaaaattagagatgccaatcaccttttaacttcttgttcatccataccagagcaatatatagcagatttactactacttggctgtattcctgaaatgcttgagaacaacttaagaccctgcaacattagaaaaatgtttttcgaatctcctttacagaatagaaggacatcatctgtaaaactaagatgattgagtttcaattaactgcatctttcatgaaaagagaaatcttgcctacaacctttttcataatcctgcttagatatttcatcccaagcataaacagaaatagagacatcagatcccctcgccttagtcctcattttacttcaaagaaaccatgttatgtgccattgaacattaatgagaaacttggagttgtgacacattgcatgatcaacttagtaaatcgggaagggaattgaaaagcctgtagaatttcctctaaaaatatccaatacatggtatcataagatttttgtaggtccaactttatcatacaattaggcttagttgatttccttccatagtgtcttatatgatattgttggcgaatcataatgttatgggctataaatctacccttgataaaactaccttgattctgtaccactaagtcaggtagaacatgtttaagcctattacaaatgagcttggtaacaactttataaagtacattacaacaagctataggtcgataatcacttacagttttggggcatttatttttggggagtaatcactgtagaatttatctctttaaacaattgacatgtatgcaggaaggatgtaacaactttaaaaacatcatatgccaccatatccgagttatcttggaaaaagaagctactgtatagtccaggagctttaattccagggatactaaaaatagcctgctttaccacgtccattgtaaaatatgctcccagtatttcttcatgttacttggtaatgacaactcattgagacacaatcttgacatttacagaaagactctccttcattttagtccctaaaagggattgataataagataaaaatgcagcagtaataccatcagggtcttctactttattaccattcccggccatcagtaatggattaaattatattttgaagtcttctttctatgatacaaaaatggaataaagcagaattttgatctccttctttgacccattttagcttagatttttgtatgtataaatgagcagtaagccttattaatatctacatagtgattcctggcctccaaaacaatttattcagtggatcaccttgcaaattatcttgacaactcttgagtctctctctagctctaaaatatgctacttgaatttttgagaagcctttttattcagatccttaaggacaagttttagtatcttgagtttcgataccacttgatacattttagttccactgatgtcctccttccatacttttaatatttcctaataatactaaggattcatagaccacatcctgaagtatttaaaaagttttttttcactcggaatattaggattaactcgtgtatggtcaaacaaatcttcattcaagaagatagcttcagaagttgggaacatatctaaccatgcttgattggcaagaattctatctagtttagaatagattctgtcatgagccttattgctccatgtataataatttccactgtattttatatcctccaaatgacagtagtcagtacagtctagaaaggcagtagaagtactatgccttactttgtcctccactctttcaacatatttagaattgcaataaaatcacctagtgcaatccagggatcatatgttgctaaatcttgtaagtctttccacaaaacttatcttccaacttcttcattatatatagccataaacaaaagtcacataaaatctatacttgttatttggagtaacaacatatagatgtataagctgacttagtatacttacttgaaactgtgatggattccaagcaacaataatcctaacacctttgtgccacacaatgtttgatgtgaaataccacctcatgaacatttgttggtataaagctccaggttttggagccttaacccttatcttgagcagaccaactaaactgactctttgattagcaatgaattaccttgcatctttctatttctgttggctgttgatcccttagacatttcaaattattatcttatccatttgattgaggaggtgcttcctccctcttgtgttttcctgatcagtcatcaaaacttcttgttccctctgtacaggcagaacaacttgatcctcttcacctgatgatggcattgataaagcttgaaatgaattcaaagtgataggacaaggcataggtgctttacgtttaaccttccatcccttgataattggatggaattcatttggccaaggtaccacatcttttgaccgatcttcttcaggctttctattcttttttaacaatccattcttattttctactctcattcatgcaacaatcctttgcttcatgccccattcatttggccaagggtttccatccgtaattgactactacagaaacatcaaagccaaattcatcttcaaaatagataatgtttgggaatttttgatgaatcgatccttcaatgagaacccttgggtagttaagtttatctctctctctctttataaaatcatctaccattaatggctctccaacttggccaatgatcttgaataaagacttttgaaccatatatttcaattccaaatcattcaattacacctaaattgggacagttcgaatgtcttccttcttaaaattgatgttgggaccccaagctttcattacaataagtcttttattgaagaaggtataacctcccttaagaactacatctctttcttcaacatagtgaaatcgaattgaaaatattccatatgtgaacataccaaccttgtcaaatttgtccttccataatcgtcttgcaaattcttctagaacagagagaggaggattggctcaaacatatatatagcacactaaagaggaatttcagtacgaaatctcctcttcaatatcctccatagtgatatatcttgcttttatcacctgagctctcaaaagatgttgccaggttcctaacaacatgtcaaatttgagaactggtggtgtcattggtaattcttttgctaaagacttcgagaaattcttatttacttctaagaagaaagaaaaatcagctcaaatatcttcctttctttgaactgatttcagaaaagcccttagagacagaagagcttgaaatacatcgtgcaattgtggttccagtggagaatgcttatcagcacctttatcaaattcctctcagaattccacaggtttaataccaagaacttcttctatgaattttgtttgtttcccatcagtagttgaattagggtctcgtttcttcttcttcgtagtgactttcagtgtttcctgtaccttcgcttgtgttttcgccatagcactagcttacaagagctataagagagaggagagagaaaactaaaaatttaaattttatagagataaaattaaatatataagaataaatatgaaagtatataaagagaaaaatgaaaaatataaatttacagaacaaaatataaatatgtggtgataaaattaaaaaaaaaattaaatttataaaggtaaaaatgtaaatatatatataaaaatcatacaaagtaatgaattatattaaaagttgagtggggatcaaaatattaattaatgaaagatacttatataatatgcaaagttcaaaactcaaaagcggcatgaagcataacacgtttaactcgctagctacttctcaataattcgttgttgatatatcaaactttacaaattaattcaatttacctatttatgccatttttcttcatcataatttacgaattatgaattttgggattatgataaagtaaattaatacaatgatcagtttacatctatacataatagtaatgctcataataagttcgtgaaaaaattcttgtcagaaatttaattatagatatagtttgaccaggttataagtatatcttttatacaatatcattacccatacatataaacataggaaataacaatatataatacatattatatatctaaagaaaaaacagataagatatatatgaaacactataacgacattttctatatttgactttgctaaactgaagttaaattataaaaacagaaagctatttatgtcaatacgccattttgcatgtcaacataatgtcatcatctttttcaagctattgtataaaaatattttaattatggaaataaatagtatattattatatattgtcttttcgtctccttacttctcctcacgaatatgatcaatatatataaatatatataatacattagcagtaatatcaatgattcattacctcatgaatctattatatctcattttctaattatataataattaaatataaacatatataataatatatgtatataaaatatatattttttttcgtaatatataaatatatataaggtgattatgtatgtagtatctatatttgaagaacaaatccacccaaaataatccaaatatattaaaacaatagaaagagttagataggttgacatcggctacaaatccaccatatatatatatatatatatatatctagttatacattatataatatagaagagtaattataataacttcagagatatctaaaaatatatttcaaaactaaaaacaaagcagaaaacaaaatcatcttagagaaaagaaattgcatagtaacaccaaaataataagacaatgtctcctcatcaaaaagctaattctacgttttagattgatttagacaaatgcgtaacatttttcactacaacccatttaatttacttacttttctattgttaaggattatgtgtgtagtgagattatcttatattatttaatacaatattatatttaatatttacttattttagtagtttgtgtaaaattatattatatactatactcttcaactccaactctgactcctctagtgatttgggtcgagaattggattcaagttttggagtctaaagttggatcgagtctggatcataatccgagatttgggaccaggaccaaaactaagtttgagtcagagtcctcaatcccagaccttttataaatattataatataaactaatacgaattatttgttatttattatataatacgatttatattatattaaaatttatagtcttaataattaataatctaaacatattattacttattttttaatgtacaatacgacacttaattaacagtgcacctaacaagctctatgttatattttacagaatatgcacacatcttattttcttgcagaatatgcacaatgacctcaaccacagccatagtgattttgtgtttctactctttttttatacaacttttaaagattaggagtaagatctactccaaatgaagtaaaattcttcataatctgtatattgaataacattcattataattctaatatttaaacaagacaactagacttgcagttcaaaatctaactaaaaaaaacttgtaattcaaaataaaaaagtatatacatatatatatataatatataatttccaattcacaagctgcgattagactgtttgaactaggcttatataaaatttcaaataaattagcttctgaattgattttttttttctttgtttaaaaaatgctctcaaattttaaaacaaattgtaattttttttccttcggttatatttcgctcatttttgcaaatatttatctgatataagattgatccattgttaacttatggtaaaaaaaatgtatgctaaaacaaatttgcatagatttattgtctaattatgcaataaatttgagattgtatacatatttatttataattttagagttaatatttgaatgtttaaaattattatatatacttggttaactagcttaaagttgttaattaataccctcatactgtaataataattgtttgtactttgtgggttacatcgtcaataaattgtctccaaaaatatgcaaaacacaaccaaaataacaaatttacaattattttcaaaattcgaaagacaaataaataaataaaataatttaagggacacaattgtataagtgtcaaagttggagacaaaaaatccaattttttcttaaataatctgcatgtacgtactagtaatttttttcttttccgaaaactatcttttcacaatataactgggttgaaaccaacaagcttaaaattacatgcttcaatttttatttctaatttttgcttaaagtttttgttaaatatattttgtcatgtcataatatgtttctatttaattacgttgactttaaaagattaggcaataatcatattctttgcacgtaagtatgtacaagtttataattccaatcaaacttgattagaatttagaacacatctctttccaaaggtcatactcaatttcctatatatataacaataaacacatctttttttcccattgtcccacgaattaaaccaaacccttaaatttagttctttgtttctaactcttttacacaatttctacaactatatatttctttttcaacatgtactattttcatcatgagaaaatatctcttttgattgtattttttgttttccccactctagtttttggggattgtacttgtgattatgaagccatagaaggccaaaatagggaagccctcaaattcaaaattggtgcaattgtttccattcttttagctggagcttttggagtaagccttcctatattgggaaacaaagtccctgccctaaggcccgaaaatgacatcttcttcatgatcaaggcatttgcagctggtgttatccttgcaaccggtttcattcacatactgcccgatgctttcgatgacttgtcctcgccttgcctccccgaaaatccttggggaaattttccctttgtagggttcaccgcgatgctgtcagcgataggaaccctaatgattgactctttcgcgacggggtattataagaggcagtctagcggcctagataaacaagtgggattggatgaagaaaccgccgaggggcatacagatggtcacgtacatgttcattcacatggtcattctcatggctcaagctctttacaacaatctagtacttcatctgagttaatccgacatcgtattgtggcacaagtaaggttcattataattatatttatatatatagttaagtgtagattatatattaatatttttggttggttgtttgtatatatttaggtactggagttgggtattgttgttcactcagttataattggcataacattgggtgcttctcaaagccctgaaacaataaaacccctaatagctgccttgtctttccatcaattttttgagggaatgggacttgggggttgcatagttcaggtaataatatataatatatatttcatatgtatatatatatatatacacattcaaatatacattttaacttaaagatctagctagctatatttaaatattgactaaatcatatatatggaaaaaaacgagtaagttcaatctctcaaataatgaaatcttattagagaacgattaattaaaggatgatgacattttgattatatagatatacaaaattgtcttcaaaattttgtcatagtgtcgacatcttttcagttataggaataatattatatatatatatatatatatatatataattcagtaggtgatgtatatatatatgatataataactagttggatatatcgtacgaatataagtgtgaaactatacctagcaattaagttaactatatatatagctagctactatatatatgtttatatacgatcaggacaagaaagttttatgcaatatatattttgtatttttctgttaagaagcttcgcatgtaaaaactaaatcaattattaatggagtgacacatgatttgttattattttttttaaaaaaaaataagcgtaatcgtaccattaataaacaaagttagacctcgcggtcattacataataagttttccggaaccgaaaaaaccggaataatcccatacaacttgtgaataaaagcccaattagccacattatgggctgcaaaattacaagttatacacaaaattacagcaaataaa

SEQ ID NO: 114558 - DNA, 1109 bp, Cannabis sativa
  modified_base (411)..(414): a, c, t, g, unknown or other
  modified_base (1065)..(1066): a, c, t, g, unknown or other
atttggaaaatataagtttctatatttaattttattatctgacataaaatcgctctgtcgcgattattataatatttttctaagtataataataaaaaataatatcaatataataaataaaaaattgaaaactttattctaatatataataatatttaaattgcttattgataataatatttttatttattaaaattatttttttcatcaaatctattcattatattataaattattatcacgaagaaagttagcttgtttctttattaataaatttaaaatatgaacaattaattaatgtatataaaattttaaattgccttgataaaagaatgttaatataaaaacataataaatattgtggtataaaaaaaaaaagaaaaattatctcatatactattttttaatttnnnnttttaaatttacggtttggattgctccggtggtttctatgtgagttgttatacgaattttagttgcgatttaggttgctccgttagttgttatagaagtttctgtgtagaatcccgtaaaaatatttaaaaagttgttttgaagtgtaaaaataaaaaagaatccttaaaaaaattagagtgttattattattatttaagttaatacttttttctgtaatgcattatctttatattataataatttgaaggcattattttcattgtatctcacccgccgttatcaccgtctttcacttgtattcatcagctactattctccccaataagtatttatacacaatctaaattattcaattgtaaaaaatgttaaaaaaaattgagaaatctacataaaattttatatacaatgtccaatctgaaaattaattgaagatacaatatataatatttgtaatcataattgtacttatgatttaatttattttaatttttagaaatgactaatggtatttacttatgagattaggaaatgagaataaataatgtgattcttagatgagcttgttgatgttgctactattatattgaaatattttagagtagttcgttcaattcgaagattaggtaacttattgttgggttttatgcnntaaataaaactctttacaatttgattagttatcaatataagaa

SEQ ID NO: 114559 - DNA, 4107 bp, Cannabis sativa
atagttgttgtgactcaatattatttcaaagtcaaaactgctgcctttttaccactccgactatccattaacaaatcacaattcaaccaacatattaattgtattcaaccaacataccaaaaatactatttaatattacatcaatttaatttattaccatcagaagtatatttattttaattaatacgctaccttaataaataaaaaaagaagaatatatatattatttactgaacacttcatatacctctatatattttgacttttggtgagtttcacacttcatagctcccattttttttaggtatgagttagcttgcaatttggtaagtctcggtagcctatctgcaataaccaccaaaaaacctttctaaaaaagtagcacaaaactgttggttgtttatatatttttttatttaattttcttttcttctataagaatgggcataataagatataaaacccaacaaatctcttgtaaccacttaatacattatttagctacgtaccattcttaaatatactatttgttataatagattaaaataacattaaattgaggataaatacacagataatatgtacatataatatacatataattactcaattcaatcacacccttgttaacctctccaatttttccctctaattaatgtctcgaatcgtggccgataatagtatatcgccggcgagagacgcctatttcaccatggaactcaacaacagccaccacaaccgaggtggctccactgaatcaccgaccttgggccagcttctcaagcgagtcggagatgtacggaaggaagccaccggcgatggtggtgagactccagttcaccaggtgcttgagctaggtgatgttagtatggaacctcgttcgttgccgttcgtacttaacttcaataatctcacttactgtgttaaggttccaagaaagttgagcttttcctctgtcttctctcgtcggagggatcttctaggggcgccggctgattctgttgctggggatactctgttcacgaaaaccaagactcttctcaataatatctcgggtgaagctcgtgacggcgagatactcgcagttctcggcgctagtggctccggtaaatcaactctgatcgatgccttagctaatcgaatagccaaaggaagcttgaaagggacagttacgttaaacagagagattttggagtctcgtctcctgaaagtgatttcagcttacgtgatgcaagatgatctccttttcccgatgttgacagtggaagaaactctcatgttcgccgccgagtttcgtctcccacgaacactctccaaatcaaagaagaagatgcgtgttcaggccttgatcgatcaattaggtctcagaaatgcagccaagacagtaattggagacgaaggtcaccgtggagtctccggcggtgaacgccgtcgtgtatctatcggaattgacataattcacgacccaatcctcctcttcctcgacgaaccaacctctggtcttgattccaccagtgcttacatggttgttaaggtcctccaacgaatcgcccaaagcggaagcctagtcatcatgtctgtacaccagccgagttacagaatcctcggcctcctcgaccgtttgatcttcctctccagaggccaaacagtctacagcggttccccaacaaaccttcccggttacttcgccgagttcggaaaccccattccggaaaatgaaaatcggacagagttcgctctagacctaatccgcgaactcgagggatcaccaggaggaaccaaagccttagtcgagttcaacaagtcatgggaatcaaagaaaaacttaatccgtacatccgatccggccgtaacagacgacaaattacaaccgctatctttaaaagaagccataagcgcgagcatttcaagggggaaattggtatcaggagcaacaacaaacagtgtcactgtagacccaagctcgaactcaatggtcccaaccttcgcaaacccggtgtggactgagatggcagtattatcaaggcggtcgattatgaactcgcggcgaatgccagaacttttcgggatccgtttaggtgcagttatggtaaccggattcatactcgccaccatgttctggcagctcgacaattcccctaaaggtatccaagaacgtttaggcttcttcgccttcgccatgtccaccacattttacacgtgcgccgatgctttacccgtctttctccaagaacgttacatcttcatgagagaaacagcctataacgcctaccgtagatcatcctacgtcctctcacactcgatcgtagccctcccgagcttagttttcctctccttagctttctcggcaaccaccttttgggccgtgggccttgacggtgggcttgcgggcttcttcttttacttttttataatcttggcttccttttgggccggaagctctttcgtcaccttcctttctggtgtggttcctcacgtgatgttaggctacaccattgtcgtagccatcttagcttacttcctcctcttcagtggcttcttcataaaccgagaccgaatcccaccctactggatttggttccattatctctctttggttaaatatccttacgaagcagttttgcaaaacgagtttgaggatcctgtcaagtgtttcgttagaggagtccagatttttgataatagcccactgggaaaggtcccggacgccatgaaagtgaaattgttggatagtttgagtcagactcttgggatgaggataacacaatcaacatgtttgaccactggggttgacattttggatcagcaaggggttactgatctgagtaagtggagttgcttgtgggtgactgtagcatggggtttcttattcaggattttgttttacttttcgttgctgatcggaagcaagaataagagaaggtaaacaatccatggaggaggacgataaagattgaagtggcctgttttggcgcgggagtttattatttgtattttattttttattttgtttttctcatataaataatactttaattaaaattctacttattaatttacaaaatatttgtgtagtgatgccttgatcatcatcatcatcatggggttgagtttgctacatctccagatgtaaaactgtttcatatcaaattgtttttcgtttttactcaaaaattaagacaattttaatattctatatttataattgattacctgtatatgtatatagttttatacaattattacccatttgagtgctattatattacaacaaatgtctcttcttctttatttattaaggtagcctactaattaaataaaataaatatacttctgagggtcatttaaattgatgacctagtcttgtgagaaataactttttcacactctcaagagcgaaatctatttaaaggatcaatccttctcaaggaaggatcatcttgcatttgatatcttctacattctacattctacatcctacactatatgcatttcatttactctaactcttattttctcaacattctagttttgcttcaatcttcggccttccgacaaagatcgtagctaagtcattctattttatttctagtatatatctacatgttacaaactactgatttgactatcagagtccttttacctggcaccatcccggtatcccaaagattttacagtctacttcgcttttattgtatgcagtaggggtgttcatcgaaccgcccagaccgcacaaaccgcttgcaccacaccacaccgcacaaaccgcttgcaccacaccacatcgtacaaaaaatgcagttcaaaattctttgtggtgcggttgcagtttgtatttttatcaaattacgtggtgcggtacaaattgcgattttaaatttaataatcgtggttcaaaccacattatatattacaaaaactactaatttttacactataatttttctttttatatatgaacaactcgtgtacttaccaagcctaagtcatacattaaaacttaaggaacatcatataaattattcacattttttatttttttttgttaacatattattattgatatatataatataactaggggcaaatgacatgcaaggcatgtga

SEQ ID NO: 114560 - DNA, 2284 bp, Cannabis sativa
  modified_base (69)..(74): a, c, t, g, unknown or other
atgtgtttatttattattgttttagaagttcatatttaggttgttaatcagcatacttgtgagtagatnnnnnntcctggtaaaataattctaacaggccaatggtatgaaataatagattgaaaataagaacttacttggagagaaaagggcaaacaggatacctctggaaggagtaactcaagagtagtggagtgatacattccttgatggagcaaagattaagaacatgtacgtaacgaagttattaattttagaaatactttacgttatagtcaataataaataattaattgcaacacaaatattatgttaattttaggcaaagtcagcaaaaaacaaacaaagtttaggtatgacgaaaattcaaggtggatggggatcaaagactattgtagcacatgttgttgataaggtaagtttttatatttatttgtggttaagtattattttcttggaaaacataaatatctcacttatttctacataaatataggataatcctgaagtccaactgctgcggacatttttcgaaattccaccataaaaacaacacttggggcaatgaatatgcgcaataagcttatgtaaggttacaatgatagttatttatttctgaatatttctttcaatttattttttattcaaattgattgtttcatttatttattttttctataggagaaaatagttgaactcgctaaaaatcaaccagcgcccactcctgatcttcctcctcaggatgatttagaccccacctagtacctagtagaccttcctattatgacacaaatactgggtgagcaatctcaaattttgagaggctttggcaatctcttaagattgaaggcagttggggctaaaagtgtaatgatcgtatacttagattatgggattagtaagacagttgcactgactaattatattataacattatatgtgattagcttataatgtgggccttattttcaaaaaataggcattagagttataatttcctaattctggagtttttattaaattctaggtgtgttatatgtgatatataaggaaattgttatttttatgctttttgctcgataatgatagaaatgcgatagtttgaccattagagtcagatgagtttggcttagaatcttttagttagcggggcaagtatattttatatttggaatattatgattaggcggagttgtagtatttgaccattttactcctaagacttaagataacttaaactggatggaaggagcaaaatggaaattttgtcttaaactaggttttttcttctagtgggattagtagtaaatccaaagagtttatagctgagtaattatcttaaaaaaaataagataatactaagcttttattcattttcatcaattaagaaaaaatcaaagtttatcctttgctctctcttccctatttgagcctaagagacaagaagaactaagagttttttcttcatttctcattgaattcattaaattttggaggggaaattgatagcaaaacttgaggtaagccctagaatcagttttccttgagtttcaaaagttttaaattggtttgagcatgtaatctatgaaattaggtttttctccaaaccctataagtttatgggttattttatgaggttatatagagtggttgatgccttttagaaaggttttgttggttgttttgaggtgttgagcaagtttgagtttaagaacttaaacttggctcaacaatggtgattttaatatttctgagttatagctgttgttgtttcttaatttatgttttttggactcaaattaggtgttttggagagtttcatgaaatttaggttagtttagagttgaaatgagatgtttggaaattctacagcagaaaatggcagaccgttttctcaaaaatagtctactgtttttgctggcaatgacctagaaaaatggtctgccattttttagggagtttctcttaagtcttatttttggtgttttctcaatatttagggttttaccatgctattatcgatagagaaacttctatttttgaatttaagtttcgatagtatttagagtaacacttacctattttacataaatgtgacatagggcctccgttcaacaagcaaaatttccattcaggttgactgacacacttaaatttgaaaacgaggtaagattattataagatatatatatgtatgtatgtgtatgtatgtattatacatgctgttagaatttgaggaataagatgaatgaggttccatcccaaaaccaattggcaatgggag

SEQ ID NO: 114561 - DNA, 7299 bp, Cannabis sativa
  modified_base (6771)..(6772): a, c, t, g, unknown or other
tctctctctctctctctcttgtgagattagtcaactttggttctcacattgtaatattaagagagccacttcagatcccagcactattgtgatcaaagtggtattatctctagtattaatacagccaaaaggggagtaggtcattacccgctaactcagggacttaacctctataaaatctagtgtatgctttactttattattcttattgtgtaacacgtggcaagcatcagtattaaatgcgaatccactgtcgggtagccaaatttgaggtcaacatttagtgaaaattcttaaatagtacacaatctatttttgaattctaattgacttattaaatcagttaattgagtctacaaggtaatattatctcaaataatatggagaccatgggcctatgtaaccaagcacccaataagtagatctgaaatttaccaagtaaatttcttaacttattacttctgactccattatagatacaaaatatcactcttgattgcatagaatgctcaatatagaaaatataaatacgctataattatccattgtttcattctaaataataaatgatcctctataaacaattcacattgaatatggacaaaattatcattttacccttcaatgtattttatccttaaaatacttagctctttgtaaatgatattttattaatttattataactacataaatgagtattccaccatttaactcgtttgcccaagctttaagaaaactatcatttcactactaatattcatagaagttatagattctatttatatgattaacgctctcactcaattgcactatcaagctcccaacatgtaagtatgggctagtcctatgggtaagctagtaaagaacaagtctaagaacttgtgagcacaattaagttaaaacatagtcatatcaggattgagatcaattgacctaagatcatacaacggtaagtttataatatcttttctactgttaatattagtcaagtacaatgtacagccaatacatttgatacaaatttactttattaatgccatagaaaagacatctactattacaattgtaagtaaaatacattattttttattacatcagtgtaaatctagtgcactgataatacatgggactaaaatatttgaatcatattatcatgattatttttcactgtgtagacaacactataatcatgaatattagtatgatcagaatttaatagaatttatatatcaaacatatgatcttgaaagttaaatgtgaaccaaataatatacaaaatagtaataaaattatttctgaacttttattgattaattaagggatcccattaattaattaagattacattgaaattgaattttatttaggacataaaatctcattaaactctcacttgcactaacataaaataattagtacatttcaactaatcctaaattcttgatacgcttctcgaacgcagtctccatcaatgtcttggtgaatggatcagcaaggttgtctttagtgtcaaccttctccaccagcacgtttcctcttgccacataatcctaaatgatgtggtattttgttctctataagttttctcctcttatggcttctagactttttactgttggacattgcaccagtattgtcacaaagtaacactagtggtttttcgtatttagaacaatgccaagctctataaagaaatccctcagccagactgattcctcaatagcctcagtagaagctagtattcggcctccatggtaaagtcagagatagtagattgtttaacgcttctttataccactgctccactcccgagagtgaacaccatcctatatttagatttcttatcgtcaagacaaacctaaaaatctgagtcagtatagcctataggatccaaagcaccacctttatagactaacacatagttcttgattcttttcaagtacttcataatgtgtttaactgtcgtccaatgttcctttcctgggttggactatgttagggtttatgccttaaaagcaagtatttaatggataatatattaaagaatatatgaaatacaaatatattataaataaatatattaatcatagaaatatatatttaataaatatcaaaaaagttcatattcatatagagaaggtatgctcttgtaaggaagtacacaagagaattagatcatacaatatgaataaaatacgtaagtagtgtattaaattatggatctttaatatggaattaccaagtacgatttactaagcactatactttagtggcatgggatttttattcaaataacatatgtggatagccatttagtaaaggtactatgtatatttgattatccatgactagaccgatatgaataaaacatcttttatcaacgtgttgtttatcaaaaaagagttattcatataacaataataattattagtctatcagtctaaattctgaatattcatgaactcttatttgtattcattaagttctttgattcacacattaaagtttttcggagaagatgattcttacaacttttattttaagacttaataacatgaatgactgggaacatgctgtataataagtggaatccaaatttccaaaaagatcgaatattagtttccttaacatcttaattcttggagtgattacaattgggcccaaatctatgattggaactgtaattaatggtatttaaagaattccatgatatgaatttaaaaagtgatataaattacattgtaatgtagtaaatttttgttgttgacttcctaaaaaagatattattggtgcagcccttaagactatatttggacaaaaaattgctaaaaagcaccgtagtgtctagcaccctcctaaatgtcataaagctattggtgtaattaaatattgggtctcatataatttaagaaaataacttttaatgaatattgctaactaatcataatacgtcacctatagatggtgttggacactactgaggccaatagcttttggatcattatagacctgttcacttgcaggtaaaagccacttaatatatagcgaacagcttattctaactaattctgtacgtatggattcatttctttcatctcacaataaggacaggtgcccttctcttgtatctacattcttatatacacagtcactacactgtacagattagaccaagtaatatacagcagagtcactccttccctacataacaactttcagaaccaaacaaaataaacatgatctttactattctcattctcgttcctatccattttcattccattcaatcaaaagtcaattttcatttatgaacaattatcgaacaactggtcaatgttaaagcctgatcaattaacaataaaaacatgaatatatgctgactgagaaccctttcaataacaaaacatggcaagtttgagcactgcaagcaaatatctcaagattgctaaacttctggttcattagtttttacatgttctgcaacagatataacattccatgtcacatcagcatgagtttcttatttgttgtacaatggttttttgtcaatgttgaacattgaagttgcctttcaagaaaagcatcgaagttgtcacttgtagcatatgctctagaaaactaatcaaattaactaccaaaatctaggaacttggtaatgttgacatccaaagaaaggaaacagacgttgaaaaattacaacaaaggtaccactcgaatctgaagatttgtaaatagtttaaataaataagtatgctttaaaatttaacaaaattcaagcacttacagatgcttgtttcttccctttcttgctcccactaccttctttgcctcctccctttatcattctggaaagaatatctgcttgctttgtgttgccctcctcattaaggttcttaaccaaatcttcacagctactccaactagaaactcctcctttctccattattttgcatagtattgaatatgcattaagtgtctttcctgctgctaaaagagaatctaaaactttatcataacttgaaaaatctacagaatagtccctttcaaggcaaaagtccagcaacttgatagcggcaattgtcttccctttctcacaaagaatagatagaagactgtcaaagtctggctcacagccactatgcataagtaaatcaatccgacccaatgcttcctcaacatgacctctcatgaggagggcttccaaaaccttagcaaccaagtccatgttctctttcacacccttctcaaccatactcttcattaccctactagcagtttgaactctcccatcttcaaatagactctccattactgatctgaataatgatgactctggaagatgcccactttcaatcatgttatccaaagctgttttagcatcagctggttcacctttactcaagtagctcttaatcagcaatctgaaagaatctgcatcactagcaacccctcttctactcataattttcaaaatttcaaaagcagaatcagggttcccttccttggagtggccgtgaattaaattattgaaagcaacagaatccttgacacctgttttcatcaactgcctgaaaaagttttcagctttcccagtctgcccatggttgcatagatactgaatcattggattataagcactagcttctatcactgcagtgctctgtggccttaatataatttctttctcaacaagcttctctaacaacttaactgcccgatcatacacctgcgccttacagaagttttcaattaggatgccataatgaccagactctgtcgggatgctcagccggatcattgccttgagtacatctgcagctgcatctaaatctccagccttgcactggcttgataacaatctcataaagatggagttatccttaggagcaataaacttgtccaccatctccctcaacattgtctgagcttcagacattttctctgcatcacaaagccccggcaataaagttgtgtatgtaacagcattgggcttaataccaaaagacttcatctcctcaaacaatctcagtccatcatcaactctaccaacagagacatacccttttatcatggtagtataacttataaccgtgggagctatgtttcttcctttcatctctgtaaacaaattttctgcctcatccaatagtttgaaccgattatacccgtggatcattgtgttataagtaacaacatctggtgatatacccctattcttcatgtcttcataaaaccgtttagcagtctccaatctcaatgaaagaaagaaaccccaaatcatgatattataagtatgtttagtaggctctattccctcactcaacattgcattaaagtaccttttcgccatcatatatcgtcctctcctcagaataaccttaaacaaagcatcataagacttaatgctcctctcaatacccaactccttcatcttattgaaaattttcacagattcttgaacaatcccagctttaccataaccatcaataagcaaaacaaaaaggtcttcatcccactctacacccttattgggcatgtccaagagtatgcaccgggcatgattaagcttcgaagctcgggttagaatctcaataatcttagaatgggtctcacggtcgtgatcaaacaaaccggcacgctcgacccacctgaagaactgaagcgcgtgctccgagttccgggcaccatgcaacacattccaaacgagggtgggatcgaattgaggaaccaaagaccgaatcgagttttgtaaacgagtagtccattcccggttagccatcattctacatataatatcctctaacttttctgggtttcgacgcttacctcgtggggttctctgattcacgacggtttccgaaccaattggtgatgatgagatttcgggtccagttggagcttctgaagaagtggggtcggcatttgggtctgatactttatcgacgacgcctgtggccgaatcttggttcgagctgaagaggcggaggagacagatcggagaagggtctgatatcctgataagattagggaagagcctcggtcgccattggcagcgcttagataagacgaacgccattggtgttcaggtatggaatcaaagagagttggggagaactgtgaatcggggtttaagagcagtccgctgctctgttgttagggtttaaagttcatttcttttaggagaaaataaaataactcaaaatataaaatttctattttgccccatttttttttaagttgtgtttggttagaatgcttgaatgctttataaaatacttgatgacataaatttatttttgatattttttttttttaacaaaatcggtatctctattaactaatcaaatcgttaataacaatagaacgtacttcagaggaacaatccttcaattgaagcacgcgacctcgagagaaacaagagtctctggctaagcagtgcgagctagggctgagcatcagtcagtttttttctattataaagatccaaaattcggttttcggtctggattggtgcaatccgaaaaccgaccgaccaatccagaacctatcttaaaatcggccattttgaacctcggtttggtcggtttaaaatgcccaaaccgaactttttaaaaaaaaaaataatccaatttattctataaatacattattttacattttacaaccacaaacatataaattaattgttcaaaaactaattattttattcttttaatattaatattaaaaaatatatatattagatgcaaaaaaaaacttaataaattannatatatatatatgtataacggccggtttcggttttttcagtcgatttattaccaaaaaagaaaaacaatcgttcaatggcagttttaaccgttagcggttttttcgattttcggtttcgtcggtttcaattccaacggtgttcggtaggtcggtttgaacggttttttcggttttctggattttatgctcacccctagtgcgagcttgtttgcagatcgtttgacaaaacacaattcaacattgtctaaagataaaagcaatgcacgaacatcatgcactaaaagaccaaaagaagatgacatagagcttttactacgaatagcttgtatgcataccaagctgtctgattccaaaattacttgtccctaattgtactgatcaatccaacttaaagcttctttgatgccaaccatctcatcaacttaaggttgaaccctccccaaatgacctcgattgaaagcctccacgacattgccatggcagtcgcgagccacacaaccccacccaaacctgccttcatgctcaa

SEQ ID NO: 114562 - DNA, 2894 bp, Cannabis sativa
  modified_base (1995)..(1996): a, c, t, g, unknown or other
  modified_base (2847)..(2847): a, c, t, g, unknown or other
ttaccagcgcagtagcgaactgtgctggtaaaagtgacatttcttgtagtgcctgtaggagttgcccttttggcctcgccttaagtctaggaaaaagtgcccatgcctctcaagtggtgtgatcgctcaccaagaacgcgtgtgataatagacatgtcgatctacaagaaactaggtgaggactacatcgtattgatgagggaaattgctccatgcagattgagttttgtattttccaatcatttgggcctacaaaaaatattaataaattgttagagttgaatagaaattaaatataaacaataggattaaagataaataattacttacatgcagttattgtgtgtattcatcacgctatttgctgttcttgtggtgaaacttttaaaagtgtccacagcaataggaagttctcacgtctcaggattagcctatttttttatatatttataaattagtattatactattcagaacttatcaatttttagtcaataatatttataatattatacccctcagacaataatcttagaccccatctacttttaatcttcatcttgcttcgattttttgtattctgttcggatattctctataatttagttcggctcttctctgtaatttaaaaataaatttatttttaactaaacgcgcaaaaaaaaagcataagttaatggaaatttaattttaaaaattttaatttttacttattattttgggtctttccagtaggcgacgacctcttcccacacctcctatgtgacctcttgtggacgtgatctcctagttgtctctgcctctcacagttcaataatattcttcttttatacttttttttgtgtctgatctctagtcacataactttttttactattgctaacaaaccgtagtccatgaatttaggattctcaagtgtgaactcgaatttagtctaaaaagataaacattaaggcatatatattttttattttttgtaaaatagttttgtttgaagtattgcagtaaaaattaaaattgacaggttttttttttttcattttaaagtttttaatttgttaaaattttacaattagtaatcaattcaaatttaaattaattaaggtaaaatataattatatgacaaattaaattatatttcttatttctaattaatttttaaaatctgataattaataaaatattattttttgttaacataagagttaccaatttatgttaattttaattaatataacttattttttttcttattttatatctactaaaatttcagcagcataatgatttaaattagatattttccaattttttaaacctacaaataatatatataacaatctttggataaatatctgagatattcaaactcttctaatatgtattttcattttttaacattaaagtaatatattataaaatcatactaaccttcaaatacaatgagtagccataatcaattggcaaaatgggtaaagcgacaccaacgacacctaaaacttatttataaaaaaatatatgaaaattaaaaaaataataaatacaattctatacattacttatatacatatgcatatacataaatatatatagtatacatatacatacacataactatatatatacaataatatacacacatacactaaaatatatataacaaaaaaattattatacatggaaaaaaattaatacatacatatatatatgacagtcagtagtctcgtgatatgtaagaggaaagatcggttaagctgtgcaatctcacactacctaggaaggtcaagtttgatgattctaaaactgtgtagatatgagactgcacagttaaaaaaggcttaaatagaataattggtactacctatatcaataatgtacatcttgttttctggtagcccatcacaaaaaaattccacagttaagcgtgcttgacctggggtaattttaagatgggtgacctcttgggaataactccggaagcgtgcgagtgaggacnnagcacgctggaaacactcggttggtttgtagggccagtcgttagtctaggaagcagctatagttacgtacttgtgtataagagtcattattccgtgggtgtaagaacctaatagaggcttgatgcggggacgtttcaattggtatcaagccttgacccagccgaaagtgtgttcgacgaggacgtcggaccctgtaatggggtgattatgacagtaagtagtcccgtgatccgtaaggagaaagatcgggtaagctgtgcaatcccacactgcatggagaaggtcaagtgtgatgattttgagactgtgtaggtatgggacgggacagttgaagatgacttaaatggattgattggtactacatatatcaacaaggtgcatcttattttttggtagcccatcacgaaagaactccaaaattaagtgtgcttgacctgagtaatttcaggatgggtgacctcctgagaagttctcccaggaagtatgatagtgaggataaagcacactagaaacacacgtattggttggagggtcagtcgtcaatctaagaagtagccagagtgacgttctcatgtataagaactatcattccatgggtgtaaaaacctaatagagacttgaagcggggacgttctaatatatatacaaattaatatactctctcacacacatatatatatattttatatatacacatacatactcacacacacatatatatacacatacaaatacatatacacatagatatatttttatataaaaaggaaataacaaaatttattttaggggaagaataggggtggtggcggcggttaggggtgttcgcggtgcgggtggggcagtttttnactattttttcaaactaatccgcacatgcgattttttcaatttctca

SEQ ID NO: 114563 - DNA, 1097 bp, Cannabis sativa
tctctctctctctctctccagaatttgaagattttgatacttaaacacttgttataattaccatctcatgagaaataaaactcaaagtacacgtagccccattactatcgcgatatagaggtttaactactttaaattgttatgtctctcattaattactatactactttttttattctttccaatctagcaagcaggtgaggcttagaaatccagcccaaattttgagtcaacaaatatttaatttagataaacaatttgtcaacttattttatattcttaatgttttcattactaatcattaaaccatacaataattttttaattaaaagttacaaattgtgattaaacataataaatcactaattaatatttttaataattctgaattatcaaataataattaaacttcaaattataagttacttcagttttataaatgttaaattttagctgaattatttggtaaaatattttttatttttattttttatttttttatatatttttgttaactaattaatttcaaaattattagtttttcgctaaaataaaaattaccactttgtgttaaaaaaattaatttaacatttttctaatttatattatttctacaaaaaagttttatagcacaatagcataaaatttatcaattttaaatttttaaaacatgcagataacataaacaaacatcccaaaatagtatatacagaaaaatagtaatttactgatccgaccatagtatatttaatcacaaaacctattttactagatatgaaattttaagatattcacacttctcgataacatacataaaaatattaattaattacataaactatgcttttctattacatctaaaatggaaaaaagtatttacctttgaaatacgaaaacaacgcaaattctctggcaagcaacggtagtccgatccgataaaacagggactaattttataaaaaataaaatcaaattaaaaaattaactcagacatatatctatatacatatacatatatatacatatgtatatacatatatattgttggaaatattttaccaagatctagagtttaaggaaaccttacattggttgca

SEQ ID NO: 114564 - DNA, 1351 bp, Cannabis sativa
tgctgatgtgtttgaccaaaaaaatgcagattggattagaagaatatccctaatagttactctcgatgaggtcttctctctcctgactcactctggaacaatctagggcttatccctgtctctctctcaatccttcctccacccatacctcaattaatccattgtttgccgtttcatctcctttcaacaatccatcattacccctgtgtttgtatcttacaatatttgggcatttattgcccctctccaacttcatttaatttaatgaagttgcagtcaactcctaattcttttttgctctacctcgtcccttccatcttccctaccgtcatttttagtaatcctagatttttgatgatgattattctctatacaggcttcaacagatgtaggaagaggctctgcatgcagaggaactcaacatctttccactttccaaggcgatccttcatctttaggtattactatctccattgttgaattttctatttaaggaaatgctggctaatatgttgcaccaccaacctgctctattttcctctgtacttactatccatcaccctagaaatatctactcccaacccaaaaactcaaaatttcctctctttctggtgaagaaaaccttgtccacaactttgatcatgtttccattgggtctgaacctcggtctaaaaatttttgtttggtggtgagagttctcacctcctagactctgaaaccggcttggcttgaaaaagcaacgagggaagcttggatgctccattttcctgtttctttctcggattaccactctgacatttttcttaccacctttggttatgacagtgaccgtcatagagtggttgaagacccacttagttaatgttaccattagcaccctcaatccccagaatctctttgcacattttttcactctgacattggtaatgttgctaaagaatatggaaatttttattttattgatacgttgtccggaccactcacataatttcttaagacactcccaataacctttcacttcattacagtttgcccttcccactagaattacgtcatctgcaaagaagaggtggaaatacgaggcctatttctactaagtttgatgcccttaatttctcccttgtctaaagcatcttccaaaatgcgagagaagatatcaacaacccaaataaaaatataaggagaaaggagattcccttgcctaataccacacttaggattaacttgtaacgccctaaataattaagcatgttacccaaaatacttatgaaactttaatcccataaacgagattactaatcaaaatagcgcagaatttaaacttttataataaacagaatgaaaataaaac

SEQ ID NO: 114565 - DNA, 2053 bp, Cannabis sativa
ttttgaggatgtggcagcatctatattgcagatcttctccttagaggttcgactaagacttagtgatggtagaagactttgatatgttaagtgagaagtggaggtattaccaggcttggccgaagcaattgagaaattggcaacagtattatttaatatatcaatcattagagagtgagtagaggatggagcaagttgtccttaagaagccagatcaatgataacttttgaagaacaatctttctcttgtgaaaattgcgaatgcagatgttgaataacattttcatttgagtccataattcctttacccttttcccaattagtgatcaatggtggcaaagcacaaggctatcgtatttgatgagtgactgggttaattgtgttacgggccaggcgggtaatgaaaggtcaaggtccagatttggagaaatcttgcctgtaacgattgtatcctgagttaggtaaagtagaacctttgatccaaggcccataaaggagatcagggtctccaccttcatcaatcttttccaagaaaacagggcatttgtcaaaaacatggcctataataccacattcataacaaaaatcaggtagtctttcgtaacggtattctagccataattcgccagccatccatgggaaagtaacagtgttccctctaagcagaggtttgaacacgtctatggaaactctaatccttaagaagggaccccaaccttcattgagagagtcttcatgaacttcaatgaacgatccaatctgattgccaataacttgtgcaagaaattctaatttgcttaaaaatggcagacgatagacttgtatccagaaaggagtaatagagtatgtctccattgatgcattaaagaatcatatgttgattgtagaaatgccatggttctttagatagaactcgtcttaggtctccttcacagccgaaagataccatgtaagaatcaaattcgtagctagacatggtgacttcagatctttctttccaatgagtagtgatgaaattgttgaattgcttcaggttgtaacctttttttgagaaaaatttacatattagctggtgagatgtagggcgtggcggaggaatagcgatgttggtaaggttgataacttcacgctctctaatagatagagcatttgataggtcggggttgaaggaatccataaggcaattaaatttgaaaataaaaaaaccagatagaaaatcaaagatagaggggatcgtagacagttgtaaatagtggaggatggtgacaaaagcagatatagatggtggtaggagaggttaagggtgatggaagtggagataaattgttaaaagacagttaaaaagataaaaaataatcaactgccacagagcaaattgaagggcagacaatgctcaatcttcattcaaaaaaaaaaaggaataatgtaaggagatttttttagagaaataatgtaagtggattcaaaagaataatgtgatatgtgactcaaatatatttttataaaattgtcacccttttatatggacaaattgattatgtatatatcaattgacatataaaattaaatttaatattgacttcacttatgtgagagatttttctcttaaaaagaaattatgtgagaactttatcaaattaactttaagagagaacatttattaatacccaaacaaattatttaggaaaaagagtttggaatggaaatgtataaaaataaaaaataaaataagttgtacatattgttggtgattttatactgatgggaaaccaaatggcaagttttattaagaaaattttatatatatttttttaggtaaggaatgtttctagttaatgttggttgcttggaggctttatggtgatagtttttttttttttttgttatggtgatagttgataggacgtacctatgtaaatttcacgaaactacactcacattagtttcttaaaaataagtttttttagaaataattacataagatactattttttgtaaaaaaaattacatttttatacttttacggttttctatagaaacaatacgaaaataa

SEQ ID NO: 114566 - DNA, 2553 bp, Cannabis sativa
gatttccaatgaccctgcacatttggagtaaacttcatagtcaaaaacacacataaaaatattcaacaacacacataaacatagtcaacaacacaaatgcataccattgctctaagcgccatgatctaacaatacagtaaacaaaaacagagtacaagtgtcacaatctttccttttttctttgttttcagattttttcaagtgggcatacacttgtacttataccaatttaaggttacatggggttgaaagaagagcaacgacttgtctgtaactgttaagaatcaaagcaaagcaatggaaaggggaagagggttctggagccacgtagtccaatatagaagcaacgggacacgtgtcacatcacaaaggtgtacagcgtcacattggaagtctcaagaagcagcacgtcgcatcttgtaagtattttcttacttatccacttcttcactcagtttcattttttttagaaccttctaataaattttataaaagtagaagattgaaataaacttgaaatctctcataaattagctgaatataagaacgcaggattttttctttttcttagttaaacaaattagtaaaagcattttcttcgttttcattatttttcccattacctttaataaagtccataaatatattttgtgctcaataaattttataatatacatattttgatagagatagaaatataaatacatataaaaagatacctatatattatgaacaatactatcattactttttcacctttctatataaacttttctttaagttttaggtgagagtgagattcgttattcgctacttaaaagctggaacaagttgaagattgttgaattgggagaccaagttattatacacatatttaggtagaatgtctgaaattggtatctttacatgcaatattcaaaattgaatatatctcatcagtttggggatgcaatgtatccccagcaacaaactcatgagtaactccttccaatcgaatcaaactacaaccagcattcttcttcactttcttggactccctccacctcctcaccttcaccacatcctcccactgctcagcattcgcatacacactcgccatgattgaatacacaccgccatcgtccggtttcagcttcatcacacgctctgctgctttcatagcaaccccaacattcccatgaagcctacagcctgacaacagcccaccccacacgaacacatcaccccccattggcatcttcctaatcatctccattgcttcttctatcaaaccagcccttccaagcaaatcagccatgcatccatagtgtttatcctctctacaaacattgtacgtacattccatgtcattgaagagctttctggcttcatctaccagaccagcatggctgcaacccaccaacactcccagaaagctaaccccatctggtttaactcccgcttcaatcattctagtgaaatagtttagtgattgctggccaagaccgtgcattgaaaacccaactagcatggcattccacgtacataaatttttgtctaaactcgagtcaaatatttcttttgcaagctcaatgcaaccacacttggcgtacaaatcgaccaatcctgtagttaagaaggaatctaaacgaatcccatttgtagtaatgtaatcgtgtatagtgcaacctcgttctaaatcacccaactgggcacaagcagagagaaccgaaaccaaggcaatgttatccggacgaatatccaattcaagcatttgataaaagagccgaattgtctcctcacactgattactctgtgcataaccagctaagatggtaccccaagaaacagagtctctcaggtgcatttcgtcgaacactttacgggcacccgaaatttcacctgctttaacaaacgcatcgattattgtgttgtaagagacaatatccctgagttgaggatcctcatcgaatatccggcacgcgtcagagaggcatctgcagacggagtagacacggatgagagcgttggaaacaaaagaatcctccttgaagccaaacttgagggactgggagtgaagagctcgggctatgaaaatggcgccggtattctcggtgcccaactgagagcaggccttgaggacaaaggggaaggtgtgaaaatcaggagaaagggagagtcgacgcaagcgggagaagaggatgagagcttggagcggtgaggagaagagagagtgagctctgatgatgttgttgaatgaaaaggtagatgggttttgaatgaggttgaagatagagagtgcgtagctcaatccagtcactttgccattactattatcattattgttgttgttatgaaaaagtgaagttgcagagaagaggaaagtggtgagcaataaatggttatgagaagaagagaggaagccggtgacgatggagtgagcgtgaagttggtgaagttgtttgagagtattacagtgattcagtatcactctactgacattgctgttattattattgttcatagaagtagctctgagtaaaatgaaaagaaaatacccttttgtttttgggg

SEQ ID NO: 114567 - DNA, 6073 bp, Cannabis sativa
tctctctctctctctctcccactttcttctttgtttttttgcattttcgtaaatatgttgggaaaaaaaaaggaagatagaagtgcactggcttctcattaagtacaactctttcatcaatatttagttgagtgtggttgacattggctgattatatatctaaatttgagtgtgttgcagacccaagggcgggaatccattgctgccaaacttgttgcaaatttgataacagaagcaggtgcaaatcgggttcttgcttgtgatcttcattctgggcagtccatgggctattttgatattcccgttgatcacgtctatggtcaggtaaaaaaaatattaactgttgtacttgtgggctctcttgcgtattattcactgaagacagtttggcactaacatgaaatgtcaatcctattcctgcaacacaataaacatatgattttggatagactaggatgttgaggactgggaagtactcgtgtatttggtatttcttagtgtagtcaattaagactctagaagaatttcttcaattatgcatttaacatgccagtaaattcattggtatatgtcagactacaagcaaatcattatagttgtaagaaggtttgctttctatttggcgcagcaatgtgattgatgagtccatacttatatggatgtcaagattattgacgttttacccttaatatatgtgttttgatgatttaatatactgaacaatggttgggagtcatctctgcttcattctgcaatcatcttgtgtctctgtgaagcagtactctccattttttgtgttttcttatagacagtctactaatttgtaatattttgctatgcacaatcagcctgtaatacttgactaccttgcaagcaagactatatgttcagatgatttagtggtggtctcaccggatgttggaggagttgctagggcacgtgcttttgcaaaaaaattatctgatgctcctctagccatcgtggataaaaggcgtcacgggcacaatgttgctgaggtacaatgtgtgcaagtcgaggctgactattattgatgttccttctcattttaatcgactccgtagtggttaatgctaggttattaaaggtttttcattgtacttttagttttgctatatcttcttgactagttgtgacaacctgaatgatttaagataccaatactctattatctagctctgaagaataaattttttgactattaaacaagtataatttagaagaatattatttcatgtttatgtttataaatttaatgtttatcttagttgtaagattttcattttttaaatgtcaggcctgcacctcaagacaaacacataagaaaatgcaccagtacctatatagctttacaaaaccttgatatacataatagtatgacattgatctgctattcatttcattttacaatatgcattgatgcaagatatttttgctttttagcaatgttgtgatttatctactgtctttttcttctcctttcccgttctttcttctacaactatttcatcatttatttttaattgatattattaaattatattcaactgcaggttatgaatttgataggtgacgtgaaaggaaaagtagcagtgatggtagatgacatgatcgacacagctggttagttatttgggttctagtgtacattttccatttaggaaagttgtgattcaacttctgaacgatttttttcggtgtaaaggtattgtccggatagtctgttggggtaacataattaaatggaataagtccaatatggtaaataggtttatgatggtaaacttctggcccacagagttcctggcactataacatggtagggaaagaaaaagatagttcaaagacaatatctgcagtcttttgtataattttgtgaatacaatgtctatgaaaaccccttctccgtctgtctgtgctacctagaagatactgaatagtgaatatatttgatttgataaaagacttcatcaagcatattgtcttgcaatgttctggtttggcagtgtttaattgtttgttccgtgggttgtagggactatttccaaaggtgcagctttgttacatcaagaaggcgccagggaagtctatgcatgcactacacatgctgtgtttaggtatgtggatcacccctagcaatgcaatcttcactaactatttggatgtggaatatgataatattttattataagtttatgagaagctctaatgtcttctaagaggaagttcattttatatgaatagacaagtagttgcaaatttcggagctgaaagttcaaatgtttgtttagggtagacatacttcagcatctgaccggtgggtgttaattaaaaataaaataaaaatcaagtccagttacaaggtttgagtttaaagttacttatgagaatacttatagtttgaaagatggcttgaagatgactgttaggattacagtgcatctacctgaactgttatcaaatgcaatgtgataaaacctgagaaatgtttactgttacgttccttattattttctttctttgcagccctcctgcaatagagaggttgtcaagtggtttatttcaagaggtgatcataacaaatactattccagtgtcagaacggaactattttccacagctcactattttgtcagtagcaaatcttcttggagagaccatatggcgtgttcatgacgactgttctgtgagtagtatatttcagtaaaattggattagcgggggataactgtgaattgtttcattaattaaatttatttttttattagtagatttgttgatcatatttggctgccttttaaatcttttgtacattcaacttgaagaatggaatgcttaaaagtaaataaaagacgccgagttattatcttgtgaatttcaatattttttataactaagatttttcctctgctcattactctgattctgtatgtaatcctttacttaatagtatattaactatagtcattttggtgtgggggagctatggtaattgatctttacaaagttaacatttacttttgggaaaaataaagcggaggagttattccgggttgaattttctgattgtcagggtggctacgaaccttattccaccttgggcattgactgatttatccaagatggtggtgtggccccctccctccgaacatcctttactccgccacaaactacatcatcagggtatgagatgttcagtaggaaaaccgaaagctttgtagagaaagagaagagcgataccgctgctgctcattagtttgctggttgttctagaactttgtacaattgtgagaatgatgaacagacagaaacactctttaagtaaaggagcattaggctgccgaagaggatcataggtaaaataaattgtattatgtatgcttctttctacaagtaagttattcgacttttgcttcttaaattgtttggttatatatattgaatcctcgatgaacgtgtatgctcattcaggttcatcttaataacaaaatttctttggtttttcatttgaagttttctctttatgtaagaattttgcctaatttgtcatatacaataggcacaggcaggaggatataagcacccaaacttgacactcttttgagggtaagttatgtatgagaatatttatatatatatatatatatatttatatataattttgctaaaaaggtgtactgaatagagcattttcattcattttggttggttgaaaatgaaagtgtttagatgatatctatgcatcgttttccatttcagaagtgacagatcgttcatttgttgccaaagatattttaggggcttaaagcctcacgagacgagtttgagttttattatatattttgaataataaattaagtaaaagttaatttatatttttttctactgaaattttacattcaaaataataactgggtaaacatggttggttctaaaaacaatagaggtgcaacttaaaaattatttcattaattgctgcaaaaaagaattattacattaattgcaaactgcaccttaatttcttaaaaataaaatcaaacaatagacgttcaaatttcaaataaataagattttttttcttgaattattaccgcattcaatatgtttactttaaaaattttcagtagcaaaaaagttgtttggttgtgtttttggttttttagtttttaaaattgtgcttttaaaaatgtgaatataaaatatttgtcttttaaaaatttaatggtgtttggtttaggttttttaaaattatttttagattttctttattaaaaaaaattaatattctatatcataccacgacatgaatttattctaccccgaattggtgttcgggctcggaccctagcctggactcgaatccaaatcccagacttcgaatcaacccggattcgggtctgaagtcaggggtctaggtcctaaggtttattcgaggtcaggggttcggaattcggtccaaaatttaggtctaagtatgtaagaaaaatgtaaaaaagaaaatgttagacaaaatatatataaatatatatatatctatatatatatattgatttcaaaaatagattacaacatttttgatgttttttgttttctagtttttaaaacctcagttttcaaaaaattatttttgaaagatttggtcaaacaccatctattggtttttaaaagggtaaatagcggcataagtaccgaagttttatgtttgtaagcggcataaattcagtgtttatttttagcaacataagtacccaatatttgtaaaactgtaattttcttctaatttcgtatgtacagactttgttattgtcttaaacatgacacatataaggcctaaattcttgattattggttctagatagaaatatatcatttacttctaaatgttcttttaataaatttaaaacaaagtttgtaaattggaataaaattacagttttacaaatattgggtacttatgccgcttacaaacataaaactttgggtacttaagccgctatttaccctttttaaaaattattttttgtttttaatttaagttacaaagccaaataaatccagttttttttttttttaaaactattcctgagttaaactccaatctattagttttagtcctacgtagtattttccaaaaatgacatagcatgcaacatgagtataattcaattaaaaaatatattgaattttaatatcaaaatttaaattttaaaataaaaccataaaaaaatcaaatttattctaaaaatcaccaaaaaatatatattgaatttttctaattagaatgaattattaaaatggaaaaattaacagaagataaaaattttcttttttataaccatttttcatgaatgatttttatttttattattattattattttaaagtgtttgatcataaataaaaaagaaataccagtaaactaaaaatctattctgtatatatataagatggagaatttgatggaatcgttatgctcgcttcaagagtcttcttctttttttttttaaggttctttcctgaatatctactctcaaattcaccacccattttataaaaaaaaaaatcagttttacaatccaaaattgtgaaaatgcaaaattgcccacagttgcacaatgacggcgttgtggtgcctggagctttttgaaaaaacatttctttgtaaagttcacgcagtggcgcctccatggcgctattactggtgcaacgcaagtgttgagcgcaaagacacctgacgcccgaaaataaagtttcgtctctttgatttagttccacaccatattttcgatatttgaccaatttgtacattgcaagtgtcaaaacttgaaaccaaagaaaacagacgcaattccattccaaaaagtgtctaaaaagaagaaaattaactctaaaattagcccgaataataagttaaaaatagcctaacaactctttcaatgtcgttatttatttgagaataattatcttttttaccccctgtacttatgacactatactattatgccccttaatctattcagcttgttataaatagtccttgtataattttatatgc

SEQ ID NO: 114568 - DNA, 2121 bp, Cannabis sativa
cataaacatgtaacatacatgtaaacatgcttcacttctaaattgataactaatcagattttaatgagttttatttagggcataaaacccaacataatgaacaatgagatggaatcattggtgaaaattaaaacctagatagtggtgcgaaagccgaagggtataaggcctgtgggggtgcaaatggatatttaagcacaaagatgggataccgggtgttgaaatggaaagatataaggctagactagtagccaaaggtttcacacagaaagaaggtatagacttaatgaaatcttctcactagtggtgaaacaaatctcaatcagagtaatattggccaaagcagcaagagacaagctagaggtggatcaaatagaggtaaaaacaacattcttatatggtcaatttgaggaagaaatctatatggagcaacttaagggattcagcaaatggaaatccagatcaagtgtgcctccgaaagagatctctctatggccttaaacaggctccagggcgatggaacatcagatttgatgatttcattactaaaataggtttcaacaaaagtaaatttgaccactgtgtttactttgataacaatgcttacctccttttatatgttgatgatattttaatagtaggaaataataaaaatgatatttttgagttgaaacagagactgagcatggagtttgttatgaaagatcttggcaaggcaaaaaggatcctaggaattgacattggccaaagtattgctggtgttatcaacctgtctgaagcctgctatctgaagaaggtattagaaaagttcaatatgctcagttcaaaacttgtgacaacacctcttgctgctcatttcaaattgtctcaaaagcaatgtcccaagactgaaaaggaaaggaagctcttggaaaatgtaccttacactagtgtagtaggaagtctaatgtatgccatagtttgtgctaggccagatttggatgatgctctaagtgttgttagcaaatacatggcagatcctggtgactaccattagacaacagttaaatagattctaaggtacataaaaggtactctcaacctaggcctggtctttaatggagatgcagggtctaaaggagatgttgttgggtatgtggacagtgattatgcagctaatttggataccagaagatccttgacaggtctggttttcactatcctaggaggggctgttagctggaagtcaaatttgtagaaagtggtagcactttcaaccacttaagccaaatacatggctgctatagaggctttcgaagaagtagtttggattaaaggattggcaaagtaacttggtctgaacttagatgaaatctgtgtctactgtgacaataaaaatgtcttgcactttatcaaaaatccaatgcttcatgagagagcaaagcacatagacatgaagtttcatttcattagagaaattgtatctagagatgaagttcaagccaagaagattaaaactaaggaaaatccagctgatatgctcaccaaaagtgttagcttaccaaaacttagatattgtctgagtttacttaacattgacaaatgttgatgagcctctctggctctttgagaacatgttatctttcaatactagtagctgaattaagttggaattgttctgtaactcagtttcaagtattgtccagttatgactgaggaccccttagataagagtcagttatgttagttgatttttcttaacagctcactaactgtataagtatatatatttaactcctagtttaagtcttaaagagggaacctaagtgatcattttcagagataagagaaactaagagagaagagagttgtacatagtataggtgtatctgatcctataactcttatatgaagaatttgtgctggtaatttcttatctttgcttgtaatttctttgtgtttgaacattaattattaaataaagatcctcagcagtaagacggttctccattatatggtttgtgcttcagttattaagttttgtttcatttatcattaactttcatattagttctttgatacttgttcttgttggttcttgttctaaatgttatataaattaacaattaacccaagatctat

SEQ ID NO: 114569 - DNA, 2175 bp, Cannabis sativa
accgcctggcagtatttttgtgaaaaaatagtaaaaattagtataccatctaaatttccctatcataacccatatgaccactctgcccatatgagcccattctgtactatgggcttatggcccatagtaaagtaaaatgggcttcctttacctatgagcccattaaaatgcccagcccaatattgccctgatatttaacaattgagaagaattgttaacttgatcccaaagacaactctcagatactcaaaagctttctcttttcgttctctctttgtttttctcagattaacaaaaatgggtcaaggaactcccggtggtctcaaccgtcagggtttacccggcgatcggaaacctgacggcggcgacaagaaggagaagaagtttgagcccgcggcgccgccggctagagttggtcgcaagcaacggaagcaaaagggtcccgaagctgcggctaggcttccgactgtaacccctttaactaagtgtaagttgaggcttttaaagcttgagcgaatcaaggattatctgcttatggaggaagagtttgttactaatcaggagcgactcaagcctcaggaagagaaagctgaagaggatagatccaaggttgacgatcttagaggttcgcctatgagcgttggtaatcttgaggagcttatcgatgagagccatgccatcgtttcttcctctgttgggcctgagtattatgtggggattttgtcatttgttgataaggaccaattggaacctggctgcgcaattttgatgcacaataaggtaacgagatttgaattttagggttttggtttaattttaatttttaatttttttaaagcatatttaattcgtatctagggttttttgattttaatgaaagaaatgaattgggtttgattaaagtgtattgattttattggactttagtatttggggaagtatttaatgaggaaagaatgaaatttaccaacttattagtgtgtgaaatactaaaatttgcaacataaccttacttaatttactctatgctatggtcgcacagtgcaaatcaatgttcgttttgcatacagtgtaattcatagtcggttattttgctaagaaaggttatatttatacaaaacactcgaggaaagaagcataattgagattatattctagctaagtgggtaagaaaatagtaatgtagtatcactaggagtggagtggctatgttgttgattaagaattagtatcaagttcaagtgtttcgcagttagtttgtcttattatgtatgtttcttataattgtatgctttatctctagcttgggattactcccttttcacatttcctggcttggtttcttgggagttctttatgcgtgttgtggattgcatagtttgtgttgtgaatcttttttttgtagtttaatataaatggttaatgttgtatgctggaaatgatgttgtcagctgatctttttgaatgtatcattgtgatggcttgtaggttctttcggttgttgggcttcttcaagatgaagttgatcccatggtgtctgtgatgaaagtcgagaaggctccattggaatcatatgcagatattggtggtttagatgcccagatacaggagattaaagaagctgttgagcttcctcttactcatcctgaattatacgaagacatcggtatcaagcctcctaagggtgttatattgtatggagaaccaggaactggcaagactttacttgctaaggtatgaatatgtttcttctactttgtttctctcctcattgaccattttatttaattcttaatggctacattataaatttgatctgttactacattgctgctgtctatatggttaattgttgtaattttaaaaacactccctgagctataccttttacttatgttctctcaggcagttgctaattcaacatcagccactttcttgcgtgttgttggtagtgaattgattcaaaagtacttgggagatggtccaaaactagttagagagctttttagggttgcagatgatctctctccttcaattgtcttcattgatgagattgacgcagtcggtacaaagaggtgagccattgtacactttaatgttaaaaatcagcattacacatcactgagcttgaaacatttataattattatatcattttgcaggtacgatgctcatt

SEQ ID NO: 114570 - DNA, 2703 bp, Cannabis sativa
aacaaaacttacacattccattttttgagcaatcaagttctcattattgaaatctgcaaaaagacattaatatgaattacaatattagtaccttgaataatgttaaattacctctgctctaattggtcatgtacaaaaaatttgaacctcacattaaccttatttacaagcctaatggaactcttaacatacattcttctctacccaatgactgcatgtaaaaagtttaaaaaagtaaacgcaacttgtaaactttatccaagagaatggagaagggagcttaaactttatctaaaactgccgatccacgacttggttttcttttctgatgctcttgctcttgtgcttcttttggatgttcattttgtaataaataattttgaatcaatcaagtaaacaaggaaacataatacaatacaatataagggattacacatttcattggcttagacataaaattatttgtaatctctataacaacaagacttaattgaaggcaccatcaacttatgataagttgttcttgcatctccaattccctcattctttacctttattgatacagaattatcatgaagataattaatgtatttaatttccatctccatttggaaaaaaaagaacaatcttctgcacacaacaaaaattcctctatcaatgcaacatttgtaaagagtgaagtcacttgtacaaaaattcaggatccaaacaaacccaaaaaaacaaatattcaaaactcacttaaatttaaccttatatttttgtagtaaaaccattcagaaagctataaatcaaatttccatggtctttcaacaaaaatccagttcagaaaacaagtgaattattcaaaaccaaaataagctcaaaagtttccaattaattacattcacactgataattagaggtagcattaaagtaataaccagtctaatcataacctcaatatctttaacaaaaacatataaatgaaaactaatctcattttcaattgagattagtaatttaaaataattacctatacatatctatccttgatctcttttattaataatattgtggagcccaaacttgttaaagagattgcatccatttgatgaattctgcaataatatcaaacaagaatacgatcactttattttaaacttaattaagaaataaaaacaaatatttgacattaatgtttgtacctcattttcttcagtgttgttgggatctggaagtaagtccaagtgttgaatatgagaaatcttatcccaatcttcacctgtattccttttgcatcttctcaataacatcggacaatccttgatcttgagttcgttcaaagtggtaaggcttcgaattccttcagggaatgatgtcagatgtggacatgagtccattgtaagtgtcttaagtgatttgaggttattgatacactcaggaattgttgtcagactatcacatgagtgaacttcaatttgttgtaaacttgtaagatgttggatacccttaggaagaacactcactatattaggcaacttagataagtttagcaagttaagtcttccatttagagcttgccacataaagtcataatcgtcgctattaagcatgtcccctaacccctcgcaatttttgatccccaaatgtcgaagtgatgagagatgtagaatacctggacacaaattcttcaattttgggcaacttctaatattcaagttattgagagaagtaaggctcttgaaacaatcaggaagacattcaagatcatccatgttttctagaattagccattctaatttggaaagaggtgaaaaagaagacgttgttgggaatatagacctaacattaacattactactcatcgctcttaatgtctcttcgaatggcttttggctagtcttgcttagcatcaacgttccattcaaatgtgggtaaaggggcatgcgagtcaacttaggacaatcaattatccttaatgctgaaagacaagggagataaggcaaggccatatgtttttcttcttcaccacaagttacaatctctctccaccatccttttagattaggcaaatcaaacaaccaaagtgagtctagagatggaagtaatgttgttgttgaaccaatcaagtcttcactcatattattagtgttggatatgtactctaaacataccaacctctcaagcatcaaattcttcaaacagtgtaattgcttcaatggaacaaggtgctgacattttgcacaatctgctaatcttaatttcactaggcttgtaagtgatgagagccagctagagagcttaacacccccatactttcttattgttagttcctgaatattttggtgtggctgaagaccttctaatgacatttcataaccaacaatagcctcagcttcatcttcatcttcatcagaatcatggccggccagatggtggggcagccggggccttggccccaggccccacaatttcgaaggccccgaaaaaattaaaattaatattatatatataaaaaaaataaaaatataatatatgtatatataaattttggttcaataattacataaaatggcttatagcacagttggttggtaatagaggcgttttacgttgaggtgtgggtaccgagttcgattcctacctccctcacattttatttgttttaaaaattcaaaggtatggttaaaatttgtaaaagatatgtatgtttatttattt

SEQ ID NO: 114571 - DNA, 4693 bp, Cannabis sativa
ttattatctttaattaaaaatattctttagtgagttcatccttgtttagttgaagtaaaagaaaaaaaccaaaattacagtacacgtacatgacgcacactggcgcacgttagtaatttctagcgaactcaattattttttttattattattatttaaataaataaacccagaaatttcattccctttctttctctctctttcataacttttttcagtattagggtttcgtgttctctctctctatctttctcgctctcaaactcgaactcagaagactctaatctttctggtaagatcttcaatctaatattattattcttctggaattgttttaggtttcgattctttcgatttgcaatggttcgattttgatttcgaataagcactttcactttcacttctagacctatatatatatttatatttatatataaacatataggggtagagattagataatattttagctgagggagaaagaaagattataaatttgagaatggatgaagatggaggggaacagatggatcagttccatcgtaacgaagcgatctcagctgtggctgatgagggtttcttgggtgaggaagaggaagacgatgattatgaggacctttacaatgatgtaaatgttggagagggttttttacagtctatgaggaagaatgaggattcgggttttgggaatgaggttgtggaggagaagaagattgagcaacaacaacaacagcaacaagctcctttagtggctcaagaggctgctgtttcgattccgggtgttggtggtggtagtggtgagggtactggtggtggagatgttggagctagggttgctgctgggagagttggaggagagggttatagtaatagtaataatcaaaatcttggatttagagggggtgagatgggtttgaaggttaatgttggatcggggccgtcggtgggtggtggaagtgggatgagggttgaattaggtcaggggtcgagtaagatgaatgattttgaggagcagagtgggaatactagtgttggggttcatgttattggtcagcagccgcaacagcaacaacaacctcagcagctgcaacaacagcaaccaccgccaccacaacaagttccgccagctcatgttggtgttgttggaaatgttgggaatatggtgggtgatggtatgatgaggcaacctggtgtgggtgttaatgttaatggggttggaggaaacaatgttgttggtggagttggggttggggtaggggttggaggtggaggtggtgggactattttgtttgttggtgatttgcattggtggacaactgattcggaattggagtctgagttatgtaagtatggacaagtgaaggaggttaaatttttcgatgagaaggcaagtgggaagtctaaagggtattgtcaggttgagttttatgacccagctgctgctacagcctgcaaagaggggatgaatgggcatttgtttaatggtcgaccttgtcttgttgcatttgcgtcccctttcagtgtcaagagaatgggagaggctcaagtgaacaggaatcaacagatgactcagactaatgttgctcaggctagaaggcctaatgatactggtgttaaacctggtgggaataacattacaactggtgggaattatcaaggtgcagataataatactaatactaataataataatagaggtttcgggagaggtaattggggaaggggtaatgctcagaatatgggaaataggggtcctgttggtccgatgcgaaacaggggtggaggaatgagtggtagaggtataatgggaaatggcggaaatggctttgggcagggtcttggtgcaacccctcctttattgcaccctcagtcaatgatgggccagggtttcgatccagcttttggtgcccccatgggtagaatgggaagttatggaggctttcctggtgccccaacaccgccattttctgggattttgtcctctttccctcctgttggaggtgttggtttgcctggagttgccccgcacgttaatcctgcatttttcggaaggggaatgcccatgaatggaatgggaatgatgccaacagctggtgttgatgggcctaatatgggaatgtggtctgatcccagcatgggtggatggggtggtggtgaagagcatggtgggggaagagctgcggagtctagttatggtgaagaagctgcgtctgaccatcaatatggtgaggttagtcatgatagaggaggaggctggcccaatcccatgaaggaaaaagatagaggttcagagagggactggtctgggtcttcggatagaaggtatcgggaggatagggatcaagcttatgagagggatgtgcctagagaaaaagatacaagtcatgatgactggtctgaaagaagacatcgtgatgatagagacgctggtcgagagcgggaaagggagcgtgatcgggatcgagaacgttctcgtgatcgcgaacgtgaaagggaccgtgataggcatagggaagatagggacagatatgctgaccatcataggtacagagaccgtgaaactgaacatgatgatgagtgggaaagaggacggtcatcaaggactcacaacaaaggacgggtatctcaagaggatgatcatcgatcaagatcaagggatgctgattatgggaagaggcggaggctcacttccgaataactgctttgatgtttcttatttctagataattcttattttaaaaaagaagaaagtgaaagcgaagaaacttttgggggtttgcagtgctattttggactctttttcaactgatgtcttatggcccgttcgttcagtggtggttcattacaattcttcagtctcaggattgcttctcttacatggaagcactgtttggttcttgcatgagaaaaggtaactgaatagaaagtgattttctgcttgaatgagtagagtttattggcatagcatggtaataaattgttatttggatgtttgttgaatattatgctgtaggctttgcttctattttcttttttctagcaatcctgaatgagttgtgtattttgtaattaggtatgctgatactgttaactttgtacctattgaatcaccaacaatacgtacacacactcaagctgttatcttattttaaatggtgtaaatttaaaatttaatgttcctaattcaaatatgtcaattaaattcacgatttactgctgtttatctccattctcaaaatcattgactattaactttcgtctttactgagagtttccattctagctctatgtatagatatgactttaatgaactttgttcttttaatcattcaactctttaagtaatactttgattttgagacaggtgttttttcatcagtttcagttcatgaaatttcaatttgggttttatctttgtttgttggtgttatgcttatatttggtaattgttacttttaattgatatcctttcgccatatgattgcgtactttacttttttagaatcatgctaatcttggttaactgctgcaattcttaattgacttatttattgattggtagcttgatggacttccttattcgagaaccaaagccgttacacagggaactgtgagagccttccactacaacgaaaagggacctcgtagcttcaatattggaaaggagaacgaaaggtgttgtgccagaccctaatagtatttagaagcagactctcttgcttttaagtttttcttagctttctttacctttatgttttagctaattagcacttgataaaaaaaatgaaaaaaagaaaaaaaagaagaaacaaacttatcaatgttatgacgatgatgatgatgatgttatggcttgaaattgccgaagtctcgaatatggttagattatttttcggaacttgttgcttgaaaaatggtcatgtaataggatttatctgaggatgttgctgttgttacctcccccaccatttctttttttgttgtttggcttagttgttgttgtatcatttgtatttgttgtatcattatatcctctctcactttttcttttctttcttctttttgattctgttgtataccaccatgatgttgttgttcattgtgcacatttttttgtgaagttgtacttgtagatgatgatgtagtgtaaccccccctaaccattcattgaagtagttttgtagtattagggttatagttgtaccatatgaggttgtaacctatacggctttgtacatactgcaaatatttatggaattgatctctttttcataatattttcttcttcttttgttttgtttatacagattctttaatctcttttcttttgtttgattagagattacattttacagtttacaggtcatttggaatctgttgattgattactcaattcagaagtttgtgttgatgatttttaatgcaaaacttgaaggattgtgtttttcattttgtcttgaatttcaaactctttgcttagcttccttcattttgctactgaaagtttgcccttttagttatttagcagaaatttaggttagtgttgattttactggtttttaaacatccccatctggttttacttgcttcttttaatcatgtttatccttttgttttgttttttgttttcttaacaattgattgagtattgctattgggtactagtgttacttaagactttctaaacgtgtcac

SEQ ID NO: 114572 - DNA, 1106 bp, Cannabis sativa
ggaaatacaaggtcaattttgtcatttaacaaaatagaaagtcaattaataacttttgcaaaacacagagtccaaaatagtatttaccaaagcatgccatgatttttctgaatccattattcatatacacatcatatatatatattttttttgaaagaatagacaaattatatacctaatggaataacaaccaatgagaaaacataataaaaatttagtaatagaatcataagacacaactaagtagaattggaaaatttatttgcacaaatcttatagctgcacttgaaaaagtaattagatttacgattgtggtttgaaattctctttatttatttatatataaatatttttgttttattaaatgtgagaaaaaataagtttagattagtcaagggtttatgtatattggataattatttagtttctttattaaattttgataattagttatgaattaatagatatttttatgtaattattgactatcttacactttataatataaacatgcatacaccataaaattttggagttcgtagttttgattttaaatagtaaatatctaattgaaaaaaaatatattagaaaacataataataggaaaaataaagagctaatgatattttcattttttgattggaaatattgaatagtattttgtttttgtttgttttgagagatttggtaaaacaatagtgctaaaacatagtatgccaatttaacatgtaaaaaataaaaagaaagaataacatgataatcatgttaagaaaacataggttcaaattatcaggaaaaaatttgtgtatctctcattaatagaatgaatattatttataaataactttatacatttgtggcttcaaatgtttaagtctataacctattaaaaggaagcgttcttatatatataaaatttaatgtataatttttacatcctatatgttatgcataatattattagaatacaataattatttgaataaatggtaaattgttcatataatgtactctcaaggatcaacgaacactagtcacctccattttaagtatgatattgtcaatgatctgttagacttttatttgggcttacattaaattttatt

SEQ ID NO: 114573 - DNA, 1797 bp, Cannabis sativa
cacgtaaaaagtcttcatctcgctttcttacagctcattattatattcatattttattagttgccgaaaacctcggtcaacaacgctcaaaaagaaaaagaccttattggcagttacttagagtgacagtgatgaagacaaagaggaaaacttcagtcatggatttgataaggaaaaccaaactggagcatttgtggccaggagtagtatcaactcaaaaaattcagaggaagagggatcatgtagctcagatgtagatagtactgaaaataatattgtcatttgtaataatgcatcactggttaaatcaatattggagattctactgctattccaaatggtttagccaaaagaaataatagtattagatcaatacattgtctttcaagagcttatttactattattagtgttatcatatggtcttctcaaccttttatcattgactcttgggtttaagtgaagaaaagctgatgatgttatcctagtgtttgctagttttgatcatattgtacataatactcatttattccaaaataaatacgatatacaaatactatattgtctagtgttcctcattatttgtttatgtgtcatcatgtttgataaggaaagtgcttagttggttgcaaagaaaaaaatcggagtgacgaaagatagaaaagattttatttttcttaaaaagtaataataaaaaaatgggcaacaaaatattaaaaaaaaaattatgagagacggagctaatgttctcacataaaatgagctaataatcagtgcacacataagaaatatcttggttcaaattcctgttgagaatttcttgtttgtttctttctcaaattgtatatgaatatatgaattgtacagaattgtctcagttgcatgaattatttctttctcaatgtttattgctcaacttattaattagtttgatcaaataattttttttttcttgaacatgttaatttttgagatgcatcatctcccatgttttaattgaaaataaaaataaatttattttagcattagcaataatataatggtgatttgatagtgtttacttggtcaatatctcttatttgtttatatttattattattattatccatatgttagatggattgacatttccactttaatgtggtgttagatggaacaaatatcttttatttatttatttattttctttttgaaaattcagaacaaatatcttttttgctaaatatttttataccttattgattttctaaaattgaggaaaggtatttaaaaggagtattgttattgggtatcaagtgtttagtatctctatatatattattttgtgatttgttattgatactcattaaaagttattacattaaattatattagattcgatgcttagttggatcaataataatattaaattattaacacataggagaatgctaagcactacctactagtacattttaacatacaaatgtatgaatttaaggccataatgtcagcttagagtatctctaatagagagctataaatgtgatgtattaccattttttagaatattttattaaaagttaactccaatggtgatgtaaaatgtgtgctaaatttagcccaaactaaaaattgtactaaatttgtttcgaaaaaaaagatagcatttgccaaattttagcccacaatagtcaataaatgtcatttttttcaattaccgatttgtcactcattaatactattcattaataaaaaatatttttatatttataagttattaaaataatataaataaagttaattatttgtatatttt

SEQ ID NO: 114574 - DNA, 3085 bp, Cannabis sativa
gtaaaaaaaaaaggtacattgagagaaatcactttagcgagaaataaaaaagtgtaaatttgtaattcattatgcaaagataagatgctcaatcacaacaacaatttcttcaggcaaaagaaaagcccttcaagctaactgctccctgcagggaactgatactgtattttcatcaagaactgaatatgttttcagattacacaagaaacccaaactttattacaggactacggtctaataaataaaaaaaaaaaagtaaaaacctgaaattaccaccatcttagcaaaaaagaaaagaagcaagttaacattaatttataaacattgcgaggcaagagacttcattgaggaaggtggaggaaaaagtagtatgtacaactctactcgggaatcacagctgctggttctaacggaataacagaattcggaaaatctgttctttgtccagcaagggagtaatacgcaagtatgtgagctggatgttctaccatcataggctccccgacattatcaggaagtacgactcgtctagaaggaattagctcgatattccaaaacgggcgagccattgccaaaagatcacgaccaggcacaactgaggatgctctatatccttgcacccacaagtacctcagcgaagtgagctgcatcaccgcactagctagagcgtgctcgctgaaggaacatcctctcatctctagtttttgcaggctaggacatcccttagagaactccaaaagacctgcatcagactcgccaacatagcccaaaagcatccaccttatattttgactatactggccaatatagcctagaccagcatcagtcaaacccccatgcctgagatacagggcaaaccttttaagctttccacagcctctcaaaagagctcgaactccattatcaagaggcaaatctgttaccgtctcttctctatcaagcaaaactagacgaaaatcacaaaggttcttagagtaggtgccaatgcattccaatgatgaatttgtaatatcggaaacatagacagccaagtattctagttcaagacagccttgggccaaagctatcaaacccctttgtgagacaacaccttcttcatcctccatcccttgctcatcatcatcacctcgctcaattctgagcctctttagcttcttgcaactctgggcaagaacttccaatcctctatctccaatgacattccttgtctgttcaatatcaataaaagattattagaatatatttcctaaacagctatgactaccaaacagaagccctgaaaataaaatccttagggttcaccatatacactggttgtatagaagatattaaggctatgtatgcaatataaatttgaagatacttctacggtgcacccctttgcaacgatgcactatttttttatatggtggtgtataatgtaattattaaagacattctgcaaatttttaaaaaatttagaataatttataatataaaaagcaaggttcaaacaatcacatgcgtataaaattaaaaaaacacgtgtgcaagagactgtttgaactacgttatatactatcatgttgagaatcatagaattccatcttaaaaccaattgatgataagtagaatggcacgtgttcttatatatggctcaatactttaccatatattccaggtgggacaatgaccacaatatatcatacaaaaaaatttaagattaaaactatctaaatgtcaaaaacatgaaagggtgtactataaaatttctctaaattttattattagattttggtaaggaatactataagaaagttaacaattttttcaatcttatcccatttctaatatatttataaaattctaaattctattagattaaattaaaatgaacactcttttcccgtaaaaggtcccttcatttacagtttgaatctagagaaaataataaatcactatctttctaaatccaagtttaagaagagggtaaaagtacctaagttacttataggaaaattaccaaaatggaagaaatagcaacaaaatagctgcacttatatgcccataaaaatctacgtacaaaaatgagtgacgtgttccttaaaggaaattatacaagtacagcaatgataccatagaattatacttttcatcaatatgctaaatcatgactaaccaagactcacatgggaacatgacaagcccacaagggaacaagtaatgaaaaacacgagaacagggatagtgatattacctcaagcacttccaaattaggacacctttgaattaatgtacaatgatcctctgtattaagtaacgcatagagaagatccagctttttcagtaggtttgtcaaagggaatactattgggagttcattattgcccatgtatgttagacccagacggcataatttttgtggtagtgatatggccgtgtacttttctggatgctcattgaaagaacccccacaaaattcttctaatgcaactgcagcacggaagaacttcacaagatccaaaatttcacaatcactaattttgacagaaattaatgagcgacaattcctggctatcagtgcaaggtcctcaaacttgactttggcaagatctgtcatgtaaaaatttaaggtctcaagaactgagttgttcactgcaagttcatgcagccactcaccgtctttgtcatttattgagctctcctccaaaaacaaggttcttaaactcctgataaaaaaaaagtaacaattcacacatttcctatggtatatgttaacattaagattctagaaccaaccacttggattcggttgattggaaaaggcaatgtcatatctagaaaattcactaagaaagcgcaatgaaatttagaccaaaaaaagaactttcacaataagccagagtagtaacatagcaggcaagttgatgggtttatcaagcacaaacaaaagtaaactctacaaccactttgaccaggtgagatacattagatgcgtaaatggaataaaggcgtaggatgttagaaactgatctaaatggaaacaatagaagtcacatcatggaaaaagaaaaaaaaaaaaaagaaaaaaaagaaaaaagaaaaa

SEQ ID NO: 114575 - DNA, 3161 bp, Cannabis sativa
  modified_base (3065)..(3081): a, c, t, g, unknown or other
ggggggggggggggggggtaatatttttaggtatttgtattttttatgtaaatattttaaaaaataatatacaaataataaaaaattaacaacaaaataacaagagtataacataaaaatacattaaaagactgtattttatgtaaataaaatgtaaaaaattgtaaaaatattaaaaactccatacaaaccgtacttttgtaatttttttttaaaaaaattacccctaaatattaagatagatggttatcaaccccaaagtcactgctacaaaaatccatcttcaacccaagttgttcattagatagtttcttcttcttatagtatattaaaagttaaatatagatgctctcattgtactaatattgagattattagtattagtgctcttgttcgtgattatgagaattttcctatatggtgttttgcaagatatctgcttatttttttatttctgaagaagttgaagtctcagttctatcttttgctttaaaatggtgattggagtttggattcttatttcttatgttgagagtaataaaagggtgtatccccatagagttatttttagatctattagatcttttaccatattataatccatataaaaaaaattacttagttggtaaattggtcattttattttactttattttttttaaaaaaaaatcaaaacaaattggaaagaaaagaaataagtgtatatataaagatttttttgtgccgcatgtctctaaactatatatgttttaataagttggtccttaaattttattttttgacgaattggttcctaaactataaaaaatttggtaagctgatgttcaaactttattttttgacaaattggttcccaaacttttattttttaaaaaacataaaattcccactcttaaatgatggtattttatttatttttttttattaattttaaatagttttatattaatatattatcaaattaatcaatatttttttatttgtatatatatttttcaaatatgcaaaaaaagaaaaaaagaacaatggaaaaggcttacataataatactattattttttttataaactactgaagtaaattatattttaaaatttatttttattttatgttctgcggcgaactgataaaattttacctgcgttgatgtaatatttaaataatcaataaatatatatacacaattaaaaaattattaaaattatattactatacattcataaatcaataataaaaaatactataaatgctaaaatataaaaattttagctgggatgagtcagctactccttactccattctaccaccggatcagctgggatgagttagctactccctcgtcaaactgaagcgaccaagccaacgaatagccactcttaacattgtaaaccctatcccgattatagtgccaacaccaaccatcccccgcctctgaccttgctaatggaatttataaaattatctcaacatccatggccaaaaatacctgttgaagcttcccaacatcccatacaccagatggaagaataaaatcactcacacgataatcatcatttacccttctcgtgattggctaaaaagacctcagacgtaggggccaagggtctttgaacgcccacactagcattccatctccaatggatcgctgaaggccacatttaagcaaatccaatccccaaataaaactcgacgaaagattgagatgaaccatccttctcagtggcatctaggatagaacagtttagaaaatatttatgtttcaaaattctagcaggtaacgactctgggtatagaagtaatctccacacttgtttagccacaagagcttgattaaaaagttgaaaatcctaaaacccaagtttggccattgccttaggctaaaaaatcatttcccatttcacccaaggaatcttcattttatcaccattcgaacccattagaattaccttacaatagacttcaatttttcacaagttaccacagaaagttgaaggatactcatcatataagtaggaatagcttgaagaataaatttaataagtaccttccttccacatgcagaaaataaactccacttccatcctcgaacacgcttcctgacctcaaacgtttgtttttttccctaccaaccgccgtaggcaattgcagatacttatcatgagtagcaacagatgtcaaacctaatacttgtagaactccatcacgatccacttgtggcacattcgaactaaaagtgatagcatatatacttctcaaagttaatcttctgactagaggaagcctcataaattaggaggatacgcttaatagttttagtatcgtctgcattagccctaccaaacacaagactatcatcagtaaaaaaaacaagtgaattatacgtggccttgatctagaacacctaaatctcataaatcaaatctagcttctacatgagagatcaacaaagacaatgattccgcacataaaagaaataaataacgagacaaaggacactcttgttgtaaccctcttgtcgataccactcttcctttagggcgaccattgatcaaaaaagcatactccaagtttgtcacacaatcccctaatccagccttcaacaaaaccaaattgtcgcatcatactggctaagaaatcccattccacccggtcatatgttttactcatgtcaagcttaagtgtcataaaccctcttctatcattatttttttaaaacagtgaatgaagtaattcaaaattaaccataacgttgtcatgtatcgggcgccccagaacaaatgcacttcagaaagatgtgatgagggagccaaggatagttttcatcctcaacaataaagtttttacaacaattttatacattactttacacaaagcaatagatcgattacattacattatatcaatctcctgtttagaaaaaaaaaaacaaatcatcgatctcctttctaatttttttcccaaattttagataataaattatttctctcacataatagtttggaggaattgattataataatcgaaggcacaatttggtaataatactacaaaaaatcttacttttnnnnnnnnnnnnnnnnntgattaaaagtaaaaaagttgtgactaattataaaacatcattcttatgttgtgattaaaaggtccgtggctaaaggtat

SEQ ID NO: 114576 - DNA, 1488 bp, Cannabis sativa
  modified_base (1455)..(1455): a, c, t, g, unknown or other
atttattcataattaattagggttttgctaattcatttctaattctagggtattacagttagtcaagatctatgattgtgagatccttctttacctagagaaagcaattgtgatagcagttaccttaaatagaaaaggtcccgagcaaattttaagtacgaagatgatctctccttaattagtaactaacctgattgagatgggtattgagtttgtagttgttaaacattggaatttgacgctttagtttgatctgttaaaaaagaattagaaatactcaaatggaagattctgagttagttatgtctcgagagaaagtttaggctatccaggctaaagaattctcagtattagatagtggaatactactttacaaggctcgagtttatatttcggataatggtgaactcataaaggagattttagatgaagcttgcaccactccttacttgttatacctaggtgccaccaagatatatcaggacatgaagccttactattggtggtatggtgtaaaaataatgtcgtagattacatatccaagtgcttgaattttcataacactgaacattatagagacatgtgagtttgttttagcctttagcacttcccgagtggaagtgtgaagatattattgtgtactttgtggtagcattacctagaaccacaagattgtacgatttgatttgggtaataaaggatcattttattaaagtgacgtttgataatacttttatttttaaattttttaatcacaaaataaaagtaaaattttgtttttgaaaaacaaaaatgtgttatataaccacttttattttttaatttaaaaataaaaaataaaagtgtgttctgtaattttcatttttatttttatttgttgattttatttaagttgggttcgagtttgggtctaggaccgaggtgggtccaagttcggggtcgggtctgggttccaaggtctaagttgggattgaagtccaaaatattaatttaaaaaactatttaaaaattttttgaaagtgttttttttttttaatttttaaaatttagattcttaattaaaaaattaaaatgtaaaaacagttttatagaacatgattttagaaaatatttttactattctaatttttaaaacaaaaaattgattaaaaaagtgtaaccaaacgcacacaaagttagctcattttcttccagtagaaacaagtttgatagtggaacaatatgcaaagttagatagtttgtctgcaaagcccattgtttcagatagagatcaaaagttttcttctaagttttgggagagtttccaaaaggcaattggtactattatcccgattttttctcgcataacgtggcacctccacgtggccaaaagtggaagacatgtgaagataagtcagtactaatcggccaggggagttcctgttggaattatctaccaggatctagatttactancaagtatgttattaacatcctaaacatgaactt

SEQ ID NO: 114577 - DNA, 3143 bp, Cannabis sativa
acctcacttgaaatttttgttgagatgaattacttcattttggattttgagataaaagacctcatttgggatttttgttattaaggtgtgctagagaatcttagtctagtcttgtatgtttgcttcactttctgccagtaggagttagttaagttgttttggttagttagttagttaatctaactatcttactaacttcagttcagcttagttagttttgactagcttgactaagcttagttagaaagaattgcattacattgagtagaccaattacaatggaaaaatatacacaatagagctgagggtttggcatatagttaggtgttgaaaaattaaatacaatagagcatcccatgttgcctttttcctgctccaagttatgtcaaaatgtttttgaaagacattttcattttttatagttacactgctggctcagccttgtttcaattcttctcatcagtttctcaagagtgaaagaaaatgaggcttgtgggactcacaggtggaatttcctctggcaagagcactgtttccactctcttcaaagctcatggcattccggttgttgatgctgatgttgttgctcgtgtatgcttctcttattattgaattaaatccctttgtaataagcttttatttaatctaataaaaatatatttaatatcaattagttcataaacattcagcattataaagatggaaaaattatgaaaattcagtatgattctttatgtgatattatccacttggttcctagtgaaacctggtatcattatttgcgtgtattcgttcttttcaacaattggagcctgtttgctatttgcttctgtttcatgcattgaatttttattgatcaggatgttcttaagaagggcactggtggctggaaaaaggtagtttcagcatttggagaagaaatcttacaaccagatggagaagtagatcggcctagacttggccagattgtattttctgatccgggaaagcgtcaacttcttaatcggtatgcttttttgaatgtagatacaattattctacataaaagtctaatgtttatgaagatgtaaatggaatagacgtttcactcatgttgtgcctacacaaaatgatttctattgtgtttttaaaggaaaagttgagtggcataaaggtaaaaattgatggtttgatttgatgtctttgggtaatttgtcatttatagaaacttcagtttgaatggactcttttagaattaattttaactttttatcgaaaacagaaatgtattgtttacttttacaacttagattgctggtacgaggtattgtatactaaaccatacacaaacattaataaaaacatcggacattagtaactgcatgttaaaccagcaatagtagaaacacctataaaaggtaggacattaaggaatgacagccaaatctgccattccaaatagtcacccaatgtttgatcttatcccaaatagctcccgcatcttctacatcattgataattctgcgatttccttataagtcttttcgagttatgtttccttcactgctagattcatgcatgaaaactatttgaactgattagcaccaatagctaggtatagatttgtaattgtaggaaattgttgagattatgcaacctctttccatttacctatttcttgttgagttactttcctcaataattttaagttgaattgattcaacatcctttaacaggtgtccgtccctagcaaaaaaattggtccaattaaatttttaaactacaaagtgaacttttaatgcttgtatgattttgacttgtacagattacatgtgagtaatttttcatttttatttgctatgaacaatttgccctggattcttcttacaaatgccaattttttacgttactatttcattgtcttgcagcctactagccccttatatatcttcaggcatattttgggaaattttgaagttatggattaaggggtctaaggtaattgttcttgatattcctctattgtttgaagccaagatggataaatggacaaagccaattatagtagtatgggttgaccctgaaacacagctccatcgactaatggcaagagatggttcgaacgaggaggatgctcagaataggattaatgctcaaatgtcactagatttgaaaagaaaaaaagcagacatagtaattaataacactggatcacttgatgagttgaatgaagagtttcagaaagtcctgtgtgaggtgacaaagcccctgacatggaccgaattcggtctttcaaggcaaggagccttgtctgttctcgcttccactattgttggtgttattttttgcagaaatattttaagtaacagttcaagactatgacttggtgcttaggattttatttatttatttatttttcaaaccagtatatctggttgttgtcgtgttagtttgtatgtttgagtttccaagcagttgtatttgtaaaagaattcaagaaagttttgtcatgttctctctgctttgtgttacctcattggtcttcagaattttatttaagcaagctattagttattttttaaataattcttcaagctaatccgaagtgtatgaatcactactttacagtttttatgttattttcctttttacattttcttgtaattggatgaccagcttaatgggtcactccttttagtgataatggatctatttattgtcccaagtgacaagtatagtcacaaatcactttagatatcatttataaagctttatcaaactcattggcttacctaaagtgggacataagtaaatcaagatccattatagcattctttttattgtgtttgatatgactattttactgataatgtgtacaagagtattaataaaataaagaataaaaaggaaaagagaaatttaactaattatgtctacattagggggaaattgatattctaaactaagaatctgtttggcacagttgtactgtggggaaaagtaattgtgatcaaaactgtggaaaaaacatataccaattttaaagtgctaaagttgttgagattttattataatagtgacaatatttttatttagttcattataattacatatatatatatataaatatgttatatataatttttatttttatatatttttaa

SEQ ID NO: 114578 - DNA, 3500 bp, Cannabis sativa
  modified_base (3468)..(3474): a, c, t, g, unknown or other
tctctctctctctctcttatctttgtatatatataaatttatatatatttttttatatcttattcttttaatactttttctttcttagaaaaaaaattaaaagtactatttttatatttcttttattttttacaatgactaataaaagtagtatatatatatatattatgttttatagtttattcagaattaatttataaataatttgcataatttagttgttatgtcctatcattttttttcgttgatttatagttgtcttttttgtaaagttggtacaataaaaatgtaaaaagactccgtattacaatatttttgtaaactttcttcaattttacaatatttttaaactttttccaattttagtgtattttacaatatttgcagcactcatatactttgcggtacaaaaagcacaattttttttttagtgctgtacatttgggttggtcactcatataaactttaaaagataataacaataataaatgtttttccataagttgtggcaaccaatcatttgtagaagtagaagaagccaacattattatcatcccttcgaagtgtaaaaactatactttgtatagatgagcagctaacacttttagaaacgaaaggattgaaacattatgatcagacaatattttatagtaactttttattatgtgaaataaattcaccaccattattattggataattaaaaacagatgatagacaaagggggctcacagccacagaggaagctgcggatgtaacgtaaatggtcctttttttgagcacatgctgaggagtactcgcacatggccttgctcacccattaattgaaatcacagtatcctatcattttcatttttattttcccctacttctcaaatcaaactcatcattgtctcatctcaaattgttcaacctttaacaatttgagtacctcatcgaatataaatagagcattatattgatgcttagccacaactcatctaatactatatcagtatatggtgttgatgacagcatccacgttatttagtattttcataaatttataaataaataaatgaatgaatattagcatcaaaactccatatttttagtgcaaaattgtacaaaattatgaaacctaaaattaaaaagacttatgggtttaggtttaaagcttttctctatcaaagctaccagtctctataactccttttcaaaggcctagatatatttaaaagaaatcacgaaactaaataaaaagttttggttagcattacatcctagagaatactcatagattatcaaatcaatagttaaattaatcaaacggttatgaatattagaagatacatttttctcctcataaagaatgtacaagttaaaatcgtgagaagcttttttcaatatctttttgatagagagtgagacgctgcatgtgggtgttgttcaagtggggttgtgctctatctcttatcaaattcaaaagattgcaacttttatttatttttggtttggtatgaaattaaaagagactgatctcattctcatgaatcgccgactttcactatttgaatgggccccgcttgctgcaactaaccaaactacccatgttactactagtcggtagtgataatggatcgcttgttcctgtaaaattactcataaacccttcttataattttcaggtttttttaatgccactttaaacaataatttaacatgactttgtccaacaaaatctatgactattacttccataatggaatgtttgtttgtccattacaaacatttattgttgttttagctactctaatcatgatatgaaaattaggtcatgtcgtgagttctaatatgccactcatgatctaccttaaaattaatggaaaaagaaaaatctatacataaaccataaagaaaaagaaaaaaaaaagtgatacaaaacagttgaaaaattaattaaaagtggcaccttgtctaataaatatatttacataatctaggtaccataaatttatttaataacattgcatttgtgactattgtaacaacaactaaaagtgggaaaggctcaagtgctcaactattatcaaacactagaagaagggacattttgggaatataacatcaacatagaacatgcatccttcctttttttcttgaaaccccccgtacgtagtaaatgaatacatctatttaccacaccttcatcagtagtactatagcagtaccatacatttttctatttataggtgacagtactggacttgaacttttcaactaagccccctaaatcttcatagccaccctcttaaaaccaatccttttagtaatctttcctaaaaaaccttagcaaacactatgactaagtttctgtgtgttgttctcttagctcttcttagcatttccatggttgcaaaccaggtcggggctcatttaattttcttcttaaatttgagatcttatgtctagtctctactctacgtttcacaaatgaaaagggtactaaacttttattgaatttggcttattttcattttgcaggttttggcaaaagaatcatctgagcacaacttagaaagtgtaagcttttatgttcccttgtgtcatagtggaattgaataatatttaatctccaaaataaagtttcgaaaagcttgatcttatttcttatgatttgcttctttcattttacagagaaactatggacctgcgagtcttaaaaagtaccgtaagtgactatcatttaaattcaaaagaaaaataaatatatgattatagcctattgtcatatatatatggtaataaaaagtattatatacataacattttttagtttgtaattgtatatttttatttttggataaacagaatgcccaggagaatgcacaagaagatgcagccaaacacaataccataaaccttgcatgttcttctgccaaaaatgctgcaacaagtgcctatgtgttcctcctggctattatggcaacaaagctgtatgcccctgctacaacaactggaagaccaaggaaggaggacccaagtgcccttgagccattctattatatctattttagttaaattataataattactactgttactactattgggtattagtgtttccctaattatttcaaataattagtcttaagcactaattttattggtagtttattaagatcattgggaaatgtattgattattatgtaactatcaaatcaactaatattaaatggtaacttcaaaattgttgtatatctatcttaagttctcgctatgtaatccccaagatgagacgaggccctaaatgtaaattggtaggcctcacggtgtatgggataagattgatttttgggcttgccccaaaccttttccaaactaagcccattacccagttttcttacttatatttcttagagaaatgtatacctattttattttacttatttttatttggctaattagtaatttttttccttgaactttnnnnnnnactaaattgtgccccctgaacttttt

SEQ ID NO: 114579 - DNA, 1834 bp, Cannabis sativa
ccttttcgttagagaaagtaacgaatccgaatccccttgatcttccagtctcacgatcgttaatgatctgaaacaaaaccaacaacacagttagatctagaccagaacaaaatctaaaataaaatcaaaagattaataaaacaaataaaccgatcggatcttcgtctttaggtaaaagatgacgatgaacgtaccgatatatagtttgagaaaaatatgtatcattatagtaacagaatagatcaagtagcagtagtagagtaacaaaacacagatgagatgagaggacagagcagaagagaagacagatcagatgggatcgacaaatccaaatcgggtcagatccgatctctgcaacaaaccgaccttcgattcaaggatttcgccaaaggtagagaaagcatcctccagagacttgctgtcggtggcccatgcgagccctccgacgaaacatctgtactcgacgtcggcggaacccatttggagaaggaagagtaaaaaggaaaccctaaatataataaaaaggagaaaagtaggagataatagaacaagactatgtttagaatctccctacaacgataccttttataatggttggcgagtagtgaactgtggttgagggacgcggcattcaaggcctggttaggttagggtagggtccactatcacgtggcgccgatagatatttcattcacagacgaagatattttagagatctgaaaatatctcctcactgaaattacggagctgccctctactttactcaaattccttaaataacccttcagccttacacattttttcataatccctcactcttacgtttgtcctttgtaaaaacacaatgttatttgtttaaatatgtggtgtttagtttactgaaatgtaatggtaatggtaatagtaatagatatattgttagcatgtttgatttattttgttataagtattgtacttagaattgaattaataaaaatatccttgttttatttatttatttatttatttatttataatttcaaagaaaaaaaaaaagtaaaattgtctttttattatttagttgtcattataattctcatttatgaggtataagagtgtaataagaattcataagattggtgtaatgcccattacaatgaaattccattacaaaagttagaaacacaaatcaaatattgtaacggtgactttgattctataacaatattgattataatcaaccaaacatgttctagttccaaataatttattatattaaattactagtgacttaatacttaattatattaagagtgttattgttggttttttcattaatctcttagttaatttttgtgctcgaaaagacatacagaaatatttttttcatagcggaatttgttatgtttataacatcatctttgtagactttttaaaaatttcaaatagtttacaatggcgaatatatgtttaaattaaaaatttacagagatgatactgtaactataacaaatactgttatgaaaaagaaaaattgaaaaaaaatatttcgacattaattcatgatgtggagattgactaaaagttgtaattaaaacttctttaacaatattattacgtaagaagtaagaaagtactaagcacccttaatatcttttactaaaaaataggcacgatatatatcataattcattatcatcaacccttgcttggcgttgataaaataaaaaaaaatactattagttacacttgttaacgcagattttcgttaactaaaattgagcctaacaatgacaatctcacacagaataaatgaaagctataaaataaaagtatgaacacagggttttttacg

SEQ ID NO: 114580 - DNA, 2708 bp, Cannabis sativa
gtcgatgctgcagtttgatccctttcgccctcagttgcctttgccccctagcatggttgttgtcgagcctttgtgcaatcctgttaatagctatttaacttgtttcttggtaacgcttcttagaggtggttataggataccttgtctttgcattatgttgtgcaggattagacaccctgtaacaatcctttgaatccctactttctgtcatggtttttgtttagaggtatactattgtagatgtatccatgttggttgtccagcaagtctctttattttaaaattgggaggcttagttcgttgaagaaatgagcagataccaagtctgccttagttttgaaggcacaacttgctagtcgagcgagtgcgtcgcttgttgcgttatctttggggacttttcttttagtacaaccattgagctaacttaacaagtgttgatattagctcatgtaggcagtcatccttttgaatgagttataaattcacctagaacatgacctacaactagttaagaattgtggtttatgtctaggtgttcagcctacgcctcaagttggcaagagcttggcctttgttggccatgcttggttgacaagtggccttatactgggcgagcttgattaagtgctacaggttttggcaaaacctactgccatggtttatcagtgtatacctttacagggagtgcctggaagtaagaacttagctttctggaagttaagagcaaggtttaggccagcttctctatgagtgggtactgactttaagcgtcgattagtctcttattgatatagtatacatggtgttgcacaatgttttcttctcttgtgaggatagcaatcacatcatattctgtggctactaggtacacacttatctcttcattgtctataggttttgataaaataggtagttgagccaattgtttcttcagctcctggaatgtggtttcttattcttctatccactaaatttttttgttgccatcgagaatattgatgaagggtacacgtttatctatagacttggacacaaatcttcttagtgcaccaatgcatcttgttaggctttgtacttccttgatgcttgtgggcaacttcgtgtccaaaaagccctggatcttatcttagtttgcttctattcccttggcattaactatgaagccaacgaatttgcctgagcctaccccaaaagaacgtttgagggagttgaacttcctgttatagttgtagaggattttttaggattcgccttggtcgtccacatactcactagcctttttggattttaccagcatgtcatcgacatacacctccatgttgcgactgataagatcgtcgtataggaaattgacttaggtgacatctccttgtgagaaagagatagtgggctctccaagctttggatgcttagagcatcattccttgactgctagtatatcgcttttgggctggtaacggagtatctgagcaagcgctccctagctttgctggtcttgcctataatatagggtccagagatgaagacccctaagtgtcctgccagtggaggttttggcagagttgctagtacttggctttgcgcttggcaagtcatagggctgatggatgccttgggactgtctatatatgacttgccctgtctgggcctgtctggccatgcattgctttgggagtttggtaggagagttaagcatgtgcacttctccttgttttcccttagacttcatggcgtaagggaatcattgaatttccctctttttcaattatgttgattagagccattgttgttgcacttgcttcaaccattctcattgttggagaattgacagagattgtctgcattggtcgtcatgttgaatagtgcttgggggtactatggagcactgtgtttgttcgttattgacttgccctcttatctgggcttgtcgaatagcttcttctcactttatgaagccatcagctcgctcaaggaactccttcatgttttttttgatatccttttggtatctttctagatgtcactcaacggtaggatgcctccgattatggtcgtatatcgaccttcttctgtcaagcctttgactttggtggccctgaccatgaaccattgaatgtagtctttcaaaggagtcttgtccatgtttaaatttaacaagatcctccagtcatgaaggtatttatcttgaagtagagaacttaatatataactctcaggagaattcttcccaagaatttaatttttcctagggctagcttaaaataccattgttgggctatttcagctagagttgccggagtgattcggcatcgcacatctctggatacttattggagatctgtttggatctcaaagtatttcaggtgtactaggggatcttcttttcttgtgtacatcttccacaccgacatcttgaacttgggcaagggtaaggcatttatgtatgttgagaatggtgatcctgttgacttgtctagcacaagttcttaatgttttggacaagctaggccatttagcatgtctcgtagttaatcaaactacgcttgcatagaaagatttcttgctgcaatggccttgttgagtggccttccttgattgagctgcagtccaaaattggacagagtctggccgaccttactcgaagagagggtatgttagaggcgggccagccctaggcctggcaactgatcatggttagctagccctag

SEQ ID NO: 114581 - DNA, 3197 bp, Cannabis sativa
  modified_base (1449)..(1461): a, c, t, g, unknown or other
gtgatatttatttagttatgtttctcagagttatatatctcagtgctcaaatagaatgaaagtcgaattcagaatcataccgaggagaaagaagtagaagatttcgcctcaatgtagaataccctggaacctacaggataactcgtgtaattaaaaaaaaaaaaagttaccgatagcagaagagaatttacaaatcgaacattttcttttaagtacatgagtatcagaaaacaagaatcaaacatccattagtcacaaaaaagatgcttcaacatatggcagtactgcaaaaatgaatgtatgtgtatctattatctacactcctttaaccgaaaagaaagataacatcgacaatgtcatgctataacaatatcatttcaaccacgaacatattctacgacagcttaagaatcaattctcagaaaagaaaaaaaaaactgaacatattcgctgagaattaaatggcacgaaaaatcaaatagtgtttgtttacgaaattgttaagatcattgaaaaccaataacacaaacaaatgtcatattaagcgaaagagaaaatcaccgcatacatctgttacggacaaaattcctagcccgcttggcccgaacccttcctcgatcttctctgacaaatccatactcttatcctgatttaaccaaaaagtcataataataaagaagcaggtgcgaacgtaatgaacacaacatatataagatcaaactcaacataacttaattaattttcctcatttatatgtttttctcgggaaccaaacatagaagaaaggaaagaaaaaaaattacctggaggtcagagtatgaaatggtaacggttctggtagtagcagggattgaggtttgagaaggagaagccatattccgacgcgtaacgaggcgggagagagtgaaagagcggtggagttgtgacgttgaccaagaagaagttgcggggaaggaagggagtttcggagttttggttttggaagttttggcttggtatagaagagaggagaataggcttccaggctccacgtgtgaacttcccgggcagagttaagacttggcctcacagaggtgccaaatacaaagtggagggaactcttctccaaattcagcctttctttcttatgacaacactttttggccaataaaacaaaaaacacattaatatataataaaatttaaaatgagggctgtaatatgatttgagtgtaattaaaaataattatataaattttacatatttatctatttatataatttgaagataattctctaatttttatgttctcataaaagatctaattaaaaaaataagaaaattatccgtatattattttttaatttttttttctaaatttagagtttgggtttggatttgaatttatatgaagaatcccgtaaaaatacatataaaaaaaaaaaactgttttaaaatgtaaaaataaannnnnnnnnnnnnaatatatattttaaatattaaatactaccaaatattatttgtctaccatctcatatccaaacaattaattcgtattcaatctcggccactcctaattcatatatggaactatttagttacaaacgcacccttaattttatttccttattcaacttcgtaaatctcgggcatacataatattatcgtcaccactccctagtccctagtacaaccagatagttcatctcgaccgtctattcgttcgttactaggctttaatgggatcaaaagaaatcccactttttctctaatcaatctttattttggttttgaatattaccatttataaacttttatttttgtagagaaagaaacaaaggttttaataccatatactgaaattttattttttttactgtggaacgaaatttttttcaaaaatattatattttttacaaaaaatattatgtaagttttacattgtgtactgtgttaagttttcacagttatttttttagttgtacttttattgttttaatggtttcattttgttgttttacggttattttataaaaagacagtatttttataaaaaaaatccatcttacagtaaaattgtaaacttttgagaaaattcagagaaacaaatatattcaaaacaagtgaaatacaaacagaaagagctcaatgtatctcgccaatttccgattgatcatgtggaaggcctctctttcctgggcctgtgaagcccaaacaaaacatgggcctttgaaacccaaacaaacaaatatattttagctttttgaatattttcatacccaaaaaaaagtgaaaaaatataaaaataccgttaaatagaaattataaaaatttaaatatttttacagtttctatttacaaacagactaattatgtttcatattttttttttgtgttgcaattttgttatttatacttgttttgatattatctttttgttattttcttattgttttcatgatatttttatagaatatcataaaattgtaattaaaaaataaaaacggtagaattgaaaaaaaaaattgtaaaattatatatgaaaaataattatatgactgtaaaattactaattttaccaaaagaaatattttgtaaatatttttctttggttagtgtttcactcttcagctggtaataatgacaatgcaacttgttttgttccttaattatttaggaattttgagacttttacttacatattaaaatggttggatcacatctaatagattttggacccaatccagccaatataaatatttattggatattaaattttgtcatccgatccaattcaattgaattgagttttccgatccgatccgatccgatctaatagatatattggattggatcggttccaaccattgaatgcattgactggttttttattggattggattggatttatccaatctattttagctaccatttaagttaatttaaaaagaaaaatatatatataaacataatttaaaacctaataatccaacatatataataaacattagtttagtccaacctaattctcatgatctcataataaaactattaaaaaataaaatttattcaatacgtattaataattttattagcatttaggaagataagaattaatattttaactctaatattttttttaatctcatgtattaaatatatcaaatcaattaatatatatttttaaataaaatttattaaatatataaaattataaa

SEQ ID NO: 114582 - DNA, 974 bp, Cannabis sativa
agagaaaagaagaattttaaagattgaaaggaaagtttgtttccattctagttgtttggtagagagttccatcgaatttacatgttgtaattttgtgattggcagggtgtgttggacggtaagttcgacgatctttcagaacaagctttctacatggttggaggtatcgaagaggtgatagccaaggccgagaagattgccaaggaaaacgcttaagctcggttcttctttctttttcttttttttttctctcctttgtcttgatagttgcgaaaaatcaataatttgaggagctgctggcgatgatgccgccggtaaaacaggattgattattttttttttgaggacaaaaactctgtaagaggatttacttaccatttctgtttaaaaaaagaagcttaaattgcagcagcagagtgtttttgaaggaaaatggataattgggtccaatgtcctaaccccttcttctcttgtttattttcttattattgggtcctttaataaggggaaagaaaggacatgtaaattttttcttttctcagtacattttgattaaatgcactgataatttagtaccatttcttgtttaatatttttacatttatagttcttgtttcttatgaaaatgttagataatctgaagaagagaaaatcaagtacaaaaatgatttgtggaataatgttataaaagaatatataggattgaaacgcaaaaagattaagagcaaaagtgttatttattttactaaaattttctattacattattttaaattcattgttaaatatcaatctttgttttggaaactatttctttgatttatgatttgtaagtttgttgaaaatagattataaaatccatggcaattagtaacccgaacccaaccgtctgtgcattaattagtttgtaatgatcgtgaggtctagttatcttgtgttatttaatgcattaacacgcttattttcaagaaaaag

SEQ ID NO: 114583 - DNA, 2249 bp, Cannabis sativa
  modified_base (80)..(114): a, c, t, g, unknown or other
ttagtgacaacttgtaactaaatactatgttttaatcacaaataactttttgttgtagctaaaagtcacatttagtcacnnnnnnnnnnnnnnnnnnnnnnnnnnnnnnnnnnnaaagtaacagttttttgtagtgtgtgtacattgtagttacaacaagcattcaacctgcatttaaaaaatttacaataatttatagtgtcgaaaataagggtcaaatatttaattgcacgagtgaaaaaaaaaaagcaagcatgtgtgcaacttaatctttgaactctattttttacatcgtaaattcaatatgttattttgcgccttgagcaaaaataaaaattaggatccctctatttaaaaaagtagaaaataaaaaattaaggctcttaacatccaagttattaagcctaagttttgagctcaaagatatacttaataatttatgtattatttgttattatattactaattatatttgatttggttttttcaaaataggggtctaaacagtggagcctaagacggtcacttcactcgtcttaactttaagattgatcgtgtataaattatttataattttttaaaaatatataatatacttaatattactataatacgtactgacatattaaaaattaaatataattttttaaaattctaaatatataattgtctgtatatatgattgtgtaaacaaataaaatatttaaactttaatttagattattataattattttgaaaactattgagatattcccttaaaaaaaaacctattaatattaactatatattcacactcaagtgaaaatcgaaaatggtacactggtggtcctctttccaaagggaccacttgaaaattatccttcaacatggttgagtctctgcctaattcaaattgtaagttttgtccatttgctccttgtaaagaactgagccctgactgaatggcgtcacacacataattatttacccaatataaagataataatatctgtacacaaattatatataaatttgaatttagaaataatcaaatttgaaattatatttatggcacatatctagttttacaggattagtttttgcttgagtgatttctgttactttgccgattacttttttaagtagttacacatttaaatttatactgaccattattaatgtagacatagacatggaattttataaattatggggttttctgcaccattttgatggttttgatccctttaaatgctttttgtgtcagtttttatagtttatctttaattatttaggataattttatagcatggttcatattaataagagaagtagtaatattaacaactttttaattttgacatattttaaatttttattatattataatttgaattgtttaactattttttttatattatttttttattaaattgtatagtaatagaatttatttattattattttgtaggttgattttgttaaatattattattagaggttattttgtctttcattatcttcttttattttgtgtagatagtttatggaatttttatgatatgttattgtgttggctgtactaattattgttcttataattgtattatcatttgttcacaatcttttgtttgagatttttatttcactaaatatatcctttagttagacaatcaattattctaatttcctattgtgtctaaaaaaacattttatacttatctatcaattacttatttaggtccttaaatatataaactagataactggaaaaaataattagtatccgcaatgtttcttccaaaaacaaaaattttattattactagacgattgtttttttggtttaccaacctccctacgtatattgtgtctcacagcctacgtattggaactttgacctgccagttttgagtgaaggtacgttggctggtatagttttaccgaatacggtaatggcgggaattcgaataatagttagaagaaaaaggattggtgtaattgggtaatatttcatgtatgttgggagaaagaaaagtggattgtaccttctattacatccgttgaatatgcttttacatttgaatctctcttcacatataagacctattgggatagtagagggagaggtaaaagtaaaaaatactgattttatgatatatttgtattaggaagaggtttcattggttacatttttattgtaaccatcatggttatatttttttaagtcattggattactattaaatagttgtaattaatttggaaat

SEQ ID NO: 114584 - DNA, 2371 bp, Cannabis sativa
agaactaaagaaaatggaggacttaccaaagttcacttgctgccccaaagctgtctcaaaaagttgaaggagtctcataacattggaagcttctctttcattagctcggcaataaatgtagctatcacctgcgaataacatatgagatatgatcagagccccatttgctactttacaacctttagggaggccattcctctcaaaacgtttcagcaatgatgaaaagccttcggcataaattaagaaaagttaggaggatagtgggtctccttgacggataccacggttgggatagattaggccgagaaccttaccaccatgagtgacattgtactccactgtgctaattttttttaagattaagtcaataaaatagctagcaaaccccatatgaagcctcatagcacgaatcaagtcccactcaacacgatcatatgctttgcgtagatcaagcttcaaggccatgaaaccttctttgcctttacgtttacgcttcaaataatgcataacctcaaaagcaatcataatattattcgaaataagacggcccagaatacaacctttaatcgattagcaagtactttagagattaccttgtaaagcacattggaaagcgagattgggcgaagatcactcattgtacacggctgctttttcttaggaatcaacaccatatttgtacggttcaaaccagcaggaagagtacatgttgtaaagaaagtcttgacttgattgatgacatcttgcccaactactgaccaatacttttgataaaaacccggagtcataccatctggtccaggcgacttatctggatgcatttgaaacaagtcttttttcacctcttcatcagtaatcgggcaaaggagagactcattttcagcagtagatagggttgaatactcgtagtgacttcattgtaattagaattagaggaagcaaataagttctaaaaataattaactacaagtgcatccagacccgtgtcccaattgacctaattacttgagtcatcttgaaggctttgaatggtattatgcttttttcgagctgtagccttggcgtgaaagaatttactgttttggtcaccctctcgtagccaaagttgtttagatctttggtgccaaaagacttcacgttggttcatgatttcactaagaagtttttgggcatcattgtacttctgtattgactcagaatcacgacccttcttccatttcttgatttctttttttacagctaaaaattctttgcttgaaattaccagtatagtcgcgcccccacacagtaaacttttcaccgcaaattcgaagtctttccaaaatgttgcaatcagaattaagttcccaaacctctttaactacatgaaatcataaaggctcacgcaaccatgtgttttcgaacctgaattgatgagcatggaaaaataattattgaatcgaaggttgaagtagtaaaggacaatgatctgaagctgttatctcgagattagtatgctgagctgaagtgaaataatcattccaacattgacttaccaatgcacgatcaagacaaacctcaatccaatttggggtgccttttctgtgttcccatgtaaatggatatctaatgagctcgaggtcaataagattacagtcgtaaagaacttgattgaatccatcaattaaactctgtggagatttgttgcctccatgtttatctgcctagctagtgacattgttcaggtctccgatgatacaccagggatgagtcgaggactatttcaagttacgaatgagattccacgtttggtgacgatttccccagtttggctctccgtaaaggccagtgagtctctagggaattgagtgtggcacaacaacttgaatgttaataaagttacaagaataatgagtagttgggcgtctacattatttctccaaagcatagcaattcctgcactgtggccccttgcatcaaccgaatgcataccttcaaagcccaatttcacacgaagtctttcaataataccactattgctaattgtttcacaaataaaaagaaagttgggtttcttctggatcacaagatctacaaggaattgaaataccaatgggttcccatgcccacggcaattccagcttaatatactcatggtgaacggtgggcctgcgaactagagcccaccctcaaatcgtttttgagcccaattcaaaattggctctctaaacaataatgccactaccatcttcttccattacttcaattgtaggcccattaatatgttagaattattttaccaggatcttagatttaccaacaagtatgttattaacatcataaatatgaacttctaaaacgatatgaaacataaacacatataaagtataag

SEQ ID NO: 114585 - DNA, 3301 bp, Cannabis sativa
  modified_base (3241)..(3243): a, c, t, g, unknown or other
tttcgtgttagatctacttatatatagctagcttgagacaattgctttcacatattaaaaaacattacataattaaagctacattcttttatatatgatcattaaaagaacataaattataagacatgtagataatcagagtgctatttatacaaaataaacattaatttaattataactcatgttatatatgtggtgtggatatatagcatataatatgtattttactaatatttaaaaaatttcaaataattttatggcataaaaaatatatagctcaaataatcagttgaacatgtacctactgtttaaattttataaatgcattagtagagttatttttgtaattttcaaaaattggtagaattaatatctatactgttattgaaacaaaatttggttatataataaagtctccacatatccaaaataacactatatgttaaaaaggagcatataattaagtaaagaccccatataataattaaaaaaatcatttaaaatagacatgaatattaatttgtattcatggcaaaacttttttttcttcttgtttttgtttttgggtaatgagacactattaatgagctataaattaattctgagtacaaaatgtacattattgatgagaaatgctaaaaatattggtactttaacattctccttaacgtcatactgctatttgtgtaattaaatattttatataatttaatataaaaaatttaagaagacgtttcatttgagataatgaaatgtactagaatggaaatagaatagaataaaaatgaaataattaacttttattttatttttttgttttgatttcattttaaaatattaaggaatcaattcatattctagttatgattttattcgttccaatcaaatgcttttcatgtatttgtcacgtgagtttagttagagaaaatagaatatattagggagggagtatatttcggagagaatatgaaactcaagtgttcgagggaattaatattactatcattttaatttaaatatgatgatattctcattctcatcaagtataaacttaatactaaacgactaatctcgctaacccatcgcattacgattagagaagctgttagagattaatgctcattatttgatagatagttacacatattatacattaattaatgtgtgagatcttcactagatctggtcatataatgttgatggctatgtatgagaatttatggtttttaatataaatatatatatatagcttcactacacatcactattaattatctcattatgagtactatagtatcaacttagtccttttgtctttggcggtgctagctagtgccatgtactttatttttattttaaaaattaaataaataaactaattaattatagataggaatatatataattgaaataaggagaacttggttttaattaaatgcatcaaaaattaatatatattgttactatcacgttcatcaatgatcttaataaatttgattgcagactttcctctacttttatttgttgctttttaattttgaattaattagttttttttattatatagtgatgaatatttattgttctatttactataaaacataaattttttacacactacaatgtgtattcaattttaatcctatataattttatgtgattgatgagaactatatatataatttgtatggttcaaattaattacacattactctgtataaaaagtccaatgtaagtatatcacgatcattattctgtagtattatataattattttaagtgattgagaaccatatgtatatattatttgtacggttgaaattaattatatattattctataaaaaaatatattattctgcatatattatataattctatggatcattaaagatttataaattttatataggaataattgtgatataaacacttaaaattttatatttataatcggcataaatttaataattttttaacatcagtttcatcaacagaaattcaattttgaatttattaaaagaaaattcaaaaataattcatagtgcatgcatatttccaactagacttaatgattaagtatttagacgttacttgtgttttgtttaagacactaagaaaatctgtaccgacaaagctaaacaaaaattatacttttactagcattgtgtatcatttacactgctaaaaagattatatcacttataaattcaaaactttaaatgctttatactatcatttaccgtgatatatatcaaccatgtaaatgcaatttctagaatattctaattgtatttgttcaattcacaattaataagtagctaatacactatgtttatcctaaattttgtccacctgacgtgacatgtccacataattcaaaaacatagtataggcagagtataatcctatcagtagcaaaacaaagtctccatgcaagacataataaaaccgtcaagcagtaaccgaatggagtgaagcgaaactaacatcctttgtcggccagggtgagaatatagaccggccaagatctgggcacaagctggccgcccaaaaagtgactttcagaccgcgtgagcttctattcgaccaaagaaacttgacctctacaaggaaatattgtacaaaattgtctcccacttgcaaaaggatggcgtccacatcctaaggctggcctcctctttgtaaggctaaggactatgacctgccaatccctggcagaagcatggacgaccaggattagcctgggaggagcatggccggccaagattgacctggaaggaccatggccggccagaattgatttggcagaactatggcgggccaaacctcccctgtaggtctatgggcggccagggttaacctggcaggactctatgtgcaacttaaaacgtggacaacaagctacttgtgaattggacccttaacaacctaacaaaccgatagaaaatatctactttcaagggataatttagtcttttgtatttaatcaatttaatatgtaaatatctaagaattttattgtaaattaggattttaggcttcctatatgaaggccttaactctaacctagaaaacttaagtcactaagcctaattctagcctccaaaccactctaagtctgaaattctagtctcttctctctctttctcttgtacacgcccaaatggctcctctcactttatctctcatacgcctctaagtctcactacaaaaattactacttttagtgacaacttttnnntcacaacataatttttttgtaactaaatgtgacttttagtcacaacaaaacgttactt

SEQ ID NO: 114586 - DNA, 3899 bp, Cannabis sativa
tgcaatgctttttccatgtattagtatctcttttctttacaccatgtctatgatgtgtgtataagggagccaaatcagaaattgagtcagaagatctatgtagtttgacgaccgtaaataaactaccatgaatttctttgcaaaagaaaaacaacattctacttgtacacttatctctccaacctaaattaaaactaaaattacaattgatcaaacatagattctcagcgaggggatatggtaggaacgacaccactaacaagatcacttcctgatatagatgcagaaacaaatgagttcatcgtgaccaaggatgaaggtggtgttgcagaagagccagaataggtggaagttgattctgaaacagttgtgtctgattctggcattatctgaagtatgtcttctagctccctcaccacttccaacattgatggcctcttctctgtctggtcatggcaacagctgagtgccaaagctgcaaacctttcgatacatgcagatggataggagcccatgttggagtctataacagagaacatcgtcccagactgatgcgctgtcaacacctgaaacaagattacaagttttgcataatcttagatgctaaatctactagttgcatgaatatgattctatgctatatgtcattgaataaaaggaatcagattcagtttaagaatgttcaaatggaatgaaatgaaatgtttggaaactattttcggagacatcgttaagtcatgcttaaagcgtacaggtccacacaaacttctatatccactgcctattatatagaagtgtgtttgatctctcattgtaactcttcactgaaagtagttcaatccagatcttagtaaaaccaatttattatcaagttaactaatatgtataatgagttggaaggaagtcataaaattcttaaaatcataatgtacagagacatatcataactaggtacagagcaagaagagtttattggaggagaaatacctcgcggacaatgttttttccatgcgaaattggatgcatgcctgtcaagagctccagaaatacaactcctagactgtagacatcacttttgtctgtcaacttatgagtcaaaaaatattccggatccaggtagccctgcaaacatgatcgcattctaaatgaagcacagaatagatactactatgttaacggtaactgaaaagaacaaactaaaatgaaaaacatgttgcatcaaagctttgataatgataatattacaactatattcaaatcatagtgcgctcgaaagggatgattttagcttatgaatggtccaaaatgtctcaaatttcatcccctgtcaactggctcactattattggaatattgggccaaagaataacccaggaaaggtttaagctggtttaagttcataactcactgtcacttttcagtttagtaattttcaattgcgccatgatccaacctttcacccagcttcaatatactacaaaatagttttttttttctctcacaaggttgaagttctaaaacaaattcattctacaaactaagctaacttgcaccaatatcatgtggaatggctgaatgctgcaagaggctacagaattttggatatatataacttctggtttcattgtgggacaagtaacacgggtattttcttgttcacaaaaccctttactacgccagccaggtttcaaccacaaaacttattttgagtttggcatgcactcacagaatcagcacttcatgttaaggtaaaatgagttaaaagtaagttataaaatgcataaaaaaccatattttaaatatctctctacacatatatattgagaagtagacatactggtgttcccttcacaactgtagatacatattcaggaactgtcccttcggaatccagcattggtgcgagtcgcgacagtccaaaatctgctactttagcagtgaagttagaatccagaagtatgttgcttgctttaatatcccggtggaatataggagggtctgcttcagtatgtaggtaaagaattcctttagctgaacccattgctactcgtaatctcatactgaaattcaaggttccctttgccttagctgtcataacatggtcacaacatcattgtactatattaatatcttgggttctttataacagaaaaagaattgcacaaatgcacaatgagtaactgcacattttgaatattcaccatgagaagggaaagaaaaacattagaaaccaaaagaagtcagaacaaataaagatgttctcaatttaagtacttaaaccattgtatgattgagattcaaactattgtttcaaagtaaaatcaaacaatagatcctttcccggcattttatgacatttaacataacttatttcagattttgcataagggtagtcaaataaaatccaaggagtagattagaaacatgagaatttatgaaccatatgatgaagattatcataccagaaagccagtccctcaatgttccattaggcatgaactcataaactagcatctgcacatgtatgaagaacataaattgatgtaatttatagattcagcaatcctggtaagttttttggggactgaaactatgaaccttaagttccatagaagtaattttaacatacataataaaacttcattctttaatgatatcaattccctaacaatgaatgataaaaaatgatggtatggtattaagcagttgattttttttttattcgtttacaattcttatttggatcaaacagtgcaatgccagtgaaaatgtatatcattaatggatttaaatcataacaatttccgagagaagatttcctattttgtattgaattcacttatcacttttatggtgctagaattgatagcagatacacagcaccaaacaacttgacaataaccaaaaccatgatcaccctccccaaataaattaaattagattactagttgaaacaaacaggaaatctattaatattattcaactgaaaagattactagttgaagattgggcaaaataattataaaaaatacctgctcatcttcttcatcacaatacccaagtaatgaaaccaggttccggtgatgtaacctcgataacagttctatctctgtcaaaaattctttctggccttgcaatgatccttcctctgcacgttttatggccacaaatgtgttgtctgctaaaactcctttataaacctttccataacctcctcgaccaacttgagctgagaaattaaaattctcggtagctgatgccatttctttaaaagtgaatggctttacaccatcaatcttcatggaagccatcgatgctgtaaaattggattcatgtcattttagttgatgttaaaagttcttagagtgccatcataatatcatacttcatggtataaacagaacttacacgaacgtcttcttaatggtgcttgatgatatttggcatgtctcatggtgagaaatgagactattgcagaaatggtaactatacaagcaatagccccaagtataatcgctgccaaaatgcctttactaattccagcactatgtttgctaataaacaactctgcatacataaaaatattcaataaaaaaccattgattatatagtggaaaattaaatacatcagccaaattatgtactaatctaaaaaaatgtattatgttacaaatttttaattttattaatgctacaaagctcaatctgcataaccatgtctccatggttgctagtgtgatcaactcaggttcaaggcatttacatagctggactcaattggcaggtccttatgcatgtgtttttcgttcaggaatatgttatagtcataaaaagaacatattatatatctatatatatatacatatatatcacacaaaaataaatagagaaacaataac

SEQ ID NO: 114587 - DNA, 1943 bp, Cannabis sativa
tttgtccaaaatctaatatttttctaaaagctccttcattttaagctcaaattttaatagtggacttgtagtagtggcccaataattggaggagaaatttattagggtttcgcattagttggtctttgcatctgccgctctccatttcttacttctttcatatataaatacacataagaataactcacaaaaatcatcaatcgccttctcttggatctcttcaacttctatcctctctattttcttgattttagttttgttatttttcattattgtgaaagtgaaattctattttaagtttttgtatttcgatcggctatgatgagagattgagaatgtcatgcaccactctgatttaatatgtgctgagactctcctactacccattattttctgatgcctttctataaatattttgttgatttgtttttgaaaattgattattgaagaagaatagagtaatcaagtgatggggtctatattcaccttaccatgatgcggaccgtacagctgtttcagcttttggtgataaaattttggtttctgatgattctcttctctttaatttttcattatattattttgttttggctaattagtaattttgtacttaattttgacgtcccccttaaattttttttagaggaatttttaacggcaaaaaaaaattcagggccaaaaaattcagggttacgatttagtacatgttcaggagaaagccttttgtttttgttttttaattataattaaaaattgtttgaagtttcttttcctatcgaaacaaaatagtttaactttggctttaaacgattggaatggttttttacaagattaatattatattttcaatttaagctaattttgattcatgttcttactatttggtggatcacctgtcatgacctaaattagtgtcttttttttgtgccctagaaatttaataagaaatagttttttcttttattattgttgacttatttctaatggtgaaggtttggctatggaactcttttgagtttaggttaaaatctgtgatagttaactaaagtgggctttggtcaaagcccaattatacaatcctaagccaagtagcccaacagtaatgaagaatatgtgtattcattggtaataacacattatgtcgttagagaaatgataaactagaattacaagtattaattggtaatatttgataatttagaattacaagcatattgtccaactttgaaagtttccacttgtgtcttttgattagttttgggagctttcttctttcccggtctttatgttaatcttagaaaaaagctagctagtcaacacaatatgttacaagtaggtttcaccctcaacaaacaactaggtacaatagatacaacaaacatagacaatagctttgaattatcaataatttaacagaaataagtacttggaaacgccacacctaaagtcaaaaacattatagtaaacatttggataacaccaacacgtaaaattacataacctacttattatcaacttgtgtatagacatacccaaacaatttatatacaacaaactatattgaccaatttatttcaaaaaaaaaaaaaaaactatattgaccaaaaccttatgatttcgtatataatccaatctaaacttcaaagtctaatctaatcattggcttgtttattggatacctaatttttaatattaacttataaaaattgaagagaaatatttaaaaactaaatattaccatttatttaatttaatatattagttaaaatatgttccaagaggaggtaaattgaaaatttaaattaattttagaattttaaaaaattcaaaggcaatttatacaaacattcaagtttaatgtaataacaaaaataaacaaatagcaaacttaaaatgtaaagagcttaaggatagaaattgcaatgggaaatttgattttttat

SEQ ID NO: 114588 - DNA, 2618 bp, Cannabis sativa
  modified_base (1582)..(1591): a, c, t, g, unknown or other
  modified_base (1686)..(1689): a, c, t, g, unknown or other
  modified_base (1777)..(1781): a, c, t, g, unknown or other
cggggttgcgaagcaacacccgccatttcttcgggggtaaagatggaggggacaacagaatcatcagtctgagcaactcgagcacgtttgagcatgctcctgacagaatttcccacttgagcgttttgcatggtgaaaggcctcttggttccaatagtggtagtggtggtggcaacatttggttcctggatagtaatgccactgttctggggcatgggagtagtggaggttggtggagtatgggcatcatgaagggctatcccttttcttttgtcagtgtgagtgatcacagaagtgaccataataagggagggtgagagagtggaaaaagccatattcaatccagcttgggggtatgcactttagtaggagcagcggttatatcatgattgagggttgggacagtgaagtcagatgcaaggttcaaaaattgatcaactgcctgctgaaggccttggtcagagtcattgccatgggactgatattcatcaattggggtggaattagagagatcaaatgggttctttttaaactgggatttgacagggacacggaaggtttccttataaccaagttcaggggggactgcaaagttatcacatctcatgcggtatctcccacatttgttataagtgtggtcgagcatgccacagaattaacaaaagttttgcagtccctcatatttaaaacttagccatttagttttggcgatcttacaaaaacggatgttcataccacgcctaagaggcttggtgacatataggaggattttgatcctaaggtaaagaccgaaactttcaagtaacgaaagggggtaagtttctataaggtccccaagctcatcagcgatgaactgggcaagttggggggatttttggccaaaaggaatgtagtgagcttggatccagaaagggacgaaatagaattggtctggtgtgagggtgtcaaggccttctggattggcgaagatcatgaggcttttgtcgaagtgccaaggttggtcttccagaacccttcaacggtctccttcacactagaaggtggctaagaacaatcctaagtgatactcagagatagtggttgggaaacggagagtccatgcctcagtcatggctttctcgatccagttaggcttaggatatttagaagtgagaattttgataacaagacagtgggaatcggaggatatttcagagttaagggaaacatgatcgaagacatggatgaggttttcttctttagtgagtgagagggtggtaggtgggttctgggacgaggaagacgccataggagaaggttgagaacttaggtaagtgaaagctagaaaaggtgtacatgcagaatcatcaacccagatctttaaatagtaaaaagtaaagtgaagagacaatatctggagatgaagagttttgttggagagagaaaagtcagtgcctgtctgctcagatcccgcctgaacttgattttcctttaaaatatatgagacaaatagagcaaaacaaaattctaataaattctatatattatatgtattttatgggtaatttctctcatatgatactacaaaaaatcttacttttannnnnnnnnnaacttgtgactaaaagtaaattttttttgactaattataaatcagcatttctatattgtgattaaaatagtcgtgactaaaggtattagtcacannnnttacaatttgttgtgactaaatgaatttttagtcacaatacttgttgtgactataactaaattagtgacaacttgtatttaaatactnnnnnttagtcacaagtaacattttttttgtgactaaatgtgacttttgtcacaaaaagattacattgtgactaaaaaattatcacaaaaaataataattttttgtagtgtgaaagttacctctcagttgtgctaaaaatctccacccatgctgtaacaaaaaacaaaaaacatatgcaacaatctagaaccacaaataattgagtggtgcagaagactcgattggactataagaataattttaccaaattttctcaacaaaaataatgacttcttccaaaaataaaataacaaataaaatttctcgtttttgtgcaatttacgagtatctatctttacatcatctgcagtacataaaagtaaaaaagagattttttttttttgaaaaaaaaaatgaataagtagattttcaaatatatttgtggtcatcaagagaatgaatgaatatatatggaagagccaatataatatatgcttatgggtttgtcacttctatagatttagctttaggctaccatatttatcagaataatgtactatatattcagaattattaattttacacataaaatatatacagcattgtctttgattttgggtataaccctatacctaaaaatataatatacaaatagaacaaattaataacaaccaactatccttaataaaaaccaacttggcaactgtaattaattaaaaaataagtgtcttattttcttttaatttttttttgggggggtgggaaaccaaagcagacttctgagttttatggcccacagatttgagatcatgaatttagacagtaatatataaagggaaatttcaatttttgaccctaataa

SEQ ID NO: 114589 - DNA, 3111 bp, Cannabis sativa
ttgttgtttttatgtttttgtgaaataatccctttaattaatcctttggaagaaccacattagctatccaccaccaaaatacaaaactttaatctttcacctaaacattataacatccatttgatcaatatatcatatatacaaaaataaaagcataaaagctactagtactactaacaaaaaagaaaaaaaaaattaagagtgccataaaaattgaccaattattattgttttaatacattatttgaaacattcaattttaatataaatataaaaatatatatattatattaaatttaattaaatcatatattttcatacgaagttcttgtataattattacctataatattcttgtatttaatttatcttattcatggttaagacgtacgtcttatgtctttgtttatgttttttagttagtcatattaggtaattattctcaatggttctaaacagtcgagacataggcataccagattgtttttaactgacgcatttttcattctatttttgtgacggtgaaatattcatcgattggtggcccgacgacaatacctttacccgattgtttgaaaaagtccaaacataaactttttttagtagtgaattagtatcacttagtctcataagctttgttcaagactaactaacatcgaccttaagctcatgagacaaaatattttggccctttaagtagatacaattcacctataggacatcttgtttcaaagttataaatggcccaaaaatactttgccattgttgtattgttccatttagctcattcccaaaatccaagtccaccatattttgctcaacttgcaaacaaactcccaagatgcgagatagatgcattttactagagttgtctttttctccgaacaagaagttacaacaaattctatcattatgtctaaaaaaaattagggggagaaggaacatactcatccgataaatccttatcccgattagtaccgatttgattaacaaagttcttcctacaaaagtcaagtgaggactttcccatgtatgaagtttcatcctcaatttcttcaatattattttacaattttgctattctccatttcgtaggccttagattcaccccaaaggtatttcattaggaaggagccttctcaaaatgacaaaatatcaaggatggcatgcttttctagactctacacacaccgcaaagtgtattgtacggactttttcttatttgcaataaggtcagattagctattgatcgaagtccttaaaagcatcaaagatgcattgaacaaaagctacattacctttgcaaaaaagaattaagtcatcctcaaagcataagcttaccaacttgagacttttgcacatgggatgaaatctaagttccctccttctaatatggtgtccaagcagccgtgtatggttctccatcacaagcacaaataatagggatgaaattggatctccctatctcaaacctttggtccttttgaaatgtctatgtacttcaccattaaaaactagagtaagaagcgccacctacacaaatcatgatccatttaacaaagagggaaggtaaccggtaaaccttgagtaacctctccaaaaagtcccagtctatagtatcataggccctactcaagtcaattttcatcaaacattttggtgaaagagttttcctttggtaaccccttaatagatcctgtaaaattaaaacattatgtgccaaagatctatttgtataaaacctccttgattatcacgtaccactaagggtaaactttagccaatcttacacaaatcatcttcaagatgcatttatatattgtattacaacaagcaattcgcttataatcgatagcttagaagtttttccaacttatatgaatgagcatgagtaaggtcctgtttaattgttcaggaataaaacttttgttgaagaaatataacaccgcagccactatctccgatcccaattccttccccgtgactttaaaaatttttcccccaaacccatcagatcctaggctctttaattctatccttgaaaaacagctgcaattaattcaattaaataatcatatccttgaaaaacagctgcaattaatactattattttattgcctttaacttttgtcactaggatagctccaattcccactttattctgattaaacaagtctcggattttctattaattattccttttattgaatcctttaatgttcctacaaagaagattgcaattctctttttaaagtagaagaatcttgcaacacactaaatgagctcctcttctgctttgctaccctctgttaaatgcgaccacttttcttttcaggaatttcccatagctcatcattatccttctcagccattaatgtatcaagtttttcaatctcccctctatgacaagaaccacatcttgagagggagctacttccttattgataggagtaatagccactaggtatttttcaaatgcttgatcagttgtgacaataggggcttctactaccttagccaccttttctttttccacatttgaagcagtcttcgactgccatttttgtccatcccgacataggtctcctctatacccatagcctccatatttggagtattttgtaggtaaccattcaaaggcaattggtattgtatctaatagaccccattcattttcaaaactaataaaaagggtaattcatctttgatttcaatatccactaatactatagaaaatcggacttgagacccctccttcatgatatgttctaccattataagagttccaattgtactcacaagtgaactgagacaattagttccctagtattgaagacccaacccatgtagcttaatccatgccaataataattttactaatttcacagagtcaatatctatagtccaagggcgtattatcaccggtttattatcaaaaagaaccactctaacttttagaaccaagtgactttagaaccaagtgacgggtagcctcatcactagaaaataacaaaaaaactgtatgaaattaacagagaaataacatccaaacaacgacaaaaaaataacatacaaataataaaaactcaataaattaacaagagtataaca

SEQ ID NO: 114590 - DNA, 4819 bp, Cannabis sativa
tttcaaaaatttacagggataatgctgtaagcataacgaacactaccgtgaaaaaaaaaattaaaaatattctagtatgtatttttgagcatgaaggttgactaagaaattgtaatgggaagttgacggtagccctcttctaaatcatatctactatgtatgtactttgaagaaactgttatgtatgaagaaaaaaaatagccaacaaaacatagaagctgaaaatcaactgcactactaatacttcaaaactgtacaataaccaaagaccactcagtcaaactccacaagtcccagaattggtaaaatcttgttttatattgatgttgcctaaggaaaaacaaacaaacaaaaaatcaagtttgatttgaggactgctttattagtggttgtgaagtctttccccattcttcaggtgggctcttaacttccattaacaatgccacaacttccttcatagttggtctttctgtaggagaagagttgacacaaaacatagcaatgcctagtgtttgaagcatctcttgcaccatttgatctggtagaccttggagctttgtttctagaatcgacactgctggttcgaagcttcccatcttcttcttcacccattcgacgatgtgtagcccgtctcctaactgagatggagactcaacagcacttctcccacttagtatctctaacaacacaactccatagctgtacacatcactcttctctgttatgttcattgtgtatccatactctgaaattgttaattaaccaatattgtcaatacaatgaagattatatattatgaaaagttaagttataacaataaaatagaataaagaattttgataaacctggagcaatgtagccataagagccagctactcttgacatagcatggtgatatgtaggtgaattcatcagttttgcaagaccgaaatcagccaaataagcttcaaactttgaatccaatagtatgttattgcacttaacatctctatgaagaattgcagggacacaatcatggtgaagataggctaaaccttgagctgatccaactgcaatcttgtacctagtttcccaatcaagattcctgttttcttgcagcagctgttgcaggttaccatttgagatgtagttgtagagaagaagcttgacacttctattcgaacaatagccaacgagtttcacaatgtttcggtgtctaatgtgtccaagaatctgaatttcagctgcaaatgaatctattggttcttcctcttgctttgtcttccacagcttcttaactgcaattaactcaccactaggcatatctgctctgtagactactcctgaacaacctttaccaattatgttttcttctttcaagcaatccaagatgttgtcaatggtgaagttgagcttttgaaatgggatgaaagtccatggataagagaaatcttcagctcctgatgatgttgcatagggtcctaaagatttctcaaccatatacttgtttctagtaatcagaatccatgaagcaagaactgctatggttactgaagccaaaatcactgagattatagcaatagttttggcagatttcaatccagttcgacgcatcatacttgaagagcaagtaatcccatcagtggactcacaaagcttagagttttgaagatatgaattgacagatatagttctgaagaatggtgtaactgggattggacctgaaaaattgttgtaagagatattaagagaagtcaaactagttagagaacccaatacctcaattttcccattaagcatattatgggaaagatcaagggattgtaactgagtcaaactggctaacttctctggtatctctcctgtaaacccatttgaactcaagtccaaactgattgtcaagcttgtcacaaaaccaagttcaggtggaattggaccagataggctattgtagctcaaatcaagtagagttagcttctgcaagttgcgaatagatttcggtattggacctgtgagtaaattgttgttgagaatcaacttgttcaagtagctgaagttcccaaaactcccaggaatgttgccagtgaagctgtttttactgagatcaagaagctctaaattgacaagctcaccaagctctgatggaatttctccacttatgtagttgttgtgcacatctaatagttcaagaacagtgatgttggcaagctcagaaggaaggcctccagagaaatgattcatgtacaaatcaaggaaaacaagattctgcaattgaccaatctccctaggaatttgaccagcaagctggttttctccaagccttaacctcactaaagattgacactttgcaacacttttaggtaatccacctgttaatgaatttcccagtagtagaagcttgctcagcttcttcaaactgaaaatctcttctgggattgacccagtaagcttgttccttgaaagatcaagtgcatagagttcagtgcagtttccaaaggagggtggtatagttccagatattgaattaccccacatgaagaaactttgcaataatttaagctcaccaacctgccatggaattgtacctgataattgattcttatcaagctgaagagtagtgaggctagaacagttgctcagctgccatgggattcttccactgagagaattgtctgaaagatgaagctgttccagaacaagtagcttccccaagtcaccaggaatttctccagaaagatcattagcagatatatccaaaataacaagtgaggaacagttggaaatctcagctgggattgctccagataaggcattaccccaaagaagcaagctagtaagcttttgcaacttaccaagttgaggagggattgaaccagtgagcttgttcatgtgcaagtacagattcctaagctcagaacacaacccaagttcaggtggtactgaaccaaatatctcagtatcataaagagccaaagtttggagatttatcaagttcccaaatgaaggtggtatcacaccagaaagtccagtggcagcagcaccaaatgtagtgagattagtgagcattcctaactgtgatggaatctctcctgttagatatggattcccaccaatccttaactgttgaagagaaaccaaagaaccaagttgtgatggtatggaaccatttataacattatcttggatacatagaatttgtagagaagtaagattagcaagctgttgaggtattttaccagacaacctgttggagttcaagaaaaggaattggagagaagaaagtgctccaagctctggaggaatggagccagagagagagtttgatgagaggtcaaggaggcgaagataagtgagtttaccaaatgaaggtgggatagtaccagagacattggtggatgaaaggtttagaagctgaagagaagagagagaagagagctgaggtggtaaagatgaaaggttaaggaaaacatttggtaaagatagagaaatgactctgttctgtggagaacaagtgattccctgccatgaacaaggagtttggcttgttgggttccatgaagacaacacagaagaggactctttagaagaagggtcagcagcagaaagaagggacagaagagcttctccatcaggggacaaaccgttgactaaactcctagtcatgtttagataaaacaccaccaagaatgaaaagaaaagatgagtgtttttttccatttttgagttctgggaaagaaaaaaaaaatgacttcttgggttgagagggtgaagattaagaaatggggtttgaagaaaaaatgaaggtgcttcttgttctagtgagcttgatggaaaatggtaatggtgatgaaaaaagaaaaagtccactctaaggagacaacatgcatgtgaaaggacgctcaatagttatggggaatgcttaaactttacatcaaggtgtcaaacaatgcatgtgagccaaaaacaacacaataaaaataccagattttctcctcttttttgttgctttctccaaagtttcttcagagtaaaatacacaaacagttgttgaacaaactcaaaatcattactattttcagactagttaccagaaaaacaggacttcccttcttctggggtgagagtgagattaaaaagaaccaagctttgctactcaaacaatgaggtgttcatataaaggaagagtcttttgttgtttagtccaacaatggtggacatgggtgttaatggatggatatttagaggtcagatagtgatggcagagtttggaaaattgaatgtgaaaatgggagaagaaagaagaggcaaaagagaattcttttgttttgaaaatgaggttctttccttcatttgttgtaataaatattgttttaagatatcaagactagctttgaaaaaaagtctcatttttcactatttttataatccaaaaacatattaaaataaagaagaagccatatattgtctattatattataaattaccgaccgaattgactgaaattaattagagttaccatatataagtgtagttaaattttggtgtgatttgtggacttgattggtgttataattagaatgaatagaatgacaaatttaggaaaataacacataaattagtcaaaacttatttgaaataaatttttactatataaagaaagagaactatccattttaatatataaatatttaaattaaaaaaatatatattcacaaactacataaaggacttaaccacttgagcaactctcaagtggtcataagtggttgtgtgtcttgaaggtcctgggttcgagtctcagataaaatatggctataatatataaacgcttaaattaaaa

SEQ ID NO: 114591 - DNA, 1249 bp, Cannabis sativa
tctaagaccaaataaggcgagaatcaatatgcctttgtttatgaaaatagttgaacaaaatagatatagccataaggctcggataaagcatgagaaattatattatagagtagagcaggcaattctgatagtaaaaacattcataattgctaagtcttgataacaagttctaatctaatatcatcattaatacaatttgttctaatcttgaagggtcaagagtattttaattgtatataaacaaaaattaaaaataaaataaaaaatacgtattgtgtaaaagttttataattttatttttattataaataaacaaaataagtatgaatagatagaaatgatagaaaatagtaactttatgaaaattaagtgactaagcagaagtaaattatgttattaattattaggatgaaccactatatataaactttgtttctatattttcttctcatatggttaatatatgtgcaatcacattacttatttacagtcttcatatatgagttaacgagtgaacaataattagtcatctccaatatcaagtcataccatataccccacaaggcttagaatataaggtttcatcaattttttatactaatactattatgtatagagtattgctattaggcactattggtgcctagctagcaagtactttcttgacatgtcgtattgcgattgttaacgatattaaataatatgagatctgatatttaattgaatcaataacgaaacgtaaaaggatgctagacaccacttgtatcctttagtatttctgttgtgtataatattatgtagaatttggtttggttatgattggcgtatgacaacgtgtatatatatggtcgaatccatttaccaaagtaataactttcaccgattacataaactgtcgaatccattatttatttatttattgcatatggtaatatatactattttttttgtcagaagtaaaaataaaatatatataactatttagttttagttggtcgcctcacgacaagtcacgggcacatttttcttgcgaaagaatattgaagtggtttaactactcgagtagtcaaactcaaacataataataactatttaaatgtatttgttagaaagttgaaaggaaatatatagtgatgagtagtgttattttataattatttattttttttattaatagtattaaatactttctataaatagttttttacgataatattttttaaaaattatttttttaaattatatagaa

SEQ ID NO: 114592 - DNA, 3930 bp, Cannabis sativa
taaggtagttggtaaataggttagagggtaaaggttcaaaccccactaaatacactttatattttctttttaaatttatttacacccccctcaatttaaattttgggtccgccactggatgtgcgagtagaagtatcaaatatcaaaggcctataatctgatcaaaaatgaaggtaataaggtgcaatgggcctcggtagtatggagtaggatgaacatgccttgacatagtttcctcttgtggctagcagtacaagacaaactacgaacaagagaaagactatgtaaactaaatctgattgcagaggattgctgtgtgttgtgcagggttggtaaagagacacaaaatcatgttttttttttctgctgcaatattgcagcagcctgtctacagtagattaaattgtggctgaaatggagggttgtcacatgctctcttcaacggcttgtgagatggcttcaaaggaacaaggtgaacaactttaagagcagggtttaaattgctgcaattgcagccttggcttacaatatatggcaagtacaaaacagagtattatgggaaggagaaagtgtggaaacaagtcaaatagtgaccaaaataaagtcagacattttgtatagaatcaagagtgtatggcctaagaaaattagtgtcaagaatagaatatggtttgataatttgtaaaaaagagacaaatatatacttggtgttgtatagattatttttcaagtctcaattgagatgctgttaagttgtatttggttttttggagtaatgataaccttgttgattcataaaaaaaaaaaaagtgcttaataatagaaacactcttttaaaaatatcatacttaattaattacttaattaactacctgtaatgatcattttaacttataattaatagccaaagacattgcgtttgtcatgtagcttttgcacttaattaattattataatgtggaaaatataatcttatatgataaatacttattttatacctatatatgatagtgacaaaattaaactgatatatatttatactaggtgaatattacgtgtcaaagccatgtaaatgttagttttatttgaggttttttttttttttttttcaattttagtaactaagtggtataattatttaaaccattagttttataaaagtacaatattgtatttaaaagacaaacttgattgacccatcatcatcaaataaaattacccattagaaccaaatcattacattgttacctttagcacttgctgctccacggaacgcccataagttgcagctcttccacccattaagcaagataccgcataagcatctttgtactctctgttttactcgctccactttcttcacttaccaaaattgattggctgactctctcattaatcatcaatctgaattgtttattaactagcaaggacagcaaaaaattaagccactctaacaagtaaaatgaaacagacaacaacatagaaatacacatatgcataatctgcaatggcaaaaggatgtgggcttagctcaccaaaagcagcccttttatattgttatgcatcatgtgattatcatataaatgaggtagtcttctgaaagggttagcagctgtataggtctgcaaacaccattacatagtttcagatagaaaacgacatgcaattttagataagaaagtaaatcatgtcacctacataaaataataatataatgaacatgaattcacacacaattaaggcggtaaaaggacatatatttcattcatgtcatatgctaccctaaacctttaaacgaagaatatgcccaccatattttgaagccccaattcgcaacatcctaagaacagcacatctacacatatataacctatcaaattttttcctcataaatatagttccaatctgtgagcatcacagttccttcatttatacagtttgggagatatgcatgtgcgagatcaggtgcttggatgacgtctgagcatcatagtgctttccttcatttataattttcatttatatagttctagactgtataaaagaggttaataaatataattatataaacaaaatggaaagaaggttgaggaagtgtactgagggagcagcgatggaagaggaatttatattctccaaattagttgagttcatcgtggaattgcaattaggatattagggattttacttcagagagtcaagatcgggagatttgttatttagtgatatttttatataattaaattaattttttatatataaaatatttaaataaattttatttttaaatacatataataatattataaaaagaatattctgttaaagttaacgtagaaatcaaaaacttcgttaaaccaagaattgccgttaaataactacttttaatatatataaagatatataagggttaccctaattttatttcaaccttattcttgatttatgcattcaaaaatactaatatatatatatatattaatttcttttcaatataaatgtgtttgttagagttaaaatattaaggctaattagcaatttttccccccgaattttggcatataccaaattatgccccttgaattttttttttaccgttaaaaattctccctgaactgttgagattgttaaatttaaggagtacttttgcctaatttcattcaattttactgttttagtgattgtttatgtactaaatcatgctctccagactttcatatataccaaattatgctcctcaaactttgatatgtactaaatcatgcctcctgaactttcatccatgttagaatttttttactaaaattagacgaaagtccttaaatttaatattcttaatagttcagggagaatttttaacggctaaaaaagttcagggggcatgatttagtatacatcaaagttcggtgggaaaaattactaattagtcaaatattaaatttaaattttttttaatgtttctcaatggtttacattatccatttaatagagttttagatattcttatttactaggttttttcaaaaaatattaaatttatttttgacactataaattatttagaatttttaaaaaatttacaaaaataatattgtataaataacgaaatatcaccatgaaaaaaaaaatagtgaaaaaatactactccaacatatactttgggggtgaaggctgaaaaaaattataatagaagattgtaagtagtactattattactgattatatttgataattttgatggagttcttccacgtacagaacaatttatttgaatgttttgaaaactactagtagaatgtaccatgtatacaatattatagaagaaaaattacttatgaaataagatcaaaatgctcccatcacaaatagcaaccacactataaaatttcctaatgtatagcttggctaatagataatttaaaatgggagatgcatgttaaagagaagatactaaaatagattagtagtgcatatgatatcttcttacatgtcaatagatattggtgtaattaagtatcgagtctcatataacttaattaatgttacaacttttaagggagtatcgtcaatcaatcgcaacgtaacatgtttcgaaggtattaggcactaccgttgtccaacagcaatgtttcatgttaaattatactatgtttgatacaaaaattaataattattagtattaatggttgtcattttatttcaatgcaaatttatgaaattgatgtaaaaactaatttttttcattaatatttgtttaatatttatttatttttcttttttgaaagaaaatagaaatatttttattaaatgcacattcgtttttattttttattttttgaataaaaatcataagatctattaattaataacgttcaaaacaatagaatgtacttcagaggaacactcctccaagtgaagcacacgacctgt

SEQ ID NO: 114593 - DNA, 2593 bp, Cannabis sativa
tttgcttttaattaatctcaagataggggattaattattgagtggagaaacccaacccaacaaccccacttggagattaaaccaaaaacagtcaaataaacaccaataattattattatcaaacaagtacatatatattaaaaaggaaaaatctttaacaaataacaaagcttccttcctagctagctagctaggcatgcacaattattgcataatttatttgccatctcccattcctatggtgttcttcactgcagtggctgctccttgagccatgtttgaaatttgtactccagtctgaaaaaaataaataattacaaaacatatcaaaatggatattaattatatgttcttaactctatgtagttgttaaaaaaaactttatgtatagatagttgttacgaacttgttggtttaattattattttattgtaaatataagtacacttttacttatttcagcattttaatttaatctattattttggctatttaaaatcacttagggttacttaccttaccattcatataagtaaaactattatatataaagttttctgatggtttatacctgttgaaggaagccggtggattgatctttggcgcctacagcagagtctttggtggtttgagctgcactgcacgtcttatccgagacagtttgagcagcagtttgtgtgctattcgacgcggtttgggccgcaatcgatgccttgtccgacacagtttgggctgcgcgtgatacacccttcattgcctcatctgcttttacctatatatatatttttttcaacaaaattacatatataaaaccatcatcatcatcaccaacttgataacttatattagttaaaaataaagaaagaaaaaatacattattattattatatattaagtacctgaacatctctactgatttcgctggccttgcttgagatatccttgcttgccatttttgatagagaaaacaaattaaatttggtactaaatgtatgattaatttagtaagtgtgaaagtatgtgaaagttgtggatctatttataaagggatgatattgatttgtagccacatattatccaatcaaatcaacccgttaggcattgcaattgcatggaactggttatacttttttttaggtagcattaaagaagaaagatattgaatggttcagatcgacaaaatctcttatctttggactatacaacgcatagatttatgacacgtgtcagtgttgatggatagctagtgtaattattgaaccatatcatacatagcttttaatttgtcagctctattataatttatatgttaccccacctatacccatatccaagatattttcttctgtgtaagattttttctttcttctttcggaaatataatatctcttttacattttgtgaatgtcatatatattttttctgaaattaaaaaaaattgctgaataatattgtagccgtcgacatgggaatacccgtgttataatagtgttatagtcacatgtcgactaatttgtacactttttcccatatagaagtccacagaaacttaacgttaattatatatccacggaaaattgtgatacaaaaattaataaaactatgttttttacacaaataattcaaaataatatgattattaatactatatattaaatatttttttttaaaaaataaggatctatacttaaattaaatataaaaaataacacaaatagaaaaaggttataattgaataaatcctcaataatttcagtgacttttgtaattcaaataatattttattaattatttaaataaataatttaggtagctagtaaagattatgattttttttctgtaaaagaaatcagtatttaaatgtggcattctttaaatattaagtatttttctctgtgaatatccttaattcaaatgtgctcaaattatttggtttagtaattaaaaggacaaatattatgtgatacttataccccatattaaaataaataagtatagattacatgttgattaagaaaactataaataaacacaagtatgctaaaaatatataaaatatttatttatcaattcctaataataataataatatttttccaattaagtttgtaataaaataaaaagcactatactattagatactataaggtgcccatggcactatatataataaaaagcaataccttatacttacacatgttgaagtgcaaaaatacaactcacttgtaaaaaattgcttccatagtgtgccaaacgttatatcaaatttaacaaatgtactaaaaattctaataaatttgataatatggtgtatttgcttttattatattttctataaatatttaatgaatattatggatttgtttagttttcatcaaattttacatttgttgaaacacacgtgatttgttgaccttttatgctgaatgtatatagtatattaattaatttttgcttatcatattaaagatggtgttaaggtgtttagctagcatttagtctattggcttttgtattttttttctttaaaaaaatagttttttacccttaaactttgacaagtactaaattatgcttcctgaatttttaaggt

SEQ ID NO: 114594 - DNA, 3760 bp, Cannabis sativa
tatggtcaatagtaccgtcgtacgaacattttagactcagtaccgtgtgggacacggggattagggttatagtcaggggtatgattgtctgatcataacccgggatatatgtatgttaaatgatttatgattttcttactgagtctgttgactcacagtgctatgtttaagtgtaggtaaaggcaaggctaaagttgaggaaccgtgaggacgagcggatgaacattgtacatgttggggcagttaggcctatagcgtatgatcctcgggacatcagggcttttgttgttagtcgctaggcgacaaatattatgtaaatgaatagcaaacttttgtaaagtgttttgtaaacgggatcttgaaatattttgtatgtaatactataagttttaattaattaagcaaatttttaattaatcacaattttcattaacctcgttgattagcaacgagctgcacagtaagttcaaaatcacgttaacacgtctatgctagctagagtgttacactctaaatacttagtttttgaaaaactcggtaaacttaaggcatgccctcatttgtaatctaattaattcagttcaatgaatataattctctatattctaatattacccaaacctaagtatagaagatcctaaatcttatcatccatatttatttcggaaaaatagaaattctaaaacatgaacaatcatacattgttacctaattgaacatgaaagaggataaaaagtttttctttttgtccactttctagaatcctcatccaaattatttttgaagtgggccacgctgatctggagtatgagcaatccacgtcgataccacggtttcttcacatctctgattaagatagaaaataacagcagggcttccccataaagtgttgtctcataccaaatctgttggccttactatatttctctcattaaaatcggttgttgatgaggaaaactactatttttttattattacataatttttgcctgtttggctctcctcttctagttttagatgaatacaaaatagtggatttgaatgtgaaaaaagactaatttcttcttatgtttttttttaccctaaagaaaatgcaataaatatatgaaaaactgaagtgcagtagacatctgaaaaaacccagatgtccttacaaaccactaattttataaaatgaaaatggatctgtattaatttcttcaatcagatcaatgacaagcgaattgcaggagacatcaaaaaaaaaccaaatgacctgcttagggaaatcccaagaataaatatatacaagaaaaaaaattgcaaactaatactaataatagtagtaaaggaaaaaaatataataatagtgataatggagcatctttactccattactaatttccgaaaagcctaagagaaattttatgaaatgctatactgcaaactcttctttcttgttatctggattgttccaaacatcagaaaagtcaatgtttcccatgactaaatcctccattctttctttcattatggcagatggtaatggcgagtttatagttatttctccaatggtagccaatttcaaaagctcactttcatctaaccctttcgctggcccaaggctacaacgatcgtttccatgcttagtcaatgcatctttgaatttctttatctgttaccacataaaagaacacagctttagaatttgaaacactcaaaaggttttactggtttactactaaaacaaagttaagagacatctaccgttgcattggtgcagctgaagctacacacacgaccatctgctcctctatagaatctaaagaatggtaaaacatgaatatggagggcatgacacataggtttgagctcttcatagttgaccttaagaaatattgaatttgaattcaactcagccagttgacagatctgagaaaaggggcaaaatactgttagttattttctccataaatgtttaaaatctaaacaataaactaagatagtattttactttgtataagtaaggaatcaaagctcaccttaggatgaagagttctgcaacctccgcaaccaggtgagtaaaagtctataataaccaatctatcaccagcactagccaaggaatcaacaagttgttgagccgaatggatctcaatcatgttaggcttaagggtcttctcccaccatctcatagcccggcttacacaaattgatgcttgtgcctaaaaaacataggttgtattaggataaacccacaatttctttttttcttttctttcaaaagcttcaatacaaaaatatagcaaagaaagaaattaaaaatgaatacttacatgaacagagaactgggtaggtgagttgaccctccagtctcttgaatccttctgagtagagacagatatgggctttccaatgaaatcagaagcaaaaataggaaaaggtcttgaattttcttctctagattgtcgcatagaaacagaagaagaaaacacagaaacccctttagagttagaggtgatctcatccaactcgaacccagaaaagctaaaaccactcttcaatgaacaagccatggttacacaaaagtaaagaccttttctctaaaagtaaaagcatacaaaaacaagaacaaccaaacaaaacctagatcagtttttattttctctcttttttgtgggacaagaccagaaagattcttcctttactttgtttgatttttgggcttaagcaaagaaacgttgagaagaaaccaaccaagatcaactagaaaacttataataacaaaatataaaaaggaagggtttgcacaaaaatataagggcccttttgactagagaatgcggttactggatttaagagaaagagaagcaagggttttgttttcaaaccatgaaagaagagaaaaagaaacgagtgtaggtggggtctcctcttctgcctttgggatttggatctcaacattatccattatttatttcaaacttaaataatattgttattattttacgtttataatccaaatccgtttaggattttactaaaccatgtttcaaaaggtggtaaagtttaatttagattttaaaggagtaaaaggatatctacaacgtaaatttcggtataaatatccaaaattaaacatttaatatttgaatttagctgtaattgtaaacatttcctcgtcaccatgaatatatttaaaaataaaacaaaaattagtggataattaaatttcttgcttaggtatatctgagtcagcatgttctgtgttctgttttatttggcagttaggtttatcttcttgtctcgtggatcggctcaccgcgtagcatattcccatcttacctattattaatttttttttggatcattttctacttatttatttttagcagtgtacaagacaaattactttcgcttattggcaggtaaatgaatagataggattttctaagtggggcctatgatgataaattggagccattcatgatttcttttttcttatattatttgggaaatttgaattttcatgcttcatacttcataaattggtcctcttgttataaaataatataaagtagatgaaaagaaagaagaagaagatgaagagagaaagaaaagtgaatgagaatttctcagttatttattccgggtgaacccctatttatacaaatacaagagtaaaatataaactaagaaaaagaaaaactaataaaaagagaaatattgattactaataaataaaagatttagacatccacataattattaatatttataa

SEQ ID NO: 114595 - DNA, 1981 bp, Cannabis sativa
aataagggtttctatacgattttttattgcaatttatgaaaatgacccattaaaggatgataacatataatatatgtaaatataggctaagacggtgacatcgttagatgctcatcttgcggacatttgtattgggacatcggcagctccaacataccttccttcccattattttacaaaccaagacaaagatggaaagactgctgaatttgatctcatcgacggtggcatggccgccaataatcctgtacacatatacatacaaactctttttatatatataaagatattaattgtttatttttgtgatgattaattaaattatattaatattgttgttgcagtctttgattgcgtttagtgagattacaaaagaaataacgaaagcgaatccagattacggaacggtaaagccattggagatgtctcgttttctgatgataacattgggaacaggatcaaacaagacagagcaaaaatacaatgctagaatgtcagcccaatggggaactgttagttggatatttttcaatggatcaactcctatcattgatgttttctctgaagcaagtgccgatatggttgactatcataactctgttcttttccatgcttctgattctcaacacaactatcttcgcattgatgtaagttttattattatatataaatagtattatgacatgtctctcaataaaacttgttattaaattacattaataataatgctaggctgtatgaggtccctttaattagtatttttttttgtagatataaatattaatttgttggttgttcaactctatcttattttaaataaattttttattattgttattaggatgatactctgaaaggaaccctagcatcagtggatatagctacaaaagaaaacttggagaatttagtgaaaactggtaaggagttgctggaaaagccagttgtacgtatgagtatggcaactggtctctatgaacctgttccaggtgctggtaccaatgctaactctctaaaaaggtatattaattaatttatatcaaatatttattactatatattttcataactctattttttaatataaataaatatagctattaaaagtaattaattactatttatatggtttttggctaacctacagatttatatgctaattattgttattattttgcagtttggcaaaaatactttctgatgaaaagaaactccgagacgccaatgccaaagctgcactcaactaattaagctataaaaatatagcttttttagtgtattattcctaataaataaataaataaaagatcccatatcccaccaataataaataaatgcagtcttgtttaaattttaattattgttcagtttgttgggtggttgagaaagagtaccacgtacttcagtttctaatgtaatgagctccttttgtgagtaaactgttatgtgcaataaaaaagctcaaataaattgtcatcatttacttttttattttattaatgtaagtattttttttgaggaatttttttttttttatactctaaaataattttttttatatattttaacgaaactctacccagaaactccaatgataattaacggaataacttaaattgcaattaaaatttgtatatataacaactgacataaaaactatcagaacaacccaaaccgtaaattaaaattaaaaaatagtatgaggtaattcacctttgtttttttatgttttacctattgtattttaacattcgatattactcttaaaaataaaaaagaaagaggaaattagactctataccctttttatactgtcttcttttattcttaccctcttttctaaaacttatcatttttatctctttttttaaacactttaccgattttacccctgtcacattaatatactctccatgtgactcccttatatcagggtattttgggtacagtacatataaaaagaggtatgtttcaattaaatata

SEQ ID NO: 114596 - DNA, 2654 bp, Cannabis sativa
gataataggtaacaaagaattaaactgcaacatcaaaaaacaagtgatatcctttaaattataaagaataaataaaccttgcgacatcaaataacaaatgatatcctttaaatcaaatagaataaataaaccttgcaaaatcatgggtgccaaaaaattggactggaactgatattccacctgcagttctgcttaagccttttcgatctacaatgagagattcatcaacaacaatcgctggccacatagcatgacctgtaatataacaaaaagttagttcacatatattcaaatgaaatgagtagttatggcaaaccaaccactcagaaactattgtaattataaaataaaaaattggaacactcgtgcactgtttgaggttagaaactacaaatcctagctattaggaactaaaaaccataaaagcaaattggaaagctgttcgtgctttgagctttaagaaaaacagcttgtaatattacaaaaagaattctacttggttctgagatcagctccccagggcagacacctccgtaatattacacaacagaaacagcacagtactacatcttagcatatacagtacaaacccaagcaccatacggacttacatatatatttaaagaaaaaatgttaaaagaagcacataccagtaagcttagcccatataatatccccaggttcaacttcttggcagtcatccaaacttgcagccaagacgaccatctcattgtagtcatatagatcactatccacactgtgaagactgcaactcaatttcaaactttccatttcttcacgagaaatgtaaaatttcgttctctcatttgatagaaccaatttttcctcatcactatcttcatatttaacctgcattatgttttaccaagttgaattctcaaaaaccttttcacatcatcaaaagctacaaaagtaagaaccaatgttacagaaaaaagcataataaaaccatagtcatacgtgatgatgattagtgtcaggttgatatcccacaatgcgacctgaataccagtcagcgtccaacggccaataaacctgcactcaacaaaaagctcatgcatttacagatagaactgcaattgtaagcatcaaatagagctaagcatatagccaaaacaaaatttgtgattaccttgcattttaacccaacaaatgattttggatcagcaccatcagtactcaacctattaatatcaaaattcgttacttttctcgatcaacaaagtgcccgaaaatgtgaatagcataatgtcaaacattttaaaattttaatctccaatcagcagttcaattacacaattggaaccctaaggaaagatacttacctgacccatctcttcgtagtagcggattcggacagaattttcacgccattctcagtagaactccgcttcttcatcttcaaacccttgcaattagtctgactacaaaaattatagttccggcaatccctcaaccgcggcttatcaaaactggacaagacatttgagtccacacccaatttcattaattcaccaacccccattgccctccttttcttcttcttcaacaacctcccagcctcagaaccattgccctcgtccacagcatcaccagatatcttcgtcatcgttggctccacacgagctattaacgaatcataaaatgacgatgaagggtgtggcctcttagagcgacgagtatagacgcgcacaattggaggcttagaagaagaaaaaggcgtagccttgatcaatggcggttttccttcacagctatcatcaacaatatgacgttcatcgtcagcaacgttaagcttgcgagccttaacctttttggacatgacgttggatgaggcagtggtggtagcagtaaggcaaggagaagtgtgagagtagagatggtcgagaggaaggtacctaaggggagcgccggcggaggtgtagacgtcgatgttgttggcgtcgtcgtgttggtccttgcggggaaatgccatggaaattttgatcccgtagctgtggtttgctgttggagtgagaagaaagggggttagggttttagaaagagaaaaatggatctgttgaattggggattggttttggaggggagggcgggctcaggggcagaatagtgggtttcccgcctgatgctgctgcccaactaaagagaaaggaagagaagaaagtgagtcagtgagtgagtgaatgagtgataaatgggaattcaggatggtaaaacatataataatatttatctttatctatctacgatctcatagatcaaacacaccacaaaaattgatgggagaagttttatgtaaaactaaaatgtactttgattttcttttagggtttttggaggttattagtaaatttaagctgtcgtttatttttaacatttaattgctcaaatttttttataaattagtttataataataaactaaaaagtcgtttcaaaaaaaaaaaaactaaaaagtttaataaaataagttatttaaataagtgatttaaagtttaataaaaaagtttattaaaaacatttaataaaataagctatatttcaaccaattaaagataaaatttggtcaaaactaaattcatggcatacaaaattattctcacaagcaggaaaagaaattcttttaaaagcagt

SEQ ID NO: 114597 - DNA, 5086 bp, Cannabis sativa
atagtcacaaccgtgtatttcgggtcgaatcgggttcggggccgaaatacaattctgggattatttattggaattttaattatatgtgaataatctgaattttatttgagcagatttatgttggaaatgactaatttacctttgaaatgtttatatgagagttatgtggcttaagggcattttggtaactttgcttatttgagttataattcaacaaaaagcattttaattaaactaagaggcattgtttttctggttctttctcctcaaaagtgacccattccctctctctatccctctttgtattttggttgaatatttggtgatttgcttggtgttcaagcttgaaattggaaggagtgaaagcttgatcattacttggagcttgaggtagtctttttgctacttttaattttgaaatttgttgctgagttttattgttgaagagcatgaaaataggttgtgaatgttttgtatgcatgtggataaatttagtgtcaatcttgatgagttggggtttaaattgtttggctttgtaatggattatgttttgataagctttggatgagattctagggtgtttttcatgtttgaatcctagatttatttgttgttttggttgctggaaaaagaggttaatcctagattttcggcgagaatgcttgctgatggacttgttggggattatccatctcctcatccgattgctcttgagatcttctagtcaacacctttttctggtacaaaacttcaaaattttggttaaagctctcaataaaagcacaaaaatattgacgtgatttttagccaaccgatgtggagtagtaataaatgagatttaaaccaaaatcgtaacaataaatgtaaataatgatactgaaatttgcaataaatgtaaagaaagacaccagaatttaaagagattcgtccctagatgtcggtaatagcctactccccttgtattttattaatcagagttgcaaaagtcaagaacaggctcttgaatgcaaagaaaaagatagtatttttctctaagtgctcaaaattgtggatccatttcccaggtcatgggtgaccccttatatagagaaaaaggtcggtgcttctcgcttcaggaattgtgatcaacgcggagctatctcaaccatctccttggttttctgaggtggttgaagtttaatttttgtgataatatctcgctagcttcttatgagatttgaatatttgaaatagccactcacgatgaggaccactcgagggtgtgacacgatcgttaaccacctttgaggatagaagctaacacttaggggtaacacccccgagaccctacatgaggagggtgtcaattgtcatctcgaggtgacctcccgagaccccttctacgatgtgagtagtcatgttgttgtgtggatgtcctcatctacctttgagaatgtcattatgtctatggtgggggtagtgttatctacccctaaactaatttggcttgtagttgtgtggtgattgtttatcccacttatgaaggtgttagtctatcttttttccttcttagagacacccactttacccaagctagtggtaaaggtgaccgttagacttccattacaacagttatgaccacccatcatgattaacggtcactcaacaatcatggctttacatattcttcattaattcagtcctaatttttcgtgccacgtgttgtaaacactaccattatatataataaaatataaactaaataaatattataccatacaattaaaacatagaaaaataataatcaaatataagtagcatgtcaatagagttatatacctacattaaaatatttatattatgctaacaaaattatataccactattatacataacaaaataaaaaataaatatcatttaaaaataataatatatcatacaacaaaacatatatatactgaacaacaaaatctacatactaacaacctataaaaaattaaaaaaaaaaatcgacatcactttaaaataattttttttaacaaaactaatataaatatatcatgatatttaagcattatacttctaattctaaaaaacatggaataaaaaattattgatttttttctattataaaaaaaaatataaataataaatagtataaaaaaaatcatttctctacaagttttgaaataagaacatttacttacataatgctataattttccacgcccgtctctatgtggggtccataccaatagtttaccatggttgtagaaaaataactttaaatattattataatttctttatgtaaataaattatttttcataaatattttgtagccatgtaggctcccattagttttccttcataaattaagggtacttatttattttattttcttgaaaggaatcagggatccttatttgaacatttaaattgtttagtaaagttgaataattttttgagctatcaaatttgacaacattacagaatccatgcagtatagcaaatcagctgaatctttaagcaaactaagaataaagaccagcaaaaccattacacctttgcagctcttacaatcataatacagggcaactctttattgcctatgtaatcaatccaatatgacaaaaggaaagatacacataacttccactaagaaagacatcattaccatggcttcggctaaattcaatgtacacatgacttgtcacttagaactaaacagaggcaaagagcagttcagtcttacctcaccttgagagccagtgagaacaccaaggtttgacatcttcaccatagctgcggcaaagtctagtctgaaggtagatccatcatctgaagcataagctctaaccagtctagcagtcttctcttcagccatcaattgttggtcagcaaagagtagcccttgtcccatcattagattctcatagtagtgcgtgtcaaaaccttcaccagatggcagtgaagatgctaattcctgaatgttagaagctcctgagtccatgctttcaaataatccatttctaactcggctgttattatctccttgacattttactcttatcttgttaaggaaattagcagctatagtggggtctggcttccctgtaccattaaagttatagagacgattttgaatgaactcgcagctcatctttccaatgttgtgccctccttcaaatgatccaaaatccaaaattttcaaatgaaatattcattcaacaaaaagagaaaaaggatatgaagttcgatgtagtacctaaaagactaactgtctctctttcattaaaacctttcagtaaaaagagatgaagtattcgagtgatagtatcatcagggtttggaatttcattcaatacgtcctcataataagatcgaatgctgtctcttcgacctgtaaaaactggataataggggccaccagcctgtgatccatataaaacaagaaatattttataacaaaccgaaaaagagtaataaattaaccaacaaaggcatgtttagaagaaaaataagactaataaagaactatggtagaacaacatacaaggataatcccatctctagtggcaagagagattatatctgcacaagagacaatcccggggcaaactcgttctatttcctcctttatcctatcaataatgtcaaatcctctcaagcttttgttaggcacagcctgcttctcgattgagaaacttctattaccatgactgtcatccaaaaggactgaagcatcacatccctaaagtgagaataacccattattaggaagaacaaatcaaaacatgtgcagtcacaaaaggataaattgaaacagcaaacactgtttaacccaaagtttggattattgtattataacaataacttttaatcacctaaaacatccaaaaatttgagctcacatgaagagagctaggcagatatgcaggaacaatgaactgagattgaagcttattatatagatgatcaatcaggaccaaagaaagtacagagcaacgcaaggacaattaaacaagaataataacaggagcatcgttgatataaataatatatacgtacatttaaacacagtataaatatcagtcaacaaaacgtcgagcatgtatgattgagcataataatttaaactatgacaaaaattcaaatcctacatgaaatgaaggaatacccaaaaaaagaaaacaatgaacaagtttcaatggtggaatggaaattcagcaatgtcggcaaggaatgaacctccaagaatgcaattcgccagaacttcaagatcaaagctaagttcaatattggatttattcaatcaaaaaataaaataaaaacgataaaaggaaaaagcaaaagaggaaagaagtgttacgtgaacgaagcagtcgtggaagaaaaggcgaagcagagctgcagagatatccttttgttgggagtaagcgtcgaccattttcgaacgtacaatctgctgagcatcagggcaggaatcacgatagaaatcgtactgaagatccttagtgctgccgtggtctgacaaggaatcttgaagagaagccatggaaacagaggaagaagaaagagtagaggtaagaaaagaggggttgtcttgctcaggatgacgtctagggtttgtgattgtaaaggtcattagaagtgagaaaatccctatcaataaaagcaagcgagcatgcacattcatcttcatcagacgattgaagggagagttgcagaggagcgtgaaagaaagtgcgcgggaaagagtgggaaaatactactttaacccccaaacaccatatatgacttgtttctcgcacatttttcacttccctagtcagctttatttgttcatttagtaattattcaaaatttaggggacatagaggaatattataaattagaataattactatttttacctcttaaactttcggcactacttaattttgccctctaaaatatatgacttgttaaaaattctctctataatataacagttacatagttatgctacttctgttaggttcttttatctttacccttaaaaattagtatttttacccctaaactttgactaatataaaattttggcctcttttataaaaaaaaa

SEQ ID NO: 114598 - DNA, 3289 bp, Cannabis sativa
  modified_base (3196)..(3204): a, c, t, g, unknown or other
aattcattaaaaacaaaaaaaaaaaaaatatatttaggttacattaaaatatccacatcacccaaaattaatatccacataccttgccacatcattttttatttaaaacaatactgtcatgtaagtcattaaacaacaaaattaaacaaaagtgaacggaaggactacgtttctgcattcgttataatttgagaactatttgtaacaagcagtatatattagggggcaaattttggtagggtaaaatgttcggagggcaaaaatactgtttattaaaatatataattgataaatttgagaagtttataataatatatattttttgcatctaatttacagtaataatgttactactattactgacgcgtcacgccaaccaaatttgacattttttaacgtttttcatttttttttattttcttgcatttttaaaagtaactttttggttactaatagtgttgataagaaactaattagttatctttatataaaaaactttatttttatatcacataatttgatatacattttggttactctaaaaactaatttgtatacatctttgtaactaattagttatttttaagttatattatagtagattataatttaaaatacatttaggtaaccttaaaaatattttcaaaactaatgagttatattatggtagattataatataattcaattaataaaattctaaaatgaatgttaactaagatttaacaaaattatattaaaaaaagtaactaatcactatatgaataaccaaatagttttctttttttggaaatagcaaaaaaaaatatatatgttttccatatcttgaaatgtttacattaaattattgattacaatgattttttttttttttaagttcatccgcgtaacaacgtgatcataaattatttttgaagcttgaaagaagagataaataagaaagagaaagagagaaaaagagtaaggtaaggaaagaaaaaaaggtagacaaaaaatataaataagagtattgtaatgtaaccaaataaatattgaaacttgagtacaattatatttaaaataagtcttttatacaattttttttctttctttttttcagattttgatcccattaagttagcaaaagtactaataaatcaatatatatatatttatatatataaataacaaaatgaatctaaatgatttaatatgaaaccaaagcaaaaaacaaaacttaattaattgatgaaattataaaaatagagtaactggtaacaaactaataaagaaagaaaaaggaattattggttctcatgattatggatgaagatttactaaatagaccatggagatgaatttgggggactaggaatggaagaaggagggtgctcaagaacaaaggcacgtacatattcaggtagacacgttttcataaaatttgaattattcttggcatttggaaatctaccatccaatttatacttgtcttctcttacttggtatgtgtataaattataatttcgtgacaagaaaattacatcagaattgtttggatgaaaagcatgcacaaatgttctatccaattttgttgtttttctgagtctaacttcatgtaccaaacaccataataattcttcttcatcatcatcattattcaactcccaaattctcaatcgaaaatagctaactccctcattcataatcaaagacaaacgcagttgccctttaacaattccaatgcaaattctgtctctataaaccttcttgtttctatgagtctcaacacaaattttgggaaactctataaaacgaaaccgttttggatcaacttcttccttaaatggattacatgagaatattcctttaacttcattcaaccctactttcaataaccaatatataattccattattacttgcaactgacccttcaagctttggatattctaccaaatttggccacaacaacgagtatggcaaccagctcgaaatactccattctccaatttctgaacaaaaggtcatcactctaacaattctattgttataacttttatcaaataacacaaccttgtaattgtattgttcattatcatcaaatcgatcaatttttggcttagcaacaaatccacaatcgagccaacgacgtacgtgatgagaaggtaatggtatccatgtttttgtaagtggattggaaatgtataattcgtaaatagaatgtaagtctcctgataccaacaacatgtcaagatatgtggctcgaacagtaccatcactttcgtaacaattttttattttcacaatatcttcatgaatgatttttgattcttcagaatataaatcataaaaatttgtgtcatggtataaactgtttctaaacaaaatagtatatggcataatctcataattgttattattattatctcgttgtctatggttgagaaattgaacaaagttaggaataaattgatgatcatgagtgattagagaataccataatttgcaaacgcgggtgcattgaatcagaaatcgaagatcagaaagacgaattagtatttggatgactaattcttctggaatagttctaaatgctgattcgtctgcttctttttcttcactagtattcttctttctccttattctctcactactcctaaccatgatgatgaattgagaaatacgtatgaataatcaattaattataattaggcccttaatataatgcatttataaataaagatattttgagtgatttaaatacggcattacagtttcctatttttatttttgtatatttgtttggggaatcatttaattttatatcttaattttcctaatttgaattaatgagggctattaggtccaaaaaaatagtttatttaaccgaaattcccgcaaagaaaaaaagcaataaaagcgaaaatcttaaatacgcgtgatttaatttgagtttgtttattttattttcttattctttattttatttttttgtgaatttttgtttccatattttaattagcataattgtgggttatgttccaagcaagatatagcattagattttttttttttttttttttaaatcgtagaattctgttaaaaaaatctacaaaatacacatacattaatcatacctgaccatatatttatgatcggttttataacgtaatcaaagttgacataataagacattatggctcgtttggaacgccgtannnnnnnnnattgtattgtattgtattgaattggattatatatcacatttttatataatactatgttaaactttaatttatactaaaatattat

SEQ ID NO: 114599 - DNA, 592 bp, Cannabis sativa
agaaaagattagtaacaaataataatcaaatatttgtttatcatcaaaataaatgagtgaatgacttttggtcaacaatatcctcattctacactaccgaattccaagcttgacgacctcatccatagtggacatgttggtaagtctaatgaattaggcctgctcgggaccacttggctcaccatctgcacctaaattggatagtgtggtatggcccttatgcggagcaaggtgtggtgcttcctctgcacctataattcagtgacatagctaactgttatcctgatttttatccacctgatgtggcatgcttacctggacagtatcaatgccacatagcagtacaactcactaacaaggaggtcgagttagcaccttggccaacgagggttgtaacactcaaatgggacaacaagtgaaaactagccacctcaagggggctagccagctaggttagaacctggcaagactttagtgcacatcttaatagtggactacaagctagacagcaaattaggcattaacaacccaataaactagatggaaagtatttattttgaaggggcattttagtcttttgtatttaatcaat

SEQ ID NO: 114600 - DNA, 848 bp, Cannabis sativa
gggcataaaacccaacactttgagcttatattatctaaaataaaatggaagtctgcatccttttgccgaattctgaaaagggggagacccaagtagttaatgttcctagtagagctttgaattcccaacaactctttgcaccattttttcatcccggcactggtattgttgctaaagaatatagatgtttttttatttattaatacgttgaccggaccactgacataatttttcaagacacccccaaaacctttcacttcgataatgttttcccgtccaacgagaatgaggtcatcagcaaaaaagagatgagaaattcgaggcccattcctactcagcttgattcccttaatcactcatttattaagagcatcctttaaaatacgagagaagatttcagtggcccaaatgaagatataaggataaagggggtctccttgtctaatgccacacttatgatcaattttccccaccattcccccattgagacaaatgttgagggatgtggttgatatacactggtaaacctacttgcagaacatatgtggaactttgaagctacagagaatatgatcaatgaatggccaactcaatttaaatgagtagacgatctcctggactaacacattgttatcctaaatgttcctaccagggatgaacgctgcttaagtggggcaaatcaacttgggaaaaatatctttcattctattagcaatgattttcgagataactttgtacattacattacacaaggagataggtctgaattgggaggctttcttttgattgggaacctttggaatgagcaccacattgttggattttgtgccctaaataaaacccattac

SEQ ID NO: 114601 - DNA, 1945 bp, Cannabis sativa
tttaaaatttatatgtataatgcaacacagtatttattataagtcatagttaagatttttatcatgcattattaatgttaatatatattattctgattttttctcgaaaaaaaaaattattgcgactattaatataaaaataaaacaaattataaagtgattgattaagcctttctttcagtttatttatttattatttaaagttttgagtttgtaagtgacatgaatcaaataattttttttagcggcataagtattaagtactcaatgtttgtaaaactgtaattttttctcagtttcgtcagtacaaactctattatcgtcttaagtaggactcctcatgtagggcccagagtctaaattatttggtcggtcgggacgaaaacatgtagtataagttactttcaaatattattttaataaattcaaaatagagtttgtactgacgaaatcagagaaaaaattacagttttatatacattggatacgtattccgttaaaaaaactcattggatttatgctgctaacaaactcaaaattttaaatacttataccactatttaccctattatttatttatgatgaacatatgattttattggtattataattaagattggttttaaatcctagttaatataaatggtaattagaatttttatcttttgaactttcgtatgtactaaatcgtacgtgccttcaaatttttcaggttgttaaaatttatttttaaactattgagacagttgaatttaagaattttcttcaaattttactagcgatcaacacatgttgtgggtaaacattctaggggcacgatccgatacgccaaagtttgaaggtataatttgctacataataatacaaagttcagatggtacaatttaatacatgaactattgccatggagttgaatgaaagaaattaataaatctcaatagtttaagagaatttttaaggtttgaaaaattcaaaaaaaaaaacacaatttattatatattaaaattcaagaacaaaatcataattaactaatataaagccaataattactttaattttatatttgtcaaaaatgaaatttatatatattatatgttaataatgtacatagtaatgaatgtggaatatgggtccggtatatatcgagagaggtccagtattgaatctattgattgatctgctatatttctagagtgttcgaattagtgaatatcattcgtgaggatttggtgtatgtaaatggaaatagaaataggaatagaatagaatggaatttttatttttttgtttggtaaagactatgaaatcaataactatataagaattatcatgtttgttattgtatgtgttgtggacattatcccacataaaataaatggtagagaattgagtcatatataacttattgtcaattgattttgagatggaactctatgattctcaacaagatggaatggaataaattttttattattttgactaaattaccctttactcttcaaaaataatatttattttattaaattactattattttataaattgaacaaataaataatatttttagcaaaaaatatatttatcatgtgatggaaatgtggatattcttaaacttaattatgaaaaaataaaataataaaattacatataagtattatagatttcattcattttatctatattataattatattcaaagtctgattgtatacaaattttatttgggattttttcagttatatacaaaaattgtaaaatatttatggaaatagcgttagtcaaataaatatattgtaccgaggtgtttttacccaatcacaacataaagcccactaatattagaaaaaacaaagtaagaaaagaaattgattgagataacgtttgaattgatttctttttttttttttttttcaaatatgaaaccattcatatatctttatatatt

SEQ ID NO: 114602 - DNA, 7303 bp, Cannabis sativa
gctataaataatttcataattaaagacgattaactgctaatttctaaattaaactaagcggtctttacaaaaaccttagggctagataagaagttaataatggtattgtaaatgctacgtgcctttctaatgaaattacaattttgttaaaaaaaattctattgctaagaaataagatgctatatatataaatatatatatatttaaattttaatatttattaaattttctagtcttgtcaaacgaatcataagttcctagctattgaaatatattttcctctcattattagttacataccaaagttttttttatgagagttatataccaaagttacatatgagatcattacacaaaatgtacggacaaatcaagtacagagtatgataatacatagaatattgtaattgtacgtccttttcttttatttttgtgggatatttatattaaagtggtgatgatcttaatgaggatgcattattgacaaataaaaacaaaagaaaatttgccattatgttcgaaaatgtcatctatttcttgtgcaagacatttgtattattattcagtttgtctggataataattatattgttacaccatggcctatatatgtatctgcatgtgaattttgagtttcttccttccttgaaatttctttttaagcatatgaaaatacataataatactatatatatttatgtattttcctttcatataatttaattgcatacgtgcgtgtaacgattttagcaagccgcacgtgttatttataagaaatagcttctaattattacttttatttttactatttagtaaagaaaaatttgtggcaaaagtcctcaaaaagttcacgttgatgcagattaatccccaacctccaaaaatagcaacaatagtcctcaaggtcacactttttatttgtccgtcgatacccaatttgacagcacgttaagtacgggcaagaatgccacgtgttgaagtattattggtccaaattttaattttaattaaaaataattaaaaaataaataaataaaaactttaatataattttttattttcttattttttttcttcactgtttgtgtttctcctccttcttcttcatggggcacaaatccaacccatccatggccatggaaaacacaacaactgagaggcccaagaacatgctgctcactgcccatcccgattcctcaaccagcctcctattttttttttattttcaatctctatgctgatcatcgtatctctttctctcccttccaccatcattgatccaaaatccaaaaatagagcttggctcgttgcgcttcgaaaatgcccacatcgaagccatggcaaggtgaggcttcgacggtggggctggctatagacaaggcccaacgctcatggggacagagaaaattaacatatcagagcttgggcacgaatcaaagatggtggtgacttaggatctcgcgagttgcccttaacgagtttttcaatttggatttcatgaattgaagctggatatggagacttggacgatagagtttaaggcgacttagggcggttgcgatctatagatggatgatgtggtttcgccacaaaatttgacgggagaagggtgggtgggggttgggagtcgacgtgtgactggatgaagaagacgtcgatggtgtggatggatgaaaaggatgtcgcgatggtgtggctgggtagaagatgaagaagggaaaggatgtcgatggtgttggctggttagaattagggtaagggtgcagtgagaagaagaagaagacgaagaagaagaaaagaaagaaaaagaaaaaaaaaattatttttaaataatttatttatttatttatttatttttaaatcaaaataataatttggaccaataatattttgacacgtggcaatttaaaaaaaaaaaagataacgactcggttaaaattaagactaacggacaaataaaaagtgtgaccttgatggctattgccgttatttttggaggttggggtctaatctacatcaacgtgaactttttaaggacttttgcggcaaatttccctttagtaaattaactaacagtcttggcagcattggctgatcgaaaaaaattaaaaattagataaaaaattaccaaaatatgttaataaggaaatatttttatttttaaactttgaatgatttatttataaatacataccacaataaagtaataaattattttttggttgttttatcgtttatttataattatattatagttgttatgaagttattttttaagtgttttgagttatttatagttattttatagttatcgttaggtttattttttgttattttcttactttttgcttaaagaaatatatttttataattttaaaattttaaaaaacatatttttatatataaaaattttagatcgtaaaattttaaataaaatataaaaaaatggaattttttaaaaatattctcttttatttactctgataaacttagcatgtgacaaatatttaatactatttgacaaaaaaaatatacaatacatagtttgtttcaaaatataacatatatgcactattataaaaatcattttttaaatccatcaaagttggactaataagcttttcaagtctattttgtgttaaatattataaaggaataagttaaaaattatctttttttattatacattaaatatatataactgcaaaataattttagttgataaatactatcttttataatcaaagtatcaaatacaatctcacataacttataaaaattagagtctctaatgcgcattataaggatataagttataaaactaggtataatatttgtatttttgtatttttattacaatcatgatgagctaaatactaaaatgtatgtgtattttatagttttaattaattttatatcttttttctataatagttatacataatcatattaaaaaatatataatttgactatttaaatattaccatcattttaattaataaataaatatttattatattgttatattattatcaaattatttagctttttaatttataatgcttttgaactaatttatttgtgtttatgtatcgtgttttcgggcttctcatgtcgtgtcatacataattctatattttccgtatcgtatcatactgtgtctaagcatatattttttgcattcgaatcatgctcgtactttttgagctcatacaggtttcatatcgtgtcaaaaagtgtaacccatatttacaacacttcatctatctattgagaacactatggagatctctaaaaaggcaagaagctcaaagtttgagtgatttgccatcacaattggatagtaacccaatagataaaatactaccatatgctctaattaaccatccatttccatctccccctaaagtgcataaaagtaaatcgtacaacactatttgatgcaattaataacaagtgtgttgatatggtaaaatacatgcatgcatctcttgttacaaagttataacatttgacaattcccgccaagtgttttctcaatgaataaacaaaaaagtaatatgtactttataatgaagactaataataataatacaacatggtagcctctacgaaatgagaatctttgttttgatctttaaaggaagagagaaagagaatcattgatccaaataataatggagaggagattatgaatacacaattaattgttttgattctttaaatatatatggcagctcaatcgatggtgtgatattgagtatagtttttcaagtgataaaatgattgagattagaatttgtacatgtgggagtcggttataaatcacatgggttgtctgactcgtgtgctaaaaagatatatattaaagctgctaactcatcatcatcatcatcatcatcataattcatatatgtatgttatgtggggttaaattattcaaattccaaatacaataaaaatatcttatccaatatacatatcaacattattatctaacacactagtactttgtccattttctcaataattatataagtatatatagaaaaagcacacaacaaaacattatgtagtaagagtaattagcaactatgttcccatgaactttccttcagttttctatcattattttaaattaattgaaaaaaaattggtgtgtttgtacttgctagctagtgcagtatattatagaaaggagttttttatttttacatttaaaagtatttctttttttttttttttttgtatttatatgaaaatatacagaacaatctaaattataatttaaaactacaccacaatttagaccgtaaaaataaaaaataaaaaaatatatataatattaaaaaataatatataaagtgatgctcctaaaaaatacaagtaaaaaaaattattttaattgattaatttataatagaatgtaccaatgaattgagaattattaattaaaaaagaaaatgtgaacgagaataaattattataaattttaaaatggctcataattaagctaatgtaaaatatgtacaaacataaacatataactaataataataaaaaagtgtaaaaaaaaaatacatgtagtatagataagctataatagtactttaaaatgcactttgttaagtacactcccaataacttctctactctattttttaaaaaaaatatatcataaaaattttactttaattttttttattttttctcaatattatttaaatattatatatatattttaattttataaataaaatataataatattacacatatatataaaagttaagcaaatagtaataaaatattttagctcatgaatatagctgtctctacatttagttaaataataatcattgaggtaaaaataaaaatatatgtaaaataactaagctttagcttatttgatggaagcttaattttatcacctattttctataatttaaaatttgagctattttagatcaacccagtgagcttctcttctatatctttcaaaacatatcaccaaaattttaattttttactattttaccataaattttacattacaccatatattaattttttttaaaatacatcatcaaaactttattttttctttaattttaatatattttattcatatcaaataataatactaatatttacacatatccccgtataaaaaaattaaaactttcaaacaataaataaaatatgttatagcaatgaatagtatcctataaatgtagagtatgaatagtaaattttaaaaaaattgttaaaataaagaaagagattagagcatttgatgtagcgtatttttaatttagttcttcaaatatgtttaagaatctctattttagtgcttaactataatttttttattatttttataatatctttcttttagttataagtaaaaaaaatgaataaatatgataatattttattatttgttgttattcgcattttcggaagggtggcacctggtcccgtacaggcgatcagcgtactgggcccatttactagcccatcaactggtccaagtaaacaaatgtagcgacccatctctaaaaatgggcgtgaatccgaacatatccgaatataatccagattctccaagttcccaagaagataattcaactatgattgaagcctaaggataggagtaatattgggagcgaataccctcaggggatatccaataatagaagctgaagggatcatccggaaggatccaaccttctgaacactccttacatggcatacctctgacacaaatctcgaggaatctagtgagttgtctcctctgccaaacctagctaggagaggcacaagacaaaaagataatcacctttttataaggatcacccactactctgcacatttctttttcccaacgacaacttgtgcctcaacatgttactgtcaacagcattatatcatacggtagactgcaccttggaactgggcttcacctacccagcctaatagttcagagtataatattaaataatgtattttattccatcaatgagatttattgtacaaaaccctaatgagacctagatctgtccaacctgttaagcatatgtgcttataaatatgacactatgtcatcatgcaaggggttcaaaataagagaatacattatagagctgtaaaaaaacaccttaggtaagtccttataaaaattcttcatggactaaggctaattgacaccccaaccacgtaataatcatgtctcattttcttcttaatcttatttttttagcttattcttcttttataacaagaaaccctcgtatagttgcaaactttgatagtaacaaggggttttaacctagaggttcctcctacaaaccaatatcccagtctgaggtttcagattaacaccatcccactaggaaatgtaaaaaagtttgctcatcttggaaccacaccatctaaaccagcaaatgacaaggagaaagttgtagcatctgatccctaaagaaaaagcattctaccaaggcctacatagtcaatcttaacctccataaaggaacaactcaccaaaactaagggctaggttacccggccaatccgaaaatgagagtcccttaggtcaataagacccacttaggcatcgggacttaatgcctagggaaggaagactcatcacaatgcctctattaatcagggatgatatcaaggacttgtatcttgaagaaggcaactcaagtgttaatgtcaaggacaacctaaatgtgtgaagggagaaagctcgatgtgaaggaatcagagcacgcagaggtgatctatgaaacaatatcaatgatcgaatctgaggacgagagatatgggatgataatacgagaaggctagaagattagatagcaaccctaatgaaagtaaaaaatcaatttctcaagaaataaagtagagccagattagaatctaaagatgaggatttggagctatgtgttaaaagaattctggacgtagtcccattgtgtcacttttgaatgtcatagatcgacttatacaagggcaagatgcatctcagggttcacttgacctgctataatcaactcatgaaggtctcgcatgtgaatgatgatgggaagtatctatgtttttttcttcaccctggcttccgtagaagagtggtagaagaggctgccaatctattcaaagttggtaggatttacaatccttattcaagaagcaatttcttgtagcaagggattttgataactctatggtatagagttattttttatgcttttaaactaaaagtattgtgagaagagtagtgaaaatgtgtttgtttg

SEQ ID NO: 114603 - DNA, 2059 bp, Cannabis sativa
tattttttttgttattttgaaaatttaatagtcttaatatcaaaaactaaatgttacttgttaaaaaaaacagttctcataacaatttttaattgacattttgttgtcttatataaaataattgaatagtagaaaattccaaatctgacctagatcgctctactattattattacaagctatgtaaagtccattcatgcattcaagtggtcctatattaatattttttcttacaaaaaacatgtgattttttttaaaaaaaggtaatatgtaaaaacttaaatgctataaataagatgcataaaacaagttatgaaaccccataacttttgtttaacataaattcttcattcaaacaaacgattacaaataattaggtaaatcctgttctaaagattcacataagaggattaatcccaatccatatatcactagcttagagttttaacattcttatttttatgacttacttttaagggaaaaatcgaattatgaaatttctcaatctcacgtagtttagaaagataagatagttttgcaagcacaatatactgtatactctcaaatgatgaatctacttcaacaaatgataaaacatgatccaaaatggtatttactcctaaaaatataataaattactatagtatatactctcaaatgatgaatctacttcaacaaatgataaaattttctctcattttgttgtagaattaaaaaatttgctagtttacaacaatttggcaaaatgtgagacgatgcaattaatgtttgaaaaattcacgagacaaaatggattattcaacgggcattacaatctcgcaatcactcaccaaattcatttatttgatgatgattttgaagagtggtccatacttgatggcttttttgagggagttgtttgctgcttttctttggctcttttgattttgtttcttttgttgtttgggactttctttgttttctttatctgtttcagtttgtctttttattgagtggtctattaatttgcttactaatttgtactaagaactataggaaaatgatggaattgagcttcggattaaaccggttgataagtgtgattaaagtaaatattgacgcagccatctttgaagaaaagggtcggtatggctttgggatggtggctagagattgcacgggtcaatttgtaagctcgttgccagtcgtttcccggccatctggatatgttgcaacagtggaggcgataggagtcaaggaagccctcaattggatacaagataaacagtggtatcatgtggaggtcgagactgatagtaagctaactgttcaagcggttcatagttcaacgatcatgaagtcagtctttggtcttttagttcaagattgccgttgtttacttcattctatgactaatgtcactttatgttttgtaaaacagtttgctaactgagtacctcactttgttgctagacaatcttgtgttttaactgatcgtcgaatccttatttctgatgtctctgccgagttgcaggatattttgtactggattcttattattaataaaagtttgcttttgaattaagaaaaaaattctataggaaaatagattaaaggattatttttcatgctttactgaactattttgtttcgtggcacattaattcttttatctaataataaaaagtatatattagaaggatcaatagtatatattatctggccaaggaggactagacggatgtaaaaatttaataaaattaattaattattattatgtgattatttccgtgtcaaaaatgacaattttaatctttttttaataatttgatggagaaatactaaaacagactaatgttgcctagtaccttttaatgtgctatattgctattagtataattaaatatctaatttcatataatttaatataataatttttttagaatatagctaactaattgtaagacgctaccctgtgttatgggccgtaataagaatgccatacttggttttttgaaggataagatgcagaaaagaattttgagttgggaaggtcggttgctttctaaagcaggtaaaga

SEQ ID NO: 114604 - DNA, 2956 bp, Cannabis sativa
  modified_base (40)..(76): a, c, t, g, unknown or other
aatacatataaaaagaggtatgtttcaaataaatataaannnnnnnnnnnnnnnnnnnnnnnnnnnnnnnnnnnnngtatttttcaacttaccccatctagaagggtatctgggaaggaaggcctagtaggatgtatctcgtaccctcaaggggaactagcccaattagcactaaagccgaggcactaaagatctgtaagggtatctgaggaaggaaggcctagtaggatgtatctggtaccctcaaggggaactagtccaattagcactaaagtcggagcactagagatctataagggtatctgaggaaggaaggcctagtaggatatatctggtaccctcaaggggaactagcccaattagcactaaagtcggggcactagagatctagaagagtatctaaggaagaaggcctagtaggatgtatctggtaccctcaaggggtagtgccggatgggtagttcaaaaggtgtttcagagccaaggttgacatggcactcctttaatactgaatcccataatatcagaactttctgccttatgtcagaccatgagatgcgcgaaccaccaagggagacatgtcctttgtgaagctactgtacacgaagacgacgcatacatgccacataaaaattcttgtctcaatccttatatttaatctattttctttcttttattttatttaaatcgatttcaaacatttcgataaatactttatatttatattacattatttacttattattttaatgttgttttcatgaagtttcgctaaaaaatataattttaaaaacactcttaataaagtatagtcaataaaataaaaatgtaaaaaagtgtaattttaggtaggagaattctcattgttaacagtttttatggtataaatttgtaattttttcaaaaaatattttattaaaaattaaaaaaaaaagttaaaaaatgatgagaaaagattattcgtctgtgttttcatattttatatttttctctcaaaataacatttctttatataagccatattttttgataaatatgcataaaatttgatgtaaaaatgattgaagatggaaggcccaagagtggtagttgggcccattgaaacatgtgattagggttagagaggagcacctacctataaatacagagctcaggtagatcaagctatcctcaagcctcctcttcctcctcttcttctttttcttctgtaaataatggttttgattgattttgtgtttagggttttgattgtttgtatgtgtgtgttgataatatgttttgggcacttaaagtcagacacgggtgtttgttaaatttcaacaataacaagcgaccttttgcagtgtgcctaaactgagttgctattatcacgattggagggagtagagaaactgatgtctcaatgcctcccttcaaatttaaattagctatatatatatatatattcatatattcataatcacaggctctatttataaacgagtcaacagcgagagccattgttaatggtgccttgtctgccgcttagagcccatattatttcaagtcaactgaagatagtctgaaacattcttctcttgtttcatgctacaaatgttgcctacataacaatacaatttatcaaaaatccattcttttttttattatttgatttcatgaattttgaaaacattatcatataaagtaccctttaaagagttttttttccttcttattgcatgtttacaattggcaaaactctatttttgattgaaatgaaattgggttttcgtttgtgagattcaaccttgaattgaatatagtgttgttacattttgagagggtggacagaatcaacagtcaaagaagtaatttttcatttaaaacaagattttagtatgtttgttggactcagaaaccacctcttgattattattatcccaacttgagtttgaaaaccataaaaacatattaagatttttggatgtaggaaaaggaatttagtaatgttacaacacaaccactatagtaacaatgttcctgtataaatacaacaatattttaaaacatactctaaaattaagaaatgtcactcatcttcttgttccagttccttttgtaatcttagtttctctttctaatccaactcaccatacacatcaggtcatcaatgctcaaattgacattagcattcaatccaaattttgaggattcaatttgcacacaaaaccagtaggattagcaattcaaacataagcaatcataacaaacataaaagaagataatgcaagaaagaagaagagaatacaagatactacatccctgttgagcttaccatagaattggtctctgatgacaacattgtggtggaaattccaagtcatacattgattggtaattttaagatcactctcttcctctcctaatctttcttttacaaactgtttcaatctctttctctgaaatgagaggccctgctatatagcactcttggtagttgaggagtctgttatgttcgttataacagttttaagttgcttccaaatgcaattaactgtaattctataaacttaggatttaattccaataaaattcatagtgcatcaatggaaaaagcaagccaaacattctactcactcaaatatgcaaagcctttcaagagttgattcttctcattatttagattgaaatgaattcaaagtgaaaatgaaattggaagatgttgggaataaaggatagtattccaattctccttcgggatcaatatttgcgggaaaatacaatggtgactttaaaattcctttctgatgatgtgaaagattagtcaaagctgcaatcacagagcatattcagaatttttggatatttttcaatgtaaatagtactttatgaataataatcaaaggactaaatgtacgctaagaaattatctcgtggctaataaaaaccacgacaaaccttccactataacaataat

SEQ ID NO: 114605 - DNA, 5598 bp, Cannabis sativa
attcaattttactatttcagtgattgtttatgtactaaaccatgcttcctagactttgaaatctaccaaatcacgttcctcgaactttaacatgttcaagagacatgatttggtacatgtcaaagtttgaggagcaaaaatacctagtgattatatgtatgctatatatatatatttacttcaactattcctaacaataaaatatttaaaatatcattaatcaaagtccaaattgatcataccgtagtccatacagcgatcttggtggccacaaattcactaggcatattaagtgtaaattgtgaaagagtggcatctccaaacattttatatcccataacagctactccagcatacatcaaggtacatataccgaaactacaagaataaatcaagagagaacagagtttaattacactattatcaaactacatttctaatttacataatcaagagaagagaatatatagtgttaccaggtcaagagaactaaagggaattggcttcttttttgcattgaagtatatatgtttggaaaaactgcatgtcctgagtaacaatagccataaagaccaattgccacaggaagagttccaaggttaagtgctgtccctttgttcacgaaaccgattccgtcgactgtaccaacccaaaacaagcatagtactaccattactgatgccacaactccgccagctgatcacagaaattgcatgattaagattgttttctaaagtaaggttaatatattagtttgttgactttttgttagagtttgacttaccagaaatgtagcttagaacagtgaggtctcgaagccatactgtagggagaacagcaagagttgtgatcaatgcaaagagaaggcgtgcgcctattaggaacccaccaatgtttagttgtgcacttggaaatagtgaagacaaattatcactctctaggattatgtattcaatacagcatgcctacaaaaatgagagggttaaaggaaacattttgagtgttgcactagtataataatattaaaacaagtgcattgctattaggcaccagtggtgcctagcaccttctcgacatgtcgtgttgtgattgactagcgatattccctaaaatctattatattaaattatatgggatccaataattagttggaccaatagcgatattgacactggtcccctttagtatttctcttaaaacaatgtgcatatgactacaatggtaatttgggaaaaagtcattggctcattaaaataactttaattagtaggagaattaggcagagtcataaccaataaaaagatagcactactttctagccattttctagttaataaacattactaattagccattttctctcttggtcctactcctatgtcactagtgcactactcaaagatgttgtagcctaataagatcaaaacttaaaacaaaaagtagagattaaagttatttgcaagccaaatctcacagtcaaagaatccaatgaagattcatgaatataaaaggtggccccaaaggaatcttccttatctcttgtgtttccccaataaattattacttttcatgtaacaaaatcatttacataatacatttaaaataaaagacagaggagatgaacttacatataactccacgtatagtattatctgcaaagacaaaaccaataagcatataagcatatcaaaactcaacttgaactcagaaattaagaagaaatgaatttgaactttgaagggtaggtagactaaccgaaatgataattcgaccaggagtgccaaaagcagcttggccaatatccgggtaagtctcgagtcctggctcgctatctaagcaacgagccagaagcacgccagtgtagtaagaaagcgccgaaaacacaaacaaaataacaagtccaagccaccctccttgttggactgcataaggagttgacaagattccaactccacacaacacatttattcctgcataattgaattagttattaccatgtctaaatatgattccaactcttcatattattactcattctaatatgattttttaatcaaatcagaatttatattaatttgacaatatatgatatgtatacactgtcagaagcctggcaggcctagatatttatatgtatatttaaggattgataaagaagccaaaacagcttagtcatatagaaacagatgtatttttgttggttagttaagtgtctccatgtgcaccatgtgcaataagagagtagaagtctaagatacaccacatgataattcatgctaagtttgtttggaagctcctaaatagaaaatgcaaagtttgaaatgataatgcagacaaggagacatactctatactcaaccaaatttaaagataaacaaatctagtatttttaccagcctcaaactaatttatagagaccaaagtaataacatgttattctttcaaataaatatatactaggactaccaacttgtttcaacttgtgtgtttgagaggggccaacatagtaaacaatgaatggtcaggaaaagtggtctactaaggctgaaatagatgggagaaatagacatattaatatgattgggcaacaataagaagcacagggtcctacatgattggctttatttgccactaggtgaaaccttatatttattaaatattggaaatttcaatttttgttttgttatcatagggaaaaaagaaactcataagttacttaccatttgccacagtttgtgcaaatgagctgttgcgagagatagggagctcatgtgagactttagtaaatgatttttcatctctccttatggaagaccttcttgatggaggaatagcaggagggagaaggtgagagctatgcctgtgaggtggttgtggcggtagctgttgccgttgctcatcttctaaaaatggtctcgtcaaaggtaacaatgaatcaggagtgtgccttcttgtaagcgaagacgacagaaaagaacttcctaatcttgagaatgaattaggagtcccaagaaacccaagatttggagatggtacactactataaagatcaatggattgcctaaaaccaccaaaaagatagaatcaaaaaaaaaaaaaaaaccaagtcaatctttgtttaacaagttaataattgaagttcagaacattcacattgtaggcccaattgagtggttggagacatttcatcaaaaccaaacaattaagtaaaagacacataaatgaaatgaatcatatgtgtatgaaagctacccaaatcaatatataattcatcttggattatctgccacttgtagtttcttttaatcagtagcccaatcgtagtatatacttaaataaaataatgcttgccaatttaaaaaataatgtgatatgatttttgaaaagcaacaaaaacataaatgattaaaaatcaaatgataagaggggtaattggtttattaaaaattatattcagaacaactatgatttgtgtccattaattcttacataaagttcgaatctcagtttttagaggttcatccttaatgatggaaactgtgttcacaagattgtaaagtgaaataaaagaagatgaaatattgtacctataactttgaggccatgcggtattattgtatgagcctggtcgatcatggttctgatcttcagccgaggaatcagaacaatctgagtctgagttattttcttcgtcttcttgacctttgagtaaccctttctcatcctcataatcttctcctctttcaccttcgtttaactccttttcttcatcttcatcactctcaatataaaaactatgttcatcaagcgagttgttcatctttttctgcaaatataaatttaacctttcaatcttgaccgtgaccacattcaagggtctcaagcaaataaataaataaatatatatataataataataaatatgtcgtgtttattaatttttacgaaaatataaagaaattttcacgtgatggtgtgtgctaattatgttaatatcatcataacagtccaacactaaatacagaaaagaaatattaaaaagagaaagagagaaggaaaatagagtgaaaaactaacaagattcgaactctgtttctgtttggttgaccagaaaatacaggaaaacacttttggaaaataatctcaaatagcagtgaatacaagtgagaatttttctttggaactcattcatatttataatagtttacgaatcctaattaaggtgggattagtacaaatcaaattttacaattttctaaacgaaaaagattatattaaaattcaaatcttaatggggtactcctatttaatttaggattatggtaaatattaattttttttttataatggaagattattgaaaacattatcagattacacgttttccaaattaagactcttttttttttcctctgatttctcaaataccaagaaataaaaataaaaataaatcagagacttaaaattctcaaaaacaaaataatcagacttaactacacatacaaaaaaacaaaatatttatggttagtgttaccttttattctcgaagaaagaatcccctaaaagctgaagagaataataataataataataatagataataataataaaaaaaaatctcttgtttttttttgttgattcagacccagtaaaagaagaacaaaactgagaaaagttagctcaacgtataaaggtcctgcaatatcgtcacttctctacacgtgtactattactatcaccatatatatatatcattgaatatatagtataaatatataacaaggagattcaagttgagtctgaaacttttgttctgtaaatttgtggttgggttgggttgggtatatataataagctcgatcgaactctgtttttattttattttattttatttattttatataaatgtattgtgattggttatccagcaaatattaattaaataaaataagggaaacacagttcacttacttgatgccatgatgttaataatgctgccaatattgctgagcttattgtactttatttatggtaaataatgttccagaaatcatatttgatttttttttcttttaatttttagaaaaaataaatcaaaaaatagttttctattgaattatcatgaagattctgcatcaaatcacaatggtagtctaagttcacaacaatggcggagccaaccaaaattttgatggggccaatacatgtaaaagtataaaaatttttttacaatgaatcttttaaaaggggtctatactttatagatccatcccttaacaaatctcacctaatgaacaaataataacaaactaaactgattacaaattggagaatatacaatcaagactcaagttaagtccatctatggaatacaatagacacatgtaagatttttttttttttgggtgtctattaatgttttaattgttttgttaaaatatgggctgacaaataatttttagagtaatttgtggcaaaaccccctcaactatcaatttacttgtaaaaaaccatccaaactcatattttggtggaaaacccttcaaaatactgttccgtttacatttttaaggtgtcttctgtccagcctcgttaagt

SEQ ID NO: 114606 - DNA, 2389 bp, Cannabis sativa
  modified_base (2359)..(2363): a, c, t, g, unknown or other
aaaaaaaaaaaaaaaagcaagtaacaataaaattctatatcaatacaacaagtaactaacatgttgtcttatctattatgtattttttaaaataataaatcattgtatttaatattatgtagtcataaacaaatcactacaagttgattaattctggccattactatacaagaacctatatatatagacagtaagacagataatagttaagtgtgggtgtgtggtgtggtgtgatatgtgggtggaactcggtcacggacgggatgactagcagtgggtccaggcagtactactgaggaaaatcctttccgtgaccgaccgcctctcgtgctcggctaacaaatgacgacaaaatatataccgctgtcttcaaacccatgacactctgttgtattaatccttaatcgattcccccaatcctggcagaaagcaagactccattatggtccacattatcattaccccaaattggccattaattatcactattatgtcacaagctaattacattccaaagatctaagtctaatgtgatcaatactaacaaacagccgaaaagggtattaccgtcattctactctaaaacactaataactttctcgatttatattttgtataaaggacttcttatctacctccaatcctcatgcacattattatcgtatagataacacactcaaaattaacgttatctcgtcaccatgaacagcatgacaatatccactttcttcttcttcttctacttcttatcttctcatttcatctcctcctacagtgcttctgatccatgtgcctctcagtcaaacagcttattagatctctctgtcatacccatctacagcaaatgctctcctttcaccaccgcaaaggctgactccttagtcaacacagtcatcaacatggcctcaaaagacccgcaacgccttcagtatttgtccacccttgcggcccaaaagaccacctcagccccaatcgcttcgggccagcaggcactccacattggtaactacatagtacgggcaaagataggcaccccggggcagctcctcttcatggttctcgataccagtaacgacgcagcttgggccccatgttcgggctgcactggctgctcatcaacaactttctctccaaactcatcttccacttttagcctattagattgctctgttgctcaatgtactcaggtccgtggactttcttgtccggttactggtacatccccttccccttgtgtttttaaccaatcctacggtggagattcctccttctcggcctcattgtcccatgattctttgcggttagccaaagatgttattcccaatttcgctttcggatgcgtcaactccgtctctggtgggtccgttccgccacaaggcttgttgggcctaggtcgtgggccaatgtcattgctctctcagtccggttcactctactccggagtattctcctactgcttgcccagcttcaaatcctattacttctctgggtcgctcaaactcggcccaatgggccagcccaagaacatccggaccaccccattactcaaaaaccctcatcgaccatccctttactatgtcaaccttacaggagttagcgtgggacgggtcctggtcaacatagccccagaatacctagcatttaacccgcaaaccggatccggaaccgtaatagactcggggacggttataacccggttcgtggaaccagtttacgcggcgataagggaggagtttaggaaacaagtgaagggaccgttctcaacgctaggagcgttcgacacgtgttttgaagtgaatagagaagagctggcaccgttcataacgcttcactttactgggatggacctgaagctgccactggagaacagcttgatacacagcagcgccgggacggtggcatgcctggcgatggcggcggcaccgacgaacgtgaactctgtgctgaacgtgatcgctaatttgcagcagcagaatctgaggatattgtttgatgtggccaattctcgtttgggcattgcccgtgagctttgtaattaagtaacttacaagtaggtaatgagaatgaatgatccgtacgtacgtagtcctttttctttactaaattaataaattctgtcgtaagatggatatatgatattggattatgtatgtataatgtattaatttgattttaattacgtacccaacaaatattcgatgatctttgtcgcgatattttgatcttgatgaatgtttactttgactgtgggccgatagagcttaacagcaaacaggggcggaggggacacatgcccccctcaactttggggtaagttgaaaaatgcctcttttattcatcaattaatcaaatttacctnnnnntttatatttatttgaaacatacctct

SEQ ID NO: 114607 - DNA, 1924 bp, Cannabis sativa
ttttgccaccaaaaataacaccaaaaataaagataagagggttaagtgtataaaaatcaaaacataagggggtttcgccgcaaattgctctaataattaatataaataacgtgttttctctctctttggtttcacatgggagtatgggatatatagtcgttcgtacacaaaaaagtcttttttatatctcattatgagatttgttgtctcagttttaatgctattttatgttagttttattcttacagtaatggtattttaatatagattaatatggttttggtgattggacgggagtttgttttttattaaatcctttgttaagattattgttagggttttttttattattattataaatgacttgattagattttgctcaagttatatcttcatgtaaagaactttgtccaattgatttaataatataaattttattttctctttcttaaaaaataaataaattaatatccggtttaatatatttcaatttaaattaaataaaatttgttatttaattgaattgtagcttcttttttcttattatttgggtttgggattttattactattgaatggtaaaatgggagaatatccaattagagattatagggggactcaaacatatattataagaggataaccaaaaaagtaaacctcgttagacaaataaaacaaattaacaaagggacatgagtactctctaggataggaccaaaaaaacaaaagaaaagaaattattaattcattttaatttatttggtatatgaaaattaatctaaatattttgatagtggatttttagtaaatattttgtggaatttatagtacctttgtatttaaaggtgatatgtataaaaacataatattagttttagagtgatgattaaattattttacacatatttaatttattttttgttccctcacaaaaacaaaatatatgtctctctcaaattctgagtacagttgcaacatagtgaaattaattaagaaggtgatatttcttttttttttttttttaagaaaaaaaacaacaaaatgagatggacacatcaatggacaaaataagtataataattaagatcataaatattaaaatttatccaagatatatatatttttggtaagtttataatacacttttttaaagatttatatttggtagacattttatttgatttagcatttaagagagtattttagtttaattttttttttttataattacgtatgttgaagttatacataattttaaattttataaaattttgaataatttacaatattaaaaatatgatttaaatattttagtattttaatttatttagaattttataaaaaatttacatataaaatttatctatatatatgaaaataataaggctaaatttgatgtcaaaatgaggtctacgagaaaggagtgtcctggagagagacccctagctaattatatgtcatttgaaataaaataattatatgatattttttaaaaacaaatttgaccgaagatccaaaagaagtcaataattgcatgggtgaccactaagggccggcggcaatctctctcacccactaaaaacaagtctccacacaacctttgaaatcaaatatctatatctatacataataattactacttattattgctttataataaaatgtcaccacttataattaaatataaattgtggtagatgcacaataataataataatgactcaataactcacttaattaagtatttattatgatgacaaatatgttagaaggttttatagtagtgtataatactatttgaagatgttatattattatggctaatcaataattttttttccttgagttttgacatgtactaaatcgtgccccttaaacttttttggccgttaaaaattctcctcgaactattaagattgttaaat

SEQ ID NO: 114608 - DNA, 880 bp, Cannabis sativa
caagaacttattgaaacaaaaatttaaatattcataatatgaaatcataaaatacacatagaaagagcgagagaagctaacagtttcccaataattgcgtggtcgacggtctaagacaggagtgaagtgaaagtgggcagccttataaaagtagcaggaatggttggagttgaagagagcagctttgatggtagaggagtaacaagtatattttcgaagaagtaacactaaaacctctgtgattgttcgaataacacagagaaaaatataaaactaaaatactgtacataccttagtgatgatggaaagagagaagggacttttgaataactgttttgagtaaaataactgttagaagtgaaactacatttgtcttgtcctctccgaggttgataaaccgaagaaaaccgaaaaggctgatagagcgattggattggagaaagagcagagcccaaaatgaaacccacccacctacgtatataactgggcttaaaagaatacaatcacacccacctttttttctaataagagattttcagcctaaaatatacagatttctttttttaaattaccattttgtaaaaataatgtaaagaaataacaaatcatatttttgttttaagataaaaggtcaaatctaaaataacaactcatatttttgtaatcattttattttttgttatttctgaaaatttatgaaaataatccttaactaaaactacccacatttctcaatataattattatatctatatattagatggatcttgccgagccacgcattgttagttttatttagagttcatttgatacgttatattacactgtattgtattgtatagtattattaaattatattttatgcaatatttttatgtaa

SEQ ID NO: 114609 - DNA, 1147 bp, Cannabis sativa
gtttgagttatgaggggggtattttcgaggttttcaaaaagttggcatattttttatagtgtaaaatgtattggtttaaaaaaagaaaattaaatttaataagtgtagaaaatcaaatttccccttctcttattatattataattagattgatggtacattgtcgttacataccatggacaacttacctatatgtttagttttttttcttcttttaatttgataatgaattttcatttttaacttatattagataaagatggaatttaatttaaataaataatattattatgtttgatatagaattttataataaaaacagttttttcattatacttttttttttcttaaaattacatttaattacactaataaaaatatgaaagtaaaaagagtactaagtaacagtaatatattttagaaatccattactctattgagagtataaatcttatataaatattatttcttcatgcatgtgatcattcattagaaatctatgataaataaattcagattatgctttatatatatttgtatgaacttactctgaatttgagcacacaacccatacataggatcccacttgaatccaatatcacaaaaacatctcttctgtccaactctaaccggatcaaccaaacactttgagttcatcaagttcatacagtccaatgacccttcacaaatgggctcactcggcaaaccccattccaactccatctccggttccggccacttcacagaaggcatcttcgccatcgccgccggcccagacgtcacaaagctctggtatgccgagcactcatctcctccaattttcaccccaaatccatattccccaacgttcgaaaccccaaccttaaacgaacaacacgacgccgttttcatgcacggaacaaccaaattatccttcacataacggtggcaaaggccgttcgccgtacaatcgaccggcggacgctggcggcgaacgtataaattcgtacagtttagtagcaagattgtattaccggcggcgactttgaacgaggaattgtggtcgagctgaattcctcggctacgaaaatcagtggatacacacgaattggccgcaataccggcgggtcgaatcgttaatcgccgagtgaccgggttgaccgaggtga

SEQ ID NO: 114610 - DNA, 3221 bp, Cannabis sativa
tcaaataactccctcatctgacgactgtcgtacatcacggattacaatcgtgaaagtacaataacgggacaaaatcatatccctataaatgtattacatgtataaaaatatctacataagcaattattgttggtaaaaaaaatagatggttctttaaatttgctaatgattgagtagtttggaaaaattttattaccaaagtttaaactataaaattaaaattaaatacaaggaaaataacaattaaaattgagagagattaatagtcaaaaaactctatatttatatatttatatcaagcaagcaagttaactatatgaagaaatttaaatcaaatatggttactacgtataagattaataaatttataagccaaaacgaagaattaatgatgcattgccattaatatcaccattcaagcgaaatgtaaaatgatacaaggaaagggtacgcaaagatcatgcaccatactcgtaattttcatcatttttagaattgaaaaccacaacaaaacaaaaataacaaaacataaaaacctcattattttcttgagttatgagattttgattaaaaaacaacaacaaaattgtgttgtcaaagactgcactaccaaagataagctaccatgcattattaattagcctatatattagggtttcaaaatgtgaagtccatgagatactgcagaagaagcacaatccataggctgaaacccaattctctctttctctaaatcatacacaaccttcatattctgttgttggaagcttccaaacacgccagccggcccattttcgccatcttccatcctttgaaacaataagcacttagtcacagtggcgttcctcggcggtcccatggcgtagaaatgggttccttcagacaaaacaatgctcacattgtttaaaaaatggaatgtaattgatggaagaatatcaaaatcttctctggtagtatcaatagtgttactgttgctggtgttatcattattatgaggattagtatatggaattctatagcacaaatcgaatccggtcttcatttccatatcctcagctctaggataataagatatcactgagctaagtgtggaaagaagttgagagtagataggctcaggaaaatgtgtatatgttgtgcctgagtctatcaacataccaccatttcctcttgagtcaaattctctcaaactcaaaggcacttcactacttgagctagagtttcctatggtaatggcttctagacctatatagtaagagttagggtacattgaactcattaacattggggtaaactgcaagttttcatcttgatcagaagaaatactagctaagtttcctataactagtgggcttgaaatattagggttgtttgcaaatttgaagggcaagaaacagtgagaaaaaccctttagaagaaaacctaattgggatggaagtgaaagagttcccctaccaaaccctgcaatcccaacaggctctttataagtggaccacacacacccaaatgaaaagtttggtatttccctagttggattactaataatagtaccattattattaatattaatgctaatagtaacatcattaatattttcatgaaccctaagggtatctctagtaagcatccctgtgacaactccacctgcgccataagtgtaagcaaaagaaggacatgacctagcacatgatgatgaggattttatgagagtactcaacaaacaacccgccatggtacaagggtcaatgtagttatctgagctatgaatgtcaatacaaaaggagctactacaaggctctctagctgtggaagaagaatggaatggagagaaagcagttgtcaagtagtacttcttgttgatcccatcatcatcacaatccaagcaatggaaaaaagagagattgttcccgcatggaacccaagtgagatcactcccggtatccatgtacacatgaatgagttgtgggggtgtacctaaataaagaggtattaggtacccatctcggactgcccttaatggctccaccatgacaaagggttctgattcatgagtacttgcactactgctacctgttgttgattgaactgatgagacagctcgttttggagttaagagagtcgtccttgagtgcttaattccaaggacaaaagagttggctgatgaactctgcaattgctttctggctacggctgaatccacattcagaaacacgctgatgatcagaatgagaaaaacataatccatgattctggtgaagagagtggttctgtttttggtcatgtattgcatgatcagatacaatatatatatatatatattaccactcatgtattctggtttttatagaggaaaagtttagggttttattattggttgataatatttagttaagataggttaaaagaaagtggatgcagacgtgtatgtgcgtgtgtttatatgggtgttgtattggccggtacgcaaagccaaggatatcttaacggctaaagctgatcaatggagaaacaacagaggattatagacaattaaaagcagaatataaggaaacttaattagttaattaatagttgagtagtgcgattgcattgctactacttgtatatatatgcatgtattatataccggtatatttttctcttatatgtagtacgaattatgtattataaattatgattatttcatattataacatatatttatattataattagtgggagtgggatacatctctggctatatataaatataatatatacttgtgcgtgtgtgtgtgcagctttgcatagtctaagcatgcccatacctgcttatgatgagtactttgcatagggtgatattatttaaaatctgttatgttggaacacttttttaagggttggcggttactaaaataattgaggggctttttttttcatgtatataaaaaaaataaataattaaattacaacaatacttatagtaagccctatacatattgatataactcataaactaaatattaccaaatattatttcttttactacttcagccgcacacggaacgaaacaaacaacttcacacacgcaaccttcgatcgaccaccccaacaatccaacacaaccgaaacgaaacccaatcgaaagagataacaatacaatagattttatcatatttgcaagtattttatatcgtcaatacaatataaagctctttaaaaaaaaaaacttttataacatg

SEQ ID NO: 114611 - DNA, 1555 bp, Cannabis sativa
taggaaagggatcctagagaaggtcctgtgcctcgtcttgatacctgcttatgcatgttattgtctatttcaacgcttgcggtcactaacattgttgaggaagaggaaagtgaagagatggaggaagctgaacaatgctctactaatcaaaggatagacaaacagtcttttggacagcgtcgcaaggatttagttaccagcttacagttgctaggtgattatgagggcttgttgactccacctcaatctgttactttggctgccaatcaggccgcagccaaagcaatgatgtccatttcgggtcttactgtcagcaatgggtattacgaaagcagtggtgggaatgacatgccaataaattgtagtaagtagttgtatgttgaaatacattacatttttttaaaacttctgttcatatacggggatgcttttctttggcacccggtgcaccagtttctttgtttccctttcatctatgttttgtttaccaatctatgatgttcaaagttacttttttccccttataaaataaattaattcaacttggccagtggtttgttttattttaacaattttctattctctatttcctgatttcggtgtcagcttagatttgctgatagcatctctgctatatttagtgttttctattcactagaatttgtgggaggagctccttcctttctattttcccgtagtgtctgtgtggttatagagcagcaagctctttccttggacatttgccagcctttctgtttttgttatttatttatcttttgttatcctaacgtattgttctgtcttgcagttggcaacatgagacatctaattgttgaggcttgcattgctaggaatctactagacacttcagcatacttctggccaggctatgttaatgcaggcagcaatcatttgcctcgaaatatgcctggccaagtgactggctggggagctgtggtgaaggggtcccctctaactccaccactcgttaatgctttgattgcaactccagcttctaggtatgctccttttgtctttagttaaatcctttttttctctagagaatctgtaatggtggagtaattactttattttgttgatacctcgtttttgaaccaaccttgcatgcatggctgattttgaacagacttttctaaatctcctttttccaaggttaaatgtaaaatttgcatcattagagtgattatgatattcatctataatatgatatgaaataaacatttaactaaccttaagaatttcatttagcatatttgtggcaaaaatactttcgtttcactggaaggttgcacgttacacaattttattttttgacgacaaaagtacctaagatcaatttttagttgtaccgtagatacctactctgcgacaaatattttttattagtatgattatagaaaatgagaatttgtaatatgtatatattttgggtgaatagaaaagagtaatttgcggcataaatacctaagtttaacttctggttgcaaataaatacctaagtttaatttttggcggtaataatgcctaagttata

SEQ ID NO: 114612 - DNA, 1337 bp, Cannabis sativa
tattatttttaccttttttttagttaagggtgtagccacaaaaaacaaaagataaggagttaataatattagtaaataaagaattgtactgtcttctgctcagtctgtatagggataaggaaagcaagcatgtagactaagttagagacttttactttattgccaacctaattatgttgccttttgctttggattccatttagctattcttttcatgtatttttcttttctttcttttctttttctttattgaggctttttaggcatgaagaagaacagggtgatcatgtacagatgtttagtaatcttccaaaacaattgaacttggtatggtaatcatttgaccactactaccaccatcaccatacctttatctcagtctcagctataaataatattaagggcccaagtttgtgattcaatttataaacagtatgattagctaaatacatatatgattttgttacttcaaacttaaatatgagtaaagcataaatgaaaatgagatatttatgtgtgttgtatggatctacaatacatcatgataagaatgcagcatgtgagttgtgacatgttcatacactttgacagtatatgtctatgtaaattgttactaagacagacatgtatatatacacattatatagataaaaaatggtccatatgtgagacaagaccaaagggtacttttttgttttcttctgtaaatgttcttctattcccacattttcatgaaaaaagaatacaatgaaagtgatatgtggatagtacatagaatactgtgatgaagtatttgggctaaaaagtttgattgcccatggatctggtttgggccttggactattattttatttccttcctcaagcatgaaatatatataggcccaactatctctctctaattctgtgaccgagtaatcatgagtccaaacaacttgaacagtagaacaacatgggtaggcctagggcctaggctggaattgtttccttgtagtggttaaaattggtgtgtgtttgtttagtcaaatccaaatctaaattaaaattggatgactttgattctgacatttgactctgagaagtcagaatgttattcatacaagaaatggtaaaagacactatactattttcggtgtctgtcttatgtgttattagtataatttagtattaaattttatataacttaatgtttttttaaaatataatattattaatcacgttaaatactagtagtgcttaataataatgctttatttataaaaaataggctaattagtaatttttctcttgaactttgacatgtactaaatcatgtcccctgaactttttttgccgtta

SEQ ID NO: 114613 - DNA, 4786 bp, Cannabis sativa
  modified_base (28)..(31): a, c, t, g, unknown or other
  modified_base (76)..(76): a, c, t, g, unknown or other
ttgtttttcaaaaataaattttttaaannnnaaaattttacttttattttgtaattaaaaaattaaaaaacaaaantgttaccaaacggcacctaagaaaatcaaatttgcatgagtcaaggtgaaagggagatcgaagaacaattagttgaacctctcaatatattaagtaatgttaaagagtacttacggtatcttttagtatagtattgctaactagttataagtcgcgcgccattttatagttaacttgacaccatcatcttattatagttaacttgataccttggtattataggacatgcatcgtctaataatagtactgtctaacaacaacaaggcataatgttattgtctggagaaggtcaagtgtgatgattctaagactgtgtaggtatgagactacacagttgaagagaacttaaattaattgattagtactacctatattaacagggtgtatcttgttttctggtagcccatcacgaaagaactccacggttaaacgtgcttgacctggagtaatttcaagatgggtatgcgagtgaggacaaaacacgctggaaaaatattccatgaagtagccaaaatgacgtactcgtgtacaagagctatcattctgtgggtgtaagggcccaatggaagcttaaagtggggacgtgacatattctgtatgcccctgttttctgtcaattattgtgctcggtttgaaaatattgtcattgctaattgtttaattatttaaagtttcatttatttgattctgcacttttagtcgtaattttcccatatgtacttataaatttataaggtacaaataaaatttcctaatttattaatatacgatgatatttaaaaatagaaactaatatgtaaaaaacctagaagatatacataataaaatatcaaaattgttcatttaaagtttaaacaaatattttttactataaaattgattaaattaaacaacttaatattgttattactgataattttttaaattatctcaaagttagttaactcatactttttcttttcttcttttcaggaattaaactatcaaacaactagacataaaagtagcattaaattaagctaaaaattaactcatgttattgttgtgaccaagtcttataataattttaattggttgcatattctaacaaatatttctaacatataatttccgaaaataaaagaatatttggtatatagaaacaaacaaagccaattttagaaaattcaaacttttgtagtgacaaaagcactactatatacaacaattaactacaattaatatatcattaactacactaaaccaaaatcacaaccaaaccctaaaatagtttaaacaaaatgtcccatacattatgcatgcatgcatattcttcttactataatattatccatacgtacgtactcaaaataataataataataatgcttcgttcattaacccttctttttctttttctcctcttcctcaccatagtcgtggcctttcgccacaacgatgaggaaagtagcgagaacaatgaaacagaagaacaggcatcgtcgacaacttctctttatttaaagtttttgatgttggccaaactaaagtgtctaattgtcatctttgttgggactttcttcgcaggcgtgtccccatattttttcaaatggaatgagggttttcttgttctcggtacgcaattctcaggaggggtttttcttggaacggcctttacacatttcctagtagaagcaaacgagacttttgaagaattgatcgaaagaaagtatccatatgcttatatgatcgcgtgtattggttatttgttgactatgtttgcagactctattgtttttcatgtgtgttccaaacaagatgatgatgatattgagtatcttggtatatatctatatttattataaattattttgttttgatgaaaaaaattggttttttttttgttaggttaatgtgtgtttaaagtttctatctttttttttgtgttctatattattacaggtaattgtgatgttgagaatgaaaagatgagtcaaattggtggaataactactctacaaactcagttacacgtatgttataaaacaataaggattaattaattattagaacaattttggttttcattgtttgcaattttgttattgaaaaattattggttattgatttttttttttgaagattactaagtgaattcaataaacaattcaaataatacaaaattattgtaaacttatttgatcagattataaatcttttatatcagaaaccaaacctaatatagatcaaaataaatgaatagaagtaaaaattaaaatatattgagttttaaaatagtaagaattgaattttatgattactattttaacaaaattaattttaagttttctagctataagcatatttggtattttcatacatatagaaatattggctttcttattttttacaaaaaataaaaaattataatgagttaatgtttatcaataaatttaactaattaatgcttgttaattttcatgtgtagtttcaacaaagccatgagagttatagtaacaacaaccattgtacatcaaatctagctgcaagtgttacaagagtgaagtcatttgagggaaatgttttgttgattattgtgttatgtttccattcaatcttcgagggaatcgccattggagtagccgagaccatattcgatgcttggaaagccttgtggacaatcactttacacaaaatatttgcagccatagccatgggaatagccctaattcggatgatccccaaccgctctctgatctcatgctcggtccatgcctttgcctttgcgatttcgagtccatttggggttggaataggactcatccttgatgccattgcacaaggtcatgtggttgattggatctttgccatttctatggctttggctagtggtatcttcatttatgtctcaataaaccatcttttaatcaaaggctacacacctcttgataagaataattttagtgtaaataaatctcattacaagtttttggctgtgttgtttggtattggggtgattgatgttgtgatgatatgggataattaaactcacaccatataaaattgttcttgtatatatacaaaaagaaaccctacttttggtgggttaggttgtttctcttgtactagatgatgttgtaaattagaaaattggattttaaatttttattattaatgcaaaaatattttaaattgttcaagatgagaaatatgtaggctcaatcctggactaagagcaggttaggcccgtgcctaggactcacctattcgtagggctaaaaagaagttttttgtgttatttagtgctcaatacttttcataagtggcgcctcttgattggttagcgatattccctaaaagttattttcttaagttatataggattatccgatattattaattacatcaataacactgaagaaaatgctaaacatattttttttaacaattctcctttgtaaaatgtgtttaaggccaaatatataacacataatgaaccccacctaccctacccaactaatcacattatccatcacataaaacaataaataattttaatatattatatataactactcataatttggaaagtcacactaacacaatcatttatagtaaggacacatttttttagagagctttttgcgcctaaactctcctaattattattttacttgtacttaactatccaaatttaaattttgatggctaaacctaccaaactttacttttgttagtaaatttagttttccaattaatgtcctaaaacccatgttggaccaaaaatcgaaccaaccattgggcccaatcgagctcatatcggaccccataaaaaaatgtcccaaacccacttttggaccccatcggacactcatcggcgggcccaatcgggctttcatccttgtcatcctacattcactatgtatcaccaccatctggtgggcatcggaccccatcggacaaggaaaaaaaatactgaaaccaggaaaaatacagtattcacagacaacaagtatttcaacacaaaataacaaaataacagcaacaacccactgatcaagcattaaaacaacattctaaactaaatataacaacaacaaacaagattaaaaaaaattaattacccattgatgcttcgtatatggggagcttgtaatgttggagcttgtagtgtggtagcttgtagtgttgtagtgtagtatagtagcttgtagtgtagaaaatgagtgaagagaagaaaaaaaaattgtggcggtggagtagagctcgggtgggaaaggaagaaggaatgggaagagagagggaggtgatgtaaatagggagggtaatttggggataacataaaagttggcctatcctacaaatattggtaattataagttatgagaaattttttaaggtaatgtaagcatatttagtcaaatttgtcttatattatccatcacataaaacaataaaaatttttaatacattatatattactcataattttgaaagtcacactaacagaaacatatatagtaaggacattttttttaaagagttttttgcggctaaactctcataattgtcattttacttgcacttaaccatccaaattcaaattttagtggctaaacctacaaaactctacttttgttagtaaatttagttgggaaatttgattttctatgcattttttatacctaaatttgttccttaaactaatagttatagctattgaaaaaatgg

SEQ ID NO: 114614 - DNA, 1704 bp, Cannabis sativa
  modified_base (28)..(39): a, c, t, g, unknown or other
attgcataaaatacaattcaatataatnnnnnnnnnnnnaatacaatacgacctaatacggtgttccaaacgagcccttagtgccctaaattgactggtaacaactatttgggtgtgtaatttcaaatatttagtcccaccactatataaacctacgagttcactttatgatactaagtttctatcaagagacactacaagaaaatagagtattaggggcgactttaaacttttatcgcctcaaaatatttctagatttatcaagcctaaaatatttttttagagcacattgctagaaatattttaggcttaataaatctagaaagttttttctatttctctttcctaagtagtggtagtatgggtaaataagtttttagactaaagatgtaagacattgtttaaatttaataattctcctacttatcacttgtggtttttagtgttgagattgctctcacattactttctttttggtgctttttttaccgtgtggttatttacatgttggttatatagttttgagttatgatttgatctctttatgttttatttttcattttatgtgtatttttataataaatttgtaatattatttaatctttattataatagttcaatatatatagttgtaattttgttgaatatgttcacttttttttttgtgtgttacccatgttatttttacgtggatatcacttagataaaattattatttttatctcttcactactttattaaatatgttaaacaaagggattttatggagagagagaggttggtgttgataaaaaataagtcatataagtggggtgcccccaaaagggtatataattgggtaaatattattttggaccctgcgttttgcaaacgttattaattggactatctattttgttaaatgacaaaatagaccgtgtattttacaaaatggtacaaataatactctaaattaattttttgacaaaataaaatttaattataattcgatctaaaagtgttatgacaaaattatttacaatttttgtatctgttcgtattaagaattgttttcaagttgattatattaaaaaagttgtcaaaaattaagcttagggtcctatttttattattttagaaaatacaggtctattttgtcatttaacaaaacacaggattcaatcggtaacttttgcaaaacaaaaagtttaaaatagtatttaccctatataattagtcacgactcctctccttgcccaaagatctatatatgcaactctagtggatgtgaataaagtgaaagaatagtttgaatgggaacattcttaacatagcttaataaagagtcatggctatggtttgttgaaagaacaattaatactgtgatcttaagtttattaattctacatgccaaaggatatttttatgaattggatattaatttgcacctatttattacatcataatttgacattaagcattttagttaagatgccaaattcaataataacaatattcttctaatgtactgttttactgagattaatgttataattttcatttattttaagagtgttggcagtaataccaccactactacaaaaataccctttagagacggttttttagccctttaggcatcggttttcgcgaaattcgctaccgacgcctatcagggcgacgctaaagggtttatatgaaccgacgccatatatacccctatgg

SEQ ID NO: 114615 - DNA, 3185 bp, Cannabis sativa
tattcctcgagggtgatccagatctgagctgcactgttgcaacctaccattcgcgtgaggattttctcagtcattgacgaaagtaaccaagaaacaagaaggctgtcttgaatgttccattccaaaaaatcttcagagatgcgatcctctgcttcatcctctgttgttgcatattttgatggtactgctttaggatcaagatacttaagtagacgatgacctttgatagctgcatagacttggtgtctccacggaaggaagttgttatcatcgagtttaactgaaagagtatgattgaatgagatggacgaagatctcggtagttgattggaaccagtgggacgaagaacagaaccggctgaatttgcagacgccattagaacgaaggaagctctgataccatgttgagtttagagagaaagagagaacgagagagaagaaagatattctttattattgaatgaattacttcacatcataacagaaaagaacttatatacagcaagaagaacaaagcaattagttacagagttggttaaactgacacctagcaaaacagaaaactaaccaactaattaacagaaagtaactaactattaattgatgctaaatgctatcattaacaagtactacatagcatacctccataattttttgaattacattgcccaaataagaatcacatgaactattagcgagaacttttttactaattagtgaagcccatttgacacattgacaaatgacaaggaagactgcatgggctttagccaccaccggttaaagaaacatcaagaaaaaaggaagcagccgcaacgacactaccttgatcgttacggagcatcatcacaagaaaaaataaatattatgccatcgctcaatctcgtgaaaattctctctaaagattttgagtagaatgatgatgatgatgaggtttgatattgaaaaatggcatatctttaatctaaatttctttaatgcaagtccaagaccttttggttaagttgatataagcatataattttgttaatttatattacatataaaatatgtatatttgtttgttgagtattgttattggatatcagtaatattcagtactttttataagtgacactctaagtttagttaataatattctctaaaaattattttttaagttatatgaaattcgatatttaattatatatactatgacggtatgacaaaaaaaaaatactaaatacatatcttttagcatttctcttgttgttgttattgtagtattaataagagtagtgtatgatataattaagaaaagattagttgtaaacacacattacttagtacttacaaccttataatacaagattttctttatagttagttatatgtattagctataatttttgttatgtgtttgctttaagggggcccccacttgctatgcctttaagagacaacaaacacgttgtgtggagttgctcaatttaaattttaaacccaaaaaagtctttgtttacactttcaattatttatttttattatcatttgttttttgctttaccttattctagggttaggcggtggcggttagttttggccctactatccgtataccctcaattgcacttgtcaaaatctaatttaaattttgtgatccaatctccaatttttctaattattatgaatctcttgcctatctatgggtcccaccctaacccctacttgttctcaataaatattatatataacaaaatgcctgaataataaaataaacgagtaattattattttggattcatttggattttatattttgttaaataataaattaaattttgtatttttaaaatgatacaaaataatactttaaattatttttttgtaatttgatttaaagttgtcatgataaaactaattaaatatattttttgcatttatttgtattaaaaattatctttaatttaattatattaaaaaaaattttatcaaaaattaaattcttaatataattttataaatataaaatccaatctattattttataaaataaaaaattcaattaataatttttacaaaatacatatccataataatattaatccaataaaaaacaaaacaccttcatataattcaaatggacagccaattcaatgcccaaacatgcaatctgtctctctacatgtgaatgagaaaaccattggttcattaaaccatttttctttcatcatcatcattattattattattattattaaaatagcacacacaataatgtaacactgttaaaagtcagtctattgttgggcatgtgggtggattagaaaaggaaaaattaaaagacaagattatcattgtttttctgctttgtgcttgtgatggtaaataacattaataataataataataataataaattaattaaaaaaaaaacattaaccttaaaacttattaaaggtacctttctttctcttgttataactttatttaacaaattaatacacagtaagttaagaaataaaaattaatacacaataaacaagacagatcatgtggttccttgaggcactcaatttggataatattaacataatatcaataataataataataacattaataataataatagcatgttccttggaaccgagtgaatgtctctgtcaaactcatgattaaaatcaacgacactctttcattgattaattaaagcaggttttcatttttaatttttacaactgcaactatattttctttgaatgaaaattctcgtacaactttattaactatcaaattttgctaccaaatacattaaaaatagttttcaaattaaaataataattaaggtaaaatataaaaattttaataaaattatgagctattatattaagggatgattttacaaaaacaataaaaatattcctcaacataactgttaataataaataatccgtttcacgaatcactacttctttgatccaactaactacaattatatagttataattaataattattaatctgcgtgtatagttaattaatatttagttctatttaagaatacaagaataacttctaatttattataaaaaaattaaataccaatttaggctagttataaataaaaataacttctaaattgtaattagttatacattttttaaatccggtattaacaaagtatacctctatataagaataatt

SEQ ID NO: 114616 - DNA, 3007 bp, Cannabis sativa
aatggaataaaaattgtttcctttccattccattctatttcattactttcaaccaaacgccaccttagcgggtcgaagcttcacccctaaatacttcaaaggataggaaccctcttccatttgaacaatgttcataagctgatatttgcgattcatatcaatactgtcaaaatagacatgagatttccctttgttagccgagagaccaatggaagaacaaaagcagtcaaatgccttttgaatttttttttttagagagttcacattccatttacaaaaaatgacaagatcatcaacaaaataaaaattaataagcttcaacgaattgcacattgggtgaaagccaaaacctttaggacccgaagctttgaatcagaagcctagttaggtactctataattaacacaaacaaaagaggggacatgggatccccttgtcaaatgtctttttcccctttgaatgagccatgcaaatggtcatttaacattatagtataggacgtacctctcaggaaaaccatgatccaattgatgatttttttcagaaagtgaagaccattaagtaagtcaagaaaaaaatctcaatccactgtatcataagctttactgagatcaatcttcaacaaacatctaacaaagacattctttcttgtattcccctttagaagaacttgaaaaatagtgatattataggcaagaaggtgattttgataaaagcacctggattgctatgcaccaaaattgggaggaccttggcaagtctagagcaaatcatctttgaaatggtattgcaataggctatgagtctgaaatcaatagcagacactgacatttcagatgtcagaatcaaggagataccagttttgtttagcaaatctagaatcttaccaacctgaaaaagcttcaggactgcagaagcaatttcatctccaatatcagtcctagaaccaaaaccatcggggcctggactcttagttgtatagatactaaacatggcagatttaacatcctctttagtaaagggtctaacaagattcacttgaagttgaatagagagtttaggacccatctgtaaacaatcaacattcatttttctagtggcagtactgtgcctccccaaaaattcttgaaatggttaaagtaatgatcaacaaccctgttataatcatcaatcacctgctcattctccataaaagtagtaatacggttctcagctctcctttttttaaactcacatgaaaaaaatgacaattttcatcaccatattgcaactaattaatcttatttatttgatgcataaagcttgtatatccttgattaacaacctaaaattcttcctgagtaatcttttctcaaccaccccaaaaagacctttacctcgagaaggcttggactaattctacaaaaccatgaccttgtaaagattgtggtccatccagaagttaaagaatttgaacggtttaatcccaatatcaccaatttgcaattgtttgaccaaaaaaaaggtatgatcagaacaaacttcgcattgaataacagcttcggtattagggaaacaatctaaccacttctcattcttgaaaactcgatcaagcttagaatatatgtggaccccatgatgatgtttatttaaccacgtaaaaaatgaaccaaaagctttcaattcatccacttgaccaagagccagccattgttgagcatcaacaatgtcactagcaatcacttgacgctccccacaatggtcctcatagtgaaacatagcattgaaatctcgaagcacaatcaaagggagattcaaataccctatttcagcaagcagagaccaaagagctttcctttgaaaaatggaattcttctcatatgttgtagccacaaacaactcagtcttcaaactagtaatcttcaatttacagtgcaccatttgaggatcttcgataaggacagtaacctgaacaaactttcgctgacaaagtaaaagaatgtgaccttctaaaatagagctcgaataaaattcccaattagggaaattattacgcatcattgtgtcaactttaagtcccttaattttagtttcaaagagggcaccgaactcgaatttatgcaagcggcaaagatcaaggatagatctttgcttattttctttattcatccttctaacattccatcctattatgttgcactactccataatcattagtagatgaagaggctgacaaatacccaaccacaggttccttaagaacatcatattcgttactaactctagctggaacttttttctcataagactttttctatccaaccctttttggagtaatccaaatatcaccatctaaggcttattcagatcattgtttctattattcatctgagctgaaatggtatcatctttcacaacttccacctcaattttgtctaaggcaaaagtaagcaaaattggttccatagtggcagcttttttagcttccactttggactttttcacccacacaagaccttgatctttagagcaagtactaacattgtgacccaacaacccacaagccgcacatttggtcaaaagccattcatattccacaaccttctccactaattggtttctttcattaataagtgaaaatgaccaaaggtggcttatttgagatctccacatcaacaatgactctagcaaacttaaccattgatctatctccagtaaccttatcaatcattattggcttaccaattgtgctaaccaaagcactaagactcttcttcccctaatactgtaaaccgagtccattcaaacagatctaaataggaaccaatttcaccatttttacagaatcaagatcaactgttcaatgttgaatcacaactggttttttttatcaaagtggatcacacctatctctggcacaaggtcctttgttgcttctgttgggaatattttaccaagttctagatttactaacaagtatattttattaacatcctaaatatgaattttctaaaacaatgaaaataaa

SEQ ID NO: 114617 - DNA, 1440 bp, Cannabis sativa
ctgaagataaacttgaggctaaaagttacgatatcgagttgctcgatatgtcatttatgacaacaaactatattgcatgatttttagccaaccgttgcttaaatgtatcgatggagacgaatgcaattatatactccatgaagtacatggtggtatttgtggcaatcacaccgaaagtaattcccttgccttgaagatcattcgacaagattattactggccaaccttgcgagtagacgcgaccaattttgccaagaaatgtgataatgtcagtgaattgcacctacgtcaatagaccaccaagccagttaaactctatcactagtccctggccatttgcattctgggcatagatttaattggcgagttaccaaaaggaaaggggggaataaaatatgcagtggtcacaatagactatttcaccaagtaggctgaagccgaggcttttgcaacaataacacctgcaaagtttgtctatcgagctattatttgtaggtttggcattccctaaatattaatctctaataacagaaagtaattcgattgtaaggaaatgcataaactttttcaatgatctggggattcaaaaagctttttcagtagtcgcatatcctcagagtaatgggcaaacagaagcagttaacaaaatcatcaaggataccataaaaggtaaccttgaagagaaaaaaggcatgtggccagaagagcttccgcaagttttgtggtcataaaacacgactcctcgctcaacgactggtgaaacccccttctcactgtcatatggatgtgaagtcatgtaaccagtcgaggttggagctaagtcattaagaagagacgttttcaacgtcgagactaatacataaaatcaattgatctaactcaatttttggaaagagaagcgcgataggcccaattaaaaaatgcggcctatcaacagcccacatctcgctatttcaactccaaagttaaagaaaggagtttgcgagtagtagatctgatattgcaaagagtcatgtttaatacatgaaattctgtgcatggcgtaattgacaataattgggaaggcccttacctaatcgctaaaaaaattggtaatgcaacttaccgattattcgatctcaacgtctcagtttttcagggtttccaaatttttttaagtatttatatctttttcatgtttatacttagaaaatattcatcacaccaagctataaattaattgcatgagcgtacttagaaaagagattaaagtctttttgaggaattaagttacaattaaagtacacatcaaatttagcgataaaaagtacttaacaaaaggagtatccctgaagggatatgttgttcaaaaatatggcaaaagaagttgtcttaaatacaaaatatgagtacccatgtgttgggttttgtgccctaaataaaaccctttacaatctgatt

SEQ ID NO: 114618 - DNA, 3718 bp, Cannabis sativa
tatatatataaaaatttcccaaaagttaatttgaggacaaacaagaatagtgctttttataatagtgtgcttagacaccccatcaagtttcaccatgtttggcaatttattatctaattaaaataaaatgtcattgttaagtcattatttatttacaaatttcttgttttgaattaatttttctatacaatatctttcaaagtgtttaattttgtttatgtcgacattatctacaattttgttttaaaaaattaatttgtaagactaaattttgtcaaaattaatttctcaaacactaagctgtcaaaaaaaaaaaaaaaactcaaaaatattcatgttaaaaatatgaaaagaatcgattaggtttgtttgatttattattgtcaaaattaaagttttgttcaaactctaagtgaccaaagtttattttatccttaatgaatattggattgattagatagaaatgcttatgtataaaacatctttgattgacaaagatattgatttatagggtcacaaattaactttaatctttttgacagggttggacaggtgtttgggtatatatttcaaagagttcaaaatttttattgtcaaaaaaaaaaaaaagagttgaaaatttttatttatttaatttttttgtgtgtgagagtttgaaagattgaaagaaaattagagaagctgcggttaggagtttgtaggtggtgaaaatgacttgaagccttttttcaattaataattaattgtgatggtaagaaaaagaagagtacaactgcaaacaacactaataaatgattttatcaccttaaagattagatagatagtgacatttctcatttataatttcaatctttttgaaaatgaaaatttatatttatatattttaatgtttttgtttctacttttatgatttaattcatttgatggctttgtgatattctcatttcaaaagggtattactattatgggttgttgtgaggtgtttggattgtgttttgtttcaaattattagttttggtgtacttggaccaacttaatttaatgtgtttcacaatttaaaagggaagtgcatgaaaataggacaaatggacaataattggccaatgtcggttacatttgtgtgaacttttgaatttaattaggtaatatttgaattttaagatgtttttagtacggccatatttcagttactttaaggtgttctaaattctatgaaccttaatatcatgataaaatgacatttcataattggttagtaatactttataatatttaaaataattaaaattgttgtctactaaattttgacatatgctaaattatgtcttcaaacttttatgattgataattttttttcaaaattattggattgttggatttaaaattttttattctattttactgatttaatgattgttcatgttccttaaattttaatatttatcaaattatatttctcaaactttgttatctaacactcctaagaaaagttatgagctataatggttcaattcgggtgacaacatgagtataggatgaagacttaatgttacttaatggttcttccaaattactcctaggtaggagaatatggaaactaaggccgccactcaattttttatgtaaaataaaatgttggaaattaatggctatcccaattcccaaactaatggctcactcaattcgtcggcaaccttcattgtgagttttcagttttcacacttattaacccaacaaatctaaaaacagttggtattttttttttaaagaatcttcacttatttttttttttaaaaaaatatatattattttacgttattttcacatagtaataatgttaaaccaacgtattttgaaaataacaaaaaaaaaaaaaattaattgtatttttgtataaaaaatattataacatcgtaaaaatataatttttttatttttatgaaataatctctttaaattaaaacataacatataatttgatatccatacttaattagtggttttatttttattttattttttatttttggatatgattttgtttgtgggctagtgttattagtggttttcaacatctattatattggagaggataataacaaccacaaaatgggatttcgtatttattgaaaacatggatttttccttagcaaaactgggaatgggatcctctcactttgtccaatttcaataatacatcatacatatatttatttgaaaagaaaaaatatatatattcaaatttattaatatttaaaatttctgcaaaaacttgttaaaaaaaatagcagatacgcactttttatttattttttaaacaggtacaatagattttttttaaaaaataaaataaaatatagtttagttagttactacattatttgcaaatattatatatttatttaattatccattctgcaaaaaataaaaaagttatatatacatttcattttaaaaaaaaaatgctatatatgatatatgtttttggttatatgtaatatttgtatagagcaataaataaatatttttatttcaaaataaataaataaacattttgataaaaaataatcatattttttgtaaatatctagctgtatatatatattattagtttctttatttattatttttttagctaaactagttaaaaaactaaaatggaaagttattttatttgttgttgctccaattatactctcatcttaataatattgtataaggaaatttatattttttattatatttatttttaatattattatatttataccatattttagaaaaataatttgtgttatattttattttatttttatatatgagatattaatagtataaattgtgggttatttttggtaagtagatatttggtattaattataaatatgcttaattaattataaaaataatagataaacttattctataattaatctgcatgacattattatatatatcgtttacaactataaccattaattaaatttctcctttccttgttattgaaagtattattattaaaaatatatactatttgattttctctcataatataattaatttaattatatatatgttatatacaataatagaaatttattataaataaactaatatgtatattttgaaactgtaatgttaataaataaatgtgtatttcacatttttaaagtcattaatttttttatatttttttgtatattatgttataaactaatcaatatactaataataatacaagtataatgtttatttatttattttttatgaaaatatataaaaaatttaaaaatcattttattttaatgataaagttagttagaatattttttttgtttatatggaaataaacataataattttctgataacagagatctttgaacgtatttaatattttttaaaatgtttatttttatttgtgccatgtatcaatattcaaaaatatttatttattttatttatccttaaacaaatatgtttacttgaactatttattattaaacaaatatgtttatttacactataaataaaaagaaaaataaatagacagactttaaattgctttgtttattataatgaattgataggttttaaactattgtttattataaagaatggacatattttaaagggaaaaaaacaggaatattctaaaaagggaaaaatattacaacaatactgtgggccggcccaatgaacatttgtacagcccaaaa

SEQ ID NO: 114619 - DNA, 1855 bp, Cannabis sativa
tttttttttgtaatgaattttgtagagctatattcataaataggatcatatacgggagccatgtaagttatgttacttcacatgcacatttaaccttctggagcttttgaaatttctacaagaaacgaatacaaccaaaaccaaagaattcagagagatttaaaaggctagctaaaacattaggccaacttttaaattttcacagtaaatttgttgacaagggaatagagattaaaaaagtgtgactgttacatgccgacattgatatatttttttttttttaaactcatcacaagattaattaagcagtaagcacctccccaactcttaacaaggaaagaatatgaaatcttttgccaccccaacataacggttttattttacttttttgattttgttttttaacagtgtgacaaagacagtataagacaagaataattataacttagatataaaggttactcgttatatgtattgataaaaaaatcaatcgttaattaagattagattttaaagttgcaagcatatatatatatatatataaatatatgttttgcctaaaaaaaacaagcacaagactattgcctccttttcctttctttatttggaagttagcttaattttcacctgtaaagagtaattttttttaataatttatttatcttaaacaagaaactattggggtgtgactttccactttcttcttctgtaaattgcagtttatttatttatttttcaaaaaaagaaacttacacatcacttgctaatcttgcttttctggaagattgacgatttctagctaggctgtatctatttttatttttagttttactttaatttattgaaagaaagaaaaactaacttctgtgaaagtaacatgcattagtcaggattgttgaaatttttgttactagattgtcaaactatcactctttgccctttgacttaaaatatctctcttcagtcttttaaactacccaattgtttttgtctcaagatgttgataattttacatcaattgtacaagaattgagattacaaacaaggatcatttatcattaagaacaaaatgaggtattatatttggataagaatttagcacatgatgtttttgtccaaggccaatgaacctttagttaaggaaacacaaacacacaagtaaacaatatatattttgtctgattagtaacaattaaaataacctaattaagtgattaggtatagaaggagctagagtcccctaaggtgtttttattttttattttatttcatgagtcttggtgcttgcccccactcctttttcattcttttaatttaatttcttttttgtttctagctattgaattggcaatttatattgccagttagcaaaagctttatccgaaaaataaattgataaaggctttgttgatggctttaattggaaattcgtttttatcatcaattcaatatatgtaatacattatataatgaagcattagtttagatgtctcctcagtcctcagtcctcagtcacactaaagttcattttgattaaattatataatgtggtccattattttgacaaccaattcctctctttttgttaagctgatatgagctaatcttcgcattattagcaacttgatttataagtgctccaattaatctttaattaactgtaattttttttaggggattgacaaaggacagagatgtaaaattgccattagaaactaagttagtgaatatatttttttctaaaaaaaaaattaaaaaatagttcattataataaattagctaaaaaacattataaaaatacatttattacatattatttttttaaaaattatctataataattaaattaaatta

SEQ ID NO: 114620 - DNA, 911 bp, Cannabis sativa
  modified_base (871)..(873): a, c, t, g, unknown or other
ggggggttgggggggggggggcagtggagaaattaattttctgcttttaagagctaaaaataaagattttcaactagggaaaaatacttgtgtaaacatatctataagcttttctagctcaataataatgactcttggactaaggttcattaacgcctaaatctcgtaaaatcttagctttattcttctttaaattatttctttattaagcttaatcggtttctaaaaatctaggtaaatatatttagattggtgttagggtaaagtctgaggtcaactccgcagtctgtgcagtttggattggtgttagggtctggggttgagcttagggttaggatccagggttaggggtcgaggttcggagccagggtctagggctgggagccagttcttgggtctggtttgaggggggttagggatctaggtcaggggttaggattcgggtttgggtcaagggttgggggttggggtttggagtcagggtagggtctaggtcaaagatctaaggatggggtcggggcaattcttatacaggatcgcaattaattcacatatttttaatattttataatcaaacatattaagaatattctataacgtgtttttaatgaatattgctattaacaaagattagtaattatactaggtatgcagcagattacatgaatcattctatcaattactgtagcctttgatcctagttgctgcaaagtaataaccagtgactgacctcgatattgaactcagaaatcaattcaaaaaatactaaagtcttccacaaaggtaattttttccaaatcaaatgtgggttttataatagctaaacaaaattatatatatatatatatacatatatatatatgggtatgcnnntaatgggtattacccatgtatgggtattttattcttga

SEQ ID NO: 114621 - DNA, 2225 bp, Cannabis sativa
  modified_base (2119)..(2121): a, c, t, g, unknown or other
  modified_base (2160)..(2160): a, c, t, g, unknown or other
gatttaaattaaaccacacttttctaaaatttatagattaataataataagtttataaaagcacacacacacgtggcgttcctgagggtcagggcgttacagctctaatttttagagatagatgctcttaccatatggagacttagaagaatgtgaaaaatgaactaaatgagctatccttttataaggaaggaggcccatttaaaataataataaaaaattacaaaaagtatgaaaagtcactttatactgatcttggccattgttgattatctaatgatttaatcttggtgaaaatcgtcaatttttagaatttgactcttatttgtcggatcgttctactgtaatttgctaaaaacattgcaactatgttgaggacaaatttttgatttgaaatatctagaattgtgatatgagtgtgagacatgagttgataggtcttcaaaatatattcaaaactcgagttgaattgcatcaatctgatcaatattgagggagttatcactattttaccagaggttgttcaacaccctacgtccaagctgacacccaacgaccaggttgacattttgacgtcaacctagatgataggtgagtctaaaaagccctagacttgtatgttttgatgcctaagtgatattttgacagtacttagttagattctgcattttggagaagttgttcaccagttcttgtagatagcactttttggtgaaatcgggtagagtcaaaacttcccaattttgctgatatttacctcattaaaaggatgaaatatcaatgtgataatttgacctgtcacaaaattgcagctctcatttacaataaaaaaaatagttgaatcctagaaacagaatcgaatctaataagcaggttccatgcacaaggtcatgtgccaaccttggcactgggtgctttctgggtgccttcccgaggctcgttttgatacttatatgaaatttgagattgaaaaagaggtctcctacaatatcttggaaaattttaagaagagttcccagtgtagaatttatgtttaaggggaaaaaacatacaaaccaggttgcatgtcaacctaggcgtagcttctagtgctatgagaacctgggtcgtggggccctattctggctcccttgaaatgtcgtctgctccctgagatcacttgtatattcattatttctattgaaaaaaaagtgatggaaacactttttttgggtatttgtttgaaatagccaaggttgacaaaatgtcaatctttgtgctaggccaatgccaaatgtcaacttgggtgctgggtcctgtcttttccaaccagatgactctttttgattctaaaaatacttgtatctttttaaagtagaaatacttttatcttaatctttggaaaaaatagagtatatgaccaaaagacttctaagaaaaactccttggaaatggcctaggttgagaaagtgtcaacttgggcactaggctcggcaccaggtcaacctaagcgctgggttttaattctgacccctaaatgactctttttgttccccaaaaggacttaaatattaattcttgatgaaaacaaagaatatgtttggaaaacttcatctaaactgcttttggaagtggctgaggtttataaagtatcaacctctgcctagtgcctaaatcaaattgggcactcggtccctattttggcctttaggtcaatttatttctctcctaaaagcacttgcctccctattttggatgaagatgaaggaaatactcaagatacttcttcaatattatggttggaagttcctcaagttcacatacgtcaacctgggtgctgggtgcttggtgcctcgggtgctgaaaactgaaactgcttcgattcttattctgttgactcaaatatgtctgtgacatgtcttattcatgtcaaagtacaatttttgagccattttcattaggatggacctagaaaccaaaactgtagttggaatgttaacttgggcgctaggcgtctgggttgacttccagggtgctgtttcgtgtatttttagcttctaggacttggatttggattcttcttatcttaattgtacagaatactaaaatatggcgagttggaactgttgggttttgtgcnnnaaataaaacccatttcaatctgattagttatcaatttanaattttgaagtgatttatgtttacatgtattttacatgtttatggtttaatatacatatttaata

SEQ ID NO: 114622 - DNA, 2031 bp, Cannabis sativa
tgtgtaacatatatttaatcaatctcttttattgttcttgtattatttttacaattgagttgtatatatcttggtttatcttccattgtaataaaatctctaacaccctaggctaaggcgggttaggctcgcgcttaggccccattcatttaattaggggcccaaataaaaaatagtttttaaaaaatatacatattcttttaataatttttacaaatactatttatctttatagtataagagctcaaaaaaaaaatttaaggataattacataaggtactattttttgtaaaaaaattgcatttttacgtttaaagatttttttttttaatttttagagttttccatagaaacaacacgaaaataacaagaaaagtacataaaaataacatataaataacatcaaaataacaacaaaaaatagcatacagataacaaaaaattaacaacaaaccagagtataacataaaaagaccgtattttctgcaaataaaataaaaaaaattgtaaaaaatgtttaaaattccgtgaatctatatttttgtaattttttttttgtttttatgtatttgtgaaataattccaaaattttattacctatgatttatttcaactcaggtctgaccctagtaaaaacgtcattaattttaaacacgtgaaaaaaaaactaaatacctaagaattagccctcttcttctccgatcgtcagagtcggacacagtgccactttccttacagaccaattggtccgtgatcttggttaaggcaatgatttgatcctccagccttctggtgttatcatacgggatatcacatccccgtatttgctcattgatattatttttgaggtctccctcacgaggccggcttgactttttcacatcttactttttctcattttaaatacaaacggtgcctgaggtccgctgttgacatgctatcttcgagatttaagtcttccactttgatggtttgtttagtagaattactagggcaatttttccttccacgcacgaatgttaggctccgatacttaagcacgatgcctattatttagctcgactctgctcaacatatcatgttggatggtgtagccttcggcttgagcggtcttctctttctgaaagagtgggtcgaccatatttatgttgttcctaggagcattttgcatgggccttggtggatagctcttctttagaggcttagccattttggccttccttttgtcatttgttggattaaagggtctagctccaagatggttaaactttctcactagtgggttttcaacagtaaggttctgttttgctaccatgttttatagttgtacgtaagaaggtttcttgtatctcgcgtgtagcttcttcttgctctgccaatttcctttatcggtctgagccatgggttatggagtgacacaaacccaatcttttcacactcaacgccctaaaagaaaaaagaaggatgatgctaacgatcgctagtcagagatagagaagcaactctgtgaggcgaaggagagtaatagacaaatgcgagagcaaatgaatgaactctttattgtcgtctattcctagcatagaaattgtgggtacatcacatgtgtctggttctggtgttagaggagcatcaaatgtcgtatatattaacccagtattgggtaataatgcttcttcccaagataatttaggcatatatatatcacaaaggtaaaattttattactttgattaaaattgtttctttatgttactcaactctccttggtttggcctcttacttatgtgaacacattatttttgagtattattcacgcgcttgagagtatagtatttaaaatgtccatatttttgggttcaactttatattcaaatctatcaaaaggacaaataaagacacatttatttaattattctcatgaaaaagataatttagtggtaatacaatgtaaagaaattatctaagactaggccaccatatatcataacatgtactcatttcatttgccgtcgacctctctctaaacctctct

SEQ ID NO: 114623 - DNA, 2277 bp, Cannabis sativa
ttttttttttttttaatttcttcttaaaagaaacaaatcaaatcttcataaattaattaatacgtatatataatccttaattctttctagtatactaaaaatattaattacacaaattaatacattcacaaaattaactttttttaatgaaaatatgatcaaatttaatattacattttttcctttttaatgatgattttgaagggtatatcaccgatatatgatgatgttgcatgtaatgaatgatctcatgtaagaaatatatttggagacaaaaatctacattaatatttttagggaaaatattgtaattacatatagttctaaaatattaagagaaaattacaattttacatttaatatgtttaaaattataaaaaatatatataattaaaattataaaaatcataaaaatatttaacattttatatattttttaaataattctaaatattaattaaataatcacatttgtttcataatatattgtaattggaaaattatcatatcataaatccatgacattgcttttgtaacttattataatgatggggactggggagtctcagctttagaggaagcaatattattattaatcattaatattaatatattttggttcatatttttaatttaaaagtactactttaattatatatgtgtatagctatagtgtggcgtggaaatgtgagatcacgtcttccttgttgttataattcaaaagagcatttttattattttccaaataaatttattttttaaaaaaaaacactaattaaaaaaagatatattaatttatatgtatataatatgatagtgatagatggccacaaggaccaaaataacgtggtcaccgccaaattattaagtaataagaaaaagtgctttgacttaaagcaaaatccctctctataaatatattaattaacaaaaattatattcatataggtttcttagaaggtatatttatgacattataaccgaccctattagttatagaaaatttgtggagtagactaaatgatttttttagtagatttttttatctgattcgatatttagaataatttttaattatttttgatgattgtatacgttatagatattgaaaatcacttaaaaattctaaatagtttactgtatcaaaaataaagtttaaaaaattagttactatacgcgtattagaaaataatcgcacttacaacaaaatatataaagtttatttttgactttgtaaatttcttcatcagaattttctaaaaatttacaatataatcataaatagctacaacgtatgtgatcataaaaaaaattaaactaaaaaactctcttaaataccaaaaagtaagcaggcatgcatacaatcgggtactaattaatttaaatttaattttatttttaatattgtaaattattttaaaaaattcaaaaatgagctgaatacctcatattatgttgtcatatatgaaaatttagattataatttcttcattccaaaattaaacaaaaataatgctccatacctaactagtttttccaacatatatattatatatatatgtgcaaatttatttagtcaaaactagttaagttgaaaattaggtttttaattagttaattttgctgttagtttgaacttattattagagtagattttgaatcacaagcgactcttttggcttagaaagtaggattaggtgagtgtatggtaaagtgtatagagttctatcttaaaaccaattgacaataaaaagagtagtttataattttatatatggtatttagtttacatatattgtcaatgtgggattctttaacaatttaattttagatttttaataaaggagaataaaattgagtatttcatggatataaaaaaaaaatataaccatgcatagttatatattttttatgatctgcaataataagtcactaaatagataaaagtattttcaaaaattaatatttataatttctttttattttaagaaaataaataaaattatgttagtatcagattacaagtaatttattaattatttttaatgaatttttttaatttaatcacaactgtctaataattatctaatagctaaacttaaatataattatcatcattacatatatcgtatttgatgtaattattgaacacaatcgtcaatattattaaaataatcattataaattgagctatattagtacagtaaaacctctattcaagaatacacttgggaccaagtaaattatattctaattggaaggttataactaaataga

SEQ ID NO: 114624 - DNA, 1152 bp, Cannabis sativa
tatgtttttattttcattgttttagaattcatatcaggatgttaattaaacatacttggtagtaaatctagatcctgataaaataatttccaacacgcgcattgtaagaatccgcatttagagtgctaccggtttaagatattaatgatatcccccatcaatgacttattagttgacaactgtttgcatggcataatgagatctcaagaagccccacgtgttagaaatcaatcatgataaagcaaggaaatacaagctaccggactacagattgtcccaaaagcttgggataaatattttttagatttttgtaagcgcgacacgtgggacctaacggaatgggctaggttaatctttagctaactagtgccttcggtctcggctcccgcgaaggatacttctatcacaaggcagggacacacagagtgtcagtgtgcataacctatcttattcccgggagcggaaggaaaggtctgtctttcgaaaagggaagcaccctacaaaagccaatgacttccttaagtacacctatgtgggttccagttagacttaggatgggttttatccccatatgatgtcatggaagatctccgtccgcacctgtcagattacagaagtaacgacaatgctttttttagtacaacgtcagttttgtccgctatgtcaggtcgtagtacgaggcatgtgcaccaccgcacctgcccattgtccagcggccattcacgagggaaattcaaaaagaaaaggcctatgggtgacacgtatgaaatatccaaacggtacgggtggtcatctctgcgcaccatacgatggagcagccacctaccaaatcaacagtcgaatctctcatagtaaggtcgacctcaggagcaggttgagcaagaaacctcctttaaatacccatatatttcatggacaaggggaggactttctgaacccaaggaacctcttcaaaattcctataaactttatctttttcaagcgaaacgagaggaataaagaaaatagatacatgatgtaaacacttgtaacctgcaatattttaagactaataaaatggactcatgaactaagaataattaacgtctgaaccacgtaaaaatttatttgtctattatttaatattttgcatttccttaagctcttattaat

SEQ ID NO: 114625 - DNA, 1013 bp, Cannabis sativa
  modified_base (969)..(976): a, c, t, g, unknown or other
tcccaaaaggcctcatactaatggagtagtgtccatccttatatacccataattcttcccattcctagccaatgtgggactttggttgcattcccaatagagagcttcaagacaagcatataattcagctgaatatggagagaagcttcccgccatcaactttgtgaagacccgaaccactcgactctcagcatttcgaatcaccaccctcaacccaatagcacaactgtccaaactaacatcaccatccatattaagcttaaagcaaccttgattagaaggcttctaaggtcaggacgtagcatatcacaggtgatggatccccacccttctcgccacacttccacgaccaccattaacctcttcgcttcaagatatactcaaagtgagtgaactttctcgatagagtaagatcgcccctttaacgacctcttgaatctcaaagagaatgacacttatcttctccttaacaaccaaaggattattaacctgatcccaaaactttcttttatttcgctcatgcaaaatcaaccacatcatcataaaatatgcctcatgatctgaagagatattaatacgcatgatttcaaaaattaccttttcaaggtgatccttaccctaatatatgtcttgaatatttttcggggcattggcgacaggctcttgaggacactccttagttaggacttaggaaaaaattatggctctcacaaactagcatcaaattaagattaaatttttattttaggaaatttttactatttaatttttcaagtgctaataaaacagttagggaatttggcatagtagacatgattgtaataaataaagataacatatgaatacacttgaatatatatatatatatataaatatcattttagaattactataattgtgatgcatgagcgcttacaattaaaatacataaaataatgtttaaattatttcactacaaaaaatcttacnnnnnnnnacaacaaaatttgtgactaaaagtcaaaaaattgtga

SEQ ID NO: 114626 - DNA, 5225 bp, Cannabis sativa
  modified_base (5172)..(5195): a, c, t, g, unknown or other
tttagccgccaaaaattcaatttttgtggttaagtgttataaactgtaaaattcaagtggttcagctgccaatatccctaaattaaatgataattatgtatattgttgtttttttaaaaaaacaaaaaaaaaaaccttttttttccttaaattttccttctttttgtttcttgattaaaatccaacttgttataaaattatttggtaaaattcaagtccatcgatttaaggaagtagtgactatgaacttgagaggcacaattcaaaaagaaaaagaatcggcaatcggcacaaaaaaaaaaaaaaaaaccataatttctaccattgtcaacaaaatagaatttataaggatctctactatcaagtttcttcctaatgttttttgttttccactgaatctgtaaaaagagctgacggtcctttaattaggtcatgagaccatttgtcgtgaatgtccaaatgagaagaaaagttacgactctgtctggcaggatctaccaataaaatcaattttaaaaacaaaatataatatataaaagtggaaggatataaaattttgaaattgtagtgatatgcctatatcaacaaaaatattccaattttcttactaatcaaattaatttttttttttttaaaaaaaaataaagcggttccattttattatgagctatttacaaaaatatatatataacaatttttcaatatgatgtaaatttaatttaaggttgagatataaaatgatcttacatttaaaaattaagtgagtaattgttctttttgttttttaaatttactaaaatgctcaaatataataaatcagaaaataaaaattataaaaggacatttactatatattgtattatatattaatatattgtaacaaaaactaataagtatataaattcattaaatatatataacaatatttgataggttatattgcatgatgcttgcttctattaatattacacctaattttttatattattaaaacaaaaattaacaccttaaaattttatataattttaagacatgtcattcaaaatccaaattatttactagttactatatagttgagaaaagaaaatctttgtcacatcttaagaaaataggatggactaacaattaacattaagaaattatatgtaaaacacttttttcaaataaatatggaaaacacacttaaaaacatttaattatatcaattacgattacaattttttttttgatagaatattatgattacaaattatatatacgactcttttttctaatgatgatgatattactttatctatactttacaacttattctaaaaattaagttgtgtataacatttcaattattttgcagtgttcattcattatgaaactgcaatgtatttagttatttttcatatgccaaagtttcttacctactgttcctcacctacatcatagcaccataaattttggtaaaaaaagaattcctccaaaaataaaaataaaaactttggtaaaaataaaagtgaaacgaaaaaaaaaagaaaaaaaaagaaaagctgagcagcccattatactcaggctcctcctctctgtaaatactctgaaaatgaaaaaggacataaaaatatgagcaggcccttttgtcagaaatacacaaaagactaccaaattagccaataatgacctctcatactcagagtgactctgaaaaaagaaaagaagaaatagaaagagagaaaaggtccaactctaacttttgtaaagagtacccttaactagttttcactagagggaataatacaataccaagtgaccccaacgagaaaataaatacattaaaactaaagtaaataaaaaatgtgctctcatctattaccactatttgatatgttcatcctgaatttttttatgttaaaagaaaaaatgtgctaatattcttatagtagagtcgtctcggtagggtatatttatttcaacaaggcattatccttaataggcacatagagtaagttcccagctgtaaccttgccctattaaaaatttaagaaaattcagcacaaacataatgctatacaatataaaaaattaacatttcttttcgaaacatatcaataattaactttaaacacataatcatcattctcaaaatttaaatattaaaatctatgtccatatctaattatgtaaatataaaagtataagggataattccacgcaccacttttgtctggttcaagtggatataagaaagtgcgtttatgttaaagatcttaggttcgaattctaaatccaggactgaatcattaagggggccaattattaaaaatttatactttgaacaaaatattttttataaattacacatcacaaaagttatttataagggcttattatgatattaattacatagttacatagtctattataattagtaattgcactatattttaaaatatattgtgtatttagatataaaagtgacaattatataaattctaattgtcttgtttgacaaaataattaataattacatagaaaattcatattatataataattaatatttagcataaaatttttttgaaattaaaataaaatttcttttttttttttcaatgtatacaatagtaattaattagtcaaaactcctcttccccttcctaaaatatccatggataatacccattaaaaaatgatccatatatatatatatatattattagagtcattatatttaatttatatttttatttttaatttaaaaatatcattttgaatagccttatttagtagaaattacaaactacaatttctagaaaaaaaaatgtaatttaaattacttatatttaacttaataaattacaattcaattatataaatatacatataattctaatatcaagttgtgcaataacaacatatcttaccttatatattattgattattaatatttatcttttatatacttataagtgtgcatctatagaaattaagggggggccatggccactccaatctaaggaatagctccgcccctgtatacattgtaatatataaacacttcaataaaaaaaatattatcaaaagaataaaaactttatttcattaagaaggaattgtttgatttcataatttaaaattattttttgtttttaaaaactaataagttgtttggcaaaatttttaaaaactgaattttaaaaaaattaaaaaataaaaaacaaaaaaaaatattgttttttattttcaaaaacaatttttttgtctaacatattatattttatatttttacttatatacccggacccagatcctagaccccgacccaacctggacctacacttggacccggacccaaacttagatagggatgtaaacgagacggggtcagggattgctccccgacccccatacccacttcataaattcacccccatacccgccccatacacatttaaattaaaacggggacggggcgagaattactcggtgggggaaggatcctcatcaggtacccattgcatatatatttctgaaaaaaaaagtgatatctcaaatagaattaaaaaaaaaaaaacatcataaaaactcattaaaaaaaacaaacatatgtagaatagtgtgtataataaatctatttagtaattataaaattggcaataaaaaataagcggttaagtgtcatgtttttaaagaattttcatgaaaactgaaatgtctcattaatgtaatcaataaaaaacttaaagcatgaagttaatttaattgtagtagttaagattttaaaacttttttttgagagacccaacctgaacctacacctagactcggacccagacccagaccccgaccccaacagggatgtaaaaaagacaggacgggatcggggattgctcccccgcccccatacccgcttcctaaattcaccccatacacatttaaattaaagcggggacgggacgagaattactcggtgggggaaggattctcatcgggcacccattgcatatatatatttttaaaaagtgatctctcaaatagaattaaaaaaaaaaatcttcataagaactcattaaaaaataaacatatgtagaatagtgcatataataattagatttagtaaatataaaattggcaataaaacataagttgttaagtgtgatgtttttgaagaatttttatgaaagttgaaatgtctaattaatgtaatcaatagaaaacctaaagcatgaagttaattaaactgtagtagttaagatttttaaaacttaaatatatatacatatatcatatcaaggcgggtatctattcccccgccctgccccaaacctaactcgaatatgaacatttaatcttgtacccacccctgtcctcaaaatttgacccctacccccatcccgccccaaaaattcgacccttgcccctgtgccactagaggcgggtacccacatgtataatttccatccctagaccccaaccctaaccctgaatcggacctaaactcgaacccagatctggacctctaccctgacccagaccccagacccgaaccagactccaaatctaggttaggtctgaggtcttgtgttagatctagtgtccatgttagggttattggattgggtgggttcgttgtctagggttcggggttagggtcttggtccaagttcaggtttggggtcctgatccaattctggggtccgagtctaggttcggggttcagctccgggtccgtgtccgagttcgggcctagattggggtccgaacttaggtccaggtctgagtttgggtcagcggtaggatgggttcttgatatggtatggtatagaatattgatttttttttgtaaacaaaaatctaaaaatatttttaaaaacctgagctacacaccattaaattttcaaaatgacaaaaaagatttttttttgtcacttttaaaaattgaaaactgaaaacacagccaaacaacatctaagtctctccctttgtttcattatatattattttaaaattatattgtaaccagaaaataaaccgctcttcgcatacaattatattttatttagtgataattaagttaaacactatatcaaattttgaattctaataattttttgtatatatatttttttaataatatgagtaataatttgttgggttttgtatcctaaataaaactcatttcannnnnnnnnnnnnnnnnnnnnnnnaaagatcagaaataatattttatgttgcat

SEQ ID NO: 114627 - DNA, 5973 bp, Cannabis sativa
  modified_base (4782)..(4786): a, c, t, g, unknown or other
  modified_base (5942)..(5947): a, c, t, g, unknown or other
aaaaaaaaaaaaaaaaaacccctgtatgttcatagctcacaactataggtgttcaagaatttcagaaaaacgcccattccaagtaaaccaaccaaaccaaactgaataaatcgacaaaatatgcaactcaaataatccaacgaaaatccaaactacccaataaatatattgggttggttgtaaattattccattcttaccaatataactcgaataaatcgatttacaatttcttgtaaaaaaaattatataatatattatataaattatgttaaataatttaattattttttatttaaaatttaaattttttgatgttttatttgatatttagatttatagataatgtcataatgatattgatagtatttgaatatttgaaattgaactttagaagttagactattttaatttacatatatatattttaatttcttaaggattaatgtttgtttaatgcttaacactaattccaattaatgttctatttttttttttagttttgaacaataatttagactattatagttttaagcttgaatataaatattatacttctattaattctaaatctaatgattttggatactaaaaactagcaataataataaaagaaaaattataacaattaggactggttaacccaaataaaccgacaaaattatctggcaagttaattttttttttttctttttaattaggtggattacaattaaatttctacaacccgacaattatattgggtggaatagtatatgttgcaatccgaccaatgttcactccataatgaatcaacaagaaataaaataggtagagtggtagagttacttgctacagtaagtactatattccagctcatctactactcactacaatagcagccaatatacaggatattcgcaatgcattattccattaactactattttgtaatttgagaaagtgtcacatgctaggatttaatttggattgaagagatgagctgctagtttgttctttgagaagttaccaaatggtagaattctgatctatcaattagtagggatatcgatatggggtcatttatcagtttttcctgacatagtattgaggattttacttgaaaaactagacatatatgctatgttttttttttggttatgcaacatcaagtcaagtcagtaacctcattttacttatatacaatattgtctaatataaggtttatgttagtattgtgtcagagtaatcaataaagattaaaataacaaaagtaactactttacgcaataagtagaagatttttttccatctaaagtagtccattgtctatctaagggcatgcagagatatcttagttttacaacaaaaccttaatataaggaaggaaaggaaaacctctaatttcgacaatccaccctaccaataaaacacctacaaaataaagaacaaagttaattagtgtcaaattttaataagtataaaatttaaataaatatcgtcacacttaattctataatgtaaagactaggacttatttgtgctgtgcttgtctccaatacttcaagtgtctccattatatctgatattttttagatcatattggcctaacaaatcaaaacttaccatattggccatacaaaattaaacctgaagacgaagactgacttactggcatacaaaaccaaaactgattatactggccatacaaaaccaatactgcccacactaggcgtccaaaaatggaaaaaacatatacatataataacctaaaatatattgattattgcattaatgcaaaatatttacaataataaaatataagcaatgttagtattgtgtcacataccataaaaaattaaagagatccttttgaagatcatattacatgtataatattaataatttatttataattttatttaatttaaatattatttgtttactttttaatatatgattattttctttgcccatttatatgaaattgatacgtatttagcatgtttgaaacataatttttatgggtgtttattggaccacatctaatatttttaggcctattcagatccgatccaattatatattgaatgttagattttatcatccgatctgattcaattaatttcagtcatctaatcgatatcggttctatccgttggatgtatttcatatatatttattggtttaatttgaatttattcaatattttagactttatattttttagatcggatcggatccatccaatattttaagtctagtatgtattagataagaaaaaagagtaaaattttaatgttaatctttatatataaaaatatattttatgtataacaatataaaatctaattataccaattcaaactaaataaaaatactaattagtccaattggatgttggatgtattgaatttttggacaccctatccaacatccgattcgatctaattggatattcaaaaataacatctaatccgatccgatcacaattggatattcaatatttggtgatcagttgtaattggatcggtcggttgttattggattggatgatttatgcacacttctaataattttttaaaaatttaatatattaattatgttttgtatttgaataatttttttaaataaaatatcaatattatataattaaaactattagaaagtacattctgatgtggaaaaaaacactcaggtaaatattcaggtatagagataatatttcaatattcagatgtttattaaggtttaggtctgatggtttccacatcagaatttattggattggcgatccgatcacaatatatttttgtttagttgcattttaaagtattgaaatgtcattccaatggatggcctattccactattttagtagaatgactattccagtttgaaatggaaggaaagaccattccaatgtaacataagaaaatttaatgaatttttatcaatttcttttatgtattttaaattttattctattctcattcccattcttatattttcattcgtcccaactaaacgccacctaaattcttaagtctagtttactagtgagtatgtaagatttttgttaagagtctgtctagacctaagggagataccaagtatctcgaatagcttggaaccatttgtatagaattttgctcaatataaagataacaatctcgtattctttcaagaactgagttggagttttggcagtcgtatgatttcccttagaattgaggattttatttgcttgcagcctatgacaaagtaattgttttcaggttcttgaaccaaactggcatgtgatgcacaatagacttcagtcggcaaagagtatagatgaggtcttccttcacagaatttacttttcctttgatttccctcttttgatttttacgttgaaggggagaacattattttatttgacatccttttagatgatgcgccgcatgtttctcacatggttcttttttaaacaggttatccagcaccatgacttttttcttgacaagtgtctgagagaatgtttgcttcttttgcctgagttactcaaggttagctatgtatctaattttacttttgagtgctgatataattcctcaataaattcatagccttgtgctttcagataaccagttggacatacgtaaagaaaaacaagcaaagatttctctcatttctttgcttagattgaaatcttctttaagtggaacctttttaacaaatatacaaatgacctttacatagtttgagaaacctaataagcaaaaatgaaatcatccttgtggagaaagtgcaagcatattagtgcctttatgttttcttcctttaatttgataaagtataacaaattcttaaaatgcagaaagtggagaaacttaaatctctatgcgtacagtatgctgcagcaacacagtggctaattacatcgtctatcgatattcccatcatagaggaatcatttgataattcaaaagtgacagaaaattccaagcaattgaagtcacggagcccatctcgtgcactaaagttaagttccagcaatacaagtgtcacagaagccatactgtaagttcaaaatttttggctgacttccataccctcctaaattaagatttcccttacactaagaaattgaattgcagcaactttgagagagaattcaacacggaacttcagagccttggaccaatactcagcagtagttcccaagcagagccacatctgacccacctagcacagtggatcttaggcgttggaaatgagcaatgaattttgaagatcctttattacctttaacaaattgtatatatttttatctataaactgcgctggacttgcctgtgtctagaatgctagagtgataatcctggataaaacaaaatgatttttttttattgtgcggttgatatgagaaatgttcttattttattctcatttggttaccagtataattcaaaccgtttcacttttttatctcctttcattagcaggaagtttgaatcctaaaactaagagcatctccaatatggaggtgtaaataagagatgaacagttaaaatataactcatttaccaaaaaatgtgctttaattgtgtgccaaaaagtgatgtaaatttgacacataacaaattttgtgttaaatttgatacaatatttactatgatgtaaaatttatactacaataaatgcattatatttcatttacatttatgtcatttctattattttattagtatatttaactatcacattaaattataaaatatttatattattttttttattgtcttacatattaaaataannnnnaaattgattataaagttattagattttattttttttaataaaacattaattagatattaaattttacaattgtgcattagagtacaaagttaaaatttggtgtaaatttaccaaaaaacatttttgtgctaaatatagcacaatttttacatctcccattggagatggactaagacacataattaattaaagagtaatttgtggcgaaatccccttatgttttaatttttatacacttaacccccttatctttttttttttggtggcaaaacccccttatattttagtttttatacacttaactcccttatcttttttttttgtagcaaaatctccttatgttttaatttttatacacttaacatctttatcttttatttcagtggcaaaacctccttaagtttatttttctttgtaaatttaaagttttagttagatattaccgttaaatactaactggattacaactgtatcgatttcgaagttttacttttacatatacacagatgtatacagtggttatccagttgatatttatcggtaatatttaactggcgtgtccaatttgcaaagaaaaataaacataaaggggttttgccaccaaaaaaatgataagagggttaagtttataaaaattaaaacataagggagtttcgccgcaaattgctcttaattaaatggaatgaattagagacttaacaaatttgtgaaatttcctataccaaaaaaaaaaaaactaatttgttggagttagtatgtactaggggtattcgcgttcagtgacggatctatgatttttactttgtgggggcttatttatcattaaaaaaatatttatagctacattataatcactcttactaaatttatctaattttgtgggagcttttctactattttggtttattaaattaaaaaaaaattacatttaattctttaaaaaagacagtatttttatgggtccgtcgcagttcgaggtgcgagtggtgtagtttttgagtattttttcaaactaacccgcacatgcaatttttttaattttccaaaccgcacctgcactacaaaactaaaaaactacaaaaatcgcaccgcaaaaaatagtgcgatgcggtttatgcagattctgcagtttggacttgttgggttttatgccctnnnnnnaactccatttcaatgtaatctatttt

SEQ ID NO: 114628 - DNA, 3437 bp, Cannabis sativa
gggtgtattgtagaattttccattatttattattactaagcatataattataattaattatttatttgagaaaaaacaaataaaaattgagtgggtatgtactaggaataggaaacgtactactacgaaaattattaggttagcatgaattaaatgttacggaacacgtgttgaaacacagtaaaatcctcaacagttggaaatttgaccttatttggatactcatcacacgtgtactccatgtgtatttttctcttttaatttttattggtaatatatttaaagaataaacacgttgtgatgagattataaaaaatatatttatgttttcattttattattaatttttttgacaaattttgtttatgtttcaaaaaaaaagtttttcttgttaaaatttaaattttttattgattttagaaaaatattatattttactctaaataaaaatataattttacttttacgtatatacatatgtaaatattggagactaatttgtttggttgctttttcttttttttcttattatctctcgtgactcgtgtatgatgatgttttggtttatctttccttatctattattcattcgagaactgtataataaaatcttccaaattattactttcatctatatactactactctcttccactatttttgactaaattactcatccaaatccaattaaatcttttcatatattacattattattattattattattattatgatttaaaattaatattatctctttttttcatgagaagtacgtaacttgtacttgggatactctataaatgggattcttattttctcattatttcgtatagaaaccttattttgactaaccaaacaaatgcaaatataattgggtttgttttgattaaaaaaaaattattacattactttcttattttaacaagataatgttactataaaatttatattttctttttatatttagtcacaataaaatttatagttaaaattaaaaaagttgtaactaattataaatcatctttattatattatgactaaaatgtttgtgactaaaagtatcaatcacaaaaattacaatttattgtgattaaaagtagttttagtcgtaaaacttgttgtgatcaaaattaaattaatgacaatttatgtttaaatactatattttagtcacaaataattttttattgtgattaaaagtcatatttagtcaaaaaaatatacatatgttgtgattaaaaaattattacttttatttttgtagtgtaataataataataataataataatttaactttttccaatgatgttgctttcattatctcttttaaatgatgagaaaactatataattaaatatactttttgtgaactttattacaaccactagagttataaaataataatataaaatataaatatttactcatgaaaaatgcatgattttatttgcctgtacaagtagttaggtctgtaattaagacctaattaaagagatcccaaatttttaaaactttacaaaaataccattttatttgtaataattataaaaatatcaacatattgtattgggcccaaatgaataaaaatctaatttcccaacatgaaacaggagctgtgtgtgggccagcaagcttggtaaactcaatgatggacttacaccaaggaagtctaatgctattaggcccaacaatgaatgcaaaagtagcattcgaactctcagaaagaattccccacttgagcttaagaatgaaagaacactgcaaaagggccttagaatttgctaaaagaatgaagaaaatgggcctaaaagtgatctacccgggcctagaagaacaccctcaacatgggcttctgaaatccatggcccataaagaatatgggtttggtgggctcttgtgtttggatatggagacagaagaaagagccaataggttaatggacatgttacaaaaccattctcaatttggttacatggctgtgagtttgggttactatgaaaccctaatgtcttgctctggaagtagtacaagtagtgaactcaatagtgaggagaaagccctagctggaatctcacctggcttgattagaatgtcaattgggtatattgggactttggaccaaaaatggagtcaatttgagaaggccatttctagatttcaagattctggtttgttcaaataaatatgtgattcttattatgtgtaataatctgtgtaataatcttttatgttgttttttatgttgttttttttttttaaaaaaaaaaattaataatggtggtttttgtactaattaatgtatgtgttgttgtgttaattagtgtgtacaatatcttttaaggtgtgtacatttgtttttgttttcttttttgttcaataatgtgttgtttgggaattatgtcatatttttggcattaatataagggataattttataagtacacaaaaataatagaaaaattgcaaaaatatgacggtacgtacttaagattttatttattagattttatttattaaaaatacggtattttaatgtattttgatgatatattcttgttattctattgttaatattttgttatttgtatattatttttttaattttattttgatgttgttttctatgtgaatttcatgttactgtaaaaatgtaaaaaaaaaaatgaacctaaaagtgtcaaatttttactaaaaataacaatttatgtaattttttcttaacataattataagaaatctttaattatgtgacttttacatctatagtttgtaaaaatatggggattataattttttttttcaagttttattggaagaattaaattaaggtttttaaaaaattatgaacaaaaacatgtagttagttaataaaattataatttaaactagattttgtacgaagttaaaaactcacaatttaataattttaatgggaaaaagatatataattctattaagaatacgattttctttagaatagaaaatccacatctaatgtagtagaaaatattctttcataatggaatattttagtgggagaagagtgattttcattaattggattagatttatttgtgtagattttttcttcatcaaattcttaaataagttatcaaactcttaaaattatgacaatttcaatattgatagaagtgactactaatatatatgaataatgatatatatatatgtacataatttatatacaaatatataaaaaaaattaaatctttgcaaaaaaaaaatgttattgtagtgactagtgatgatagacatactttaaatttaaagttgtcaaataattagctatactttgattaattaattagctatttttttaaagacaaaaaataaaagggaaatttgatattatatgcttaaaattaatttatctactaaaaatatgctagcatattttgcatcatgcaaaata

SEQ ID NO: 114629 - DNA, 2046 bp, Cannabis sativa
  modified_base (258)..(263): a, c, t, g, unknown or other
aattttttaaaaacaaaaattttagtttcattttgtgattaaaaaattaaaaaaacaaaagtgttaccaacacattttattttagacgcaaaagttatatattattaaataataaaataggtcttatattttttaaaatagtaaaaaataggacgttgaaattaatttttgataacttataatcaacttgaagacaaatacagaaaatataaagagttttgtcataatatctttatatcagattattattaaattttnnnnnnacaaaaaatcagttcaggatcttatttgtaccattttaaaaaatacagagttcattttgtcatttaacaaaaagattcaattgatatttttttgcaaaatacaagatctaaaatagtatttatccattaatttataggatgttactttatgaaatgaaggtgcttcctacaataattctttttagcaattttgtaaaatataagacatgttctaacataaaatgaaatggtaattatatataaattttagtaatttgtaattaaataaaaaatttattaattaatatttagaatagattttttttagtaattattcaattcttaagagagaccataagagcatttttaattatactctctaattaactaaaataggaagtgagatttaaaaaaatgaactctaatagtagactttcaaattttttacttttgtagtatatttttttaatagtattttaattgaaaacattattatttttttattattttataaaattaatttatatttcataaatttaaattataaaatattgattatagtagaaaaagagcaataataataaaatagctttttattttaattttttagctattttagtaaaagaaaatagaaaatactattaaaaatatgctcataactaacgactgtaattagaatcacttaattactttcatttgcataattatataattacattatcaggtaaacatgttaaattgtataattatctctaattacactataactttttaacagagtcgatcctaagctaaggcgggctagacccacatctagagccgactcaatttaagagtccaaataaaaaatatattttaaaaaatatacatatttttaataatttttaaaaagggctaaaaaaacttttttacctataacctatttcaattaaggtgggctctactttttaaatgcaattaataccataaatagaagtattaaacacaactaggaatatttatttattttttataaaaaaaatgtgtagatgcgtaatttgaattagtgtctaccattactgaataatgtgaatactactctaactcttttgctcttctctctacagatgatattaagcctgtctagtcacccactatcttattctataattcaggttttttttttttgttttttaatttttctgaatatgacttttcaaaaaagataaaaatttaccgaatatgcttagtggtgatttgcttacgcctgcatatgcaacatgcatattttccattattccagtatctttcgatgccgtaggaataagatatgcctgcctgggaatataataatgctatgtatggaccgattcaccaatccatttgctttgcttttaaaaaaaaaataatattgggaatgttacccaaaatctcatttttgacacaattttaacaaaataatttgttttttacatttttatataagaaaaaaagtttaaaattttactgttttaattttttaattagaattttattgattttttttcaaaaaaaattacaattttattatgtcctaaaataacataaaaaaaatagaaaagcgacgtacaaacaacattgaatgagaacaatgtgtaatgtgtaattggaaaaaaaacttataatatgtaaaaaaaaaaaatccgcacaaatttattttacatagtttaaataattatgaaataaaccacttgaggctagcttaagtggccatatgtgtgtcttggaggtcctggttcgagttccaagtaaacatgattgtaatatataaacgcttaaattaaaa

SEQ ID NO: 114630 - DNA, 1921 bp, Cannabis sativa
atctaatactaataaaacttagaaataatctagttagaatttcaaatttcctaactatatcagatttttaaaatttgttatttttaaaatatattttcttaatttaaattataggattagaaaaatattaatatttgacattttatcttattagatatttatcttaattttttatatttttatcaaaataacataaaaatttgaaaagttgttaattttggtttgaatagaaattttagggttttgtaaccataaaattttcaaagtattttgttttatttaaagtttattaaataaaattgatgatatcttaaccatcaaaatattctattttgaaattgtttatttgttttatattattaaattataacattatctcaattttaaattaagatattatattatatttttttattagatatttaactaatttaaattatttaaataaactgaaaattacttagatatttgaatttcatttcgaattttagatatttaggagatttgttagatttcaaatattttctaacaacctaaatttactttccagatatttgttacatgtttgttttgtttgtttatttatttatttaaaaaaataaaataaatctattatttatttgatctaaattgttatgattaacttgttgacatatttaatgaaacattagcacaaaagacattaaagacataaaaaccataaaaaaaaaaatagtgtaaaaaaccaacatagtcatcaaacttaaaaatattttaaaagatctattcgtacttaattgagttttaaattataaaacaaaaaaagccaccatacaaggcataactatccaccaaaaccagcactaccaaccctaatcaagatacaaattagccaccataaatgactaaacaagagttaaacaaaaaaaaaatccattattttgtggtatattatatattagtcatcaaataaaactaaaaaataaaacccttaataaatgggatatggtcaccacatgggcgtttaacaattaaaagtctacagcgcccaaagtcatttttaattaagtaatgaaaatgatgtacttttttttcttgttaaaaacaacaataatgatgtatttttcaagaaagaaaatataaacaataacaactaaactacaataataataattaatacaatagacattactcacacaacattatcttaaatttggctataaatgtaagagtaatacaacattatttgatcatcacatccatcaagctagaaataattaaaacacattaaaccctctccttccttaattattaatattaaaattaattaagcatgggtagtagtactagtagtaacctagttttgatgatgataatgatcttattatcttgtgttttgtcatcatcaaataatgttgaagttgaaggagtagagaaaagtgttcctttaaaggatggtctctcatggcaattctatgcaaaatcatgtcctaatcttgagttcattattagagaacaactcatcaagatctttaaagatgacattgcccaagctgctggccttcttcgccttcattttcatgattgttttgttcaggtacttacatatttaaaaataggaaaattatctcatatactatttttttaaatttatggtggtttcctagctatttgaatttttatgtacaattttgtaaaaatgtaaaaaaatctattttgaaggattaaaaaaaaacccttaagagtatgttaataataagatgtcttcaccatttctttataataagttactagtataatatgtagtactaaaaatagagttttaaccctttaatttaagaggaaattatactctatactcactttttgttttatattttaatttttaccttcattttactactctttaatttatacatacttttataagttatattcccat

SEQ ID NO: 114631 - DNA, 9609 bp, Cannabis sativa
  modified_base (32)..(60): a, c, t, g, unknown or other
  modified_base (8197)..(8222): a, c, t, g, unknown or other
tttagaaagttcttatttaggatgttaataannnnnnnnnnnnnnnnnnnnnnnnnnnnngtaaaataaattccaacaaaaacacatgccgagcaataaatgaataaagtaatttttaccgttcaaattgtgtcaattttatattcttacttacaaactataatgatttattttcataaacatgaaactatctaacatgcgtgcaaataggtccgcccaggcgcaagggtcgaatagacaaataagaaatacttaagtcaattgcaagttaccaagagtctaaagtctactcggtcacttggggggcacctacactacacaatattagtaagaaaaattcttaacacagcaaaattcaaaacaaattaaaaagaagtgtatttatatttaggcaaagaaggagattaaagtccggacttaaatgtttcccagtcagccatttcttttaacgaaagaaataaaaataaaccaagtttaaaagtcaattggtcggctaatcgtcttaaatgaaaggcccatagtccaaactgatacaaaagaaggagattttcaaaattctcatctcatggaccttacaggctcatgatattcactagacaaattttttgaattcttgacaacagaggcaagaacagtattcttaatcttctcatcagtagtctggttggatcctttcagctcatcctcaaccttcctcatctcgcaatatctgatcatggaatcgtgtgtgtctgcctcaaggtaaccaaagttggcattgggattggactttcagaattcagataaaacctccatggcactagttttatggtacttaacatctttggcatgagcctcccacccagaagcaagtgcttcctcaaggttagacttcaccttcaaagaggattcttctttttgcctaagagctttggttagcttattgaccttagtttcttggcttgaaagaagtgtttagagtccttccctctcatcattgagttcccaaacactctttgattcttgctccaagtctgcttctagctgggcagtggaggacatgtcagccggttgctgcttcaactccctaatagtgttgtttgcagcacgagctgtttattcacttctctaagcctagtgcccttctgctcgacattactcttgacatcctataaagactttgtcaggtcattggttgtaatactagttttaagagcccgagacttagcccaggaataagcatatgcaagattcaaattagcctagaaaaataaataataaaataagttagaagattttagtagtaatccatgcaaaatccctaaagactagttatacacatacactggtaatttcctttagaatgactcgactaaaagttccacagatagtgcctcggcaccagccagcaactcattcacttcaaccattacacggtcttggtagaaaccgagcatctctttggccttcttaatttgaggctacacgaaaactgtggtggtacttggtttgaaaaaattataccactcaacgtcgacaacatcagcaccaactgatttcttagtagattttgggtgtttgggtagggtgattgggggcaagccttggaagacttcttggacagaaagggagtgtctaggatgtctatggagacaacttcctctgtcctaggttttacagccatagaagtcttttcaacatcaggtcgagaagttttagagcttgaggctatgctgactagaaggttatctcccactttttactatttaacaggatatttgtgtccgaaactatcaccagccttactctttagcatgttctttaacttggtcgacatagatgcacagaagaatacacttaattaaaatttgtgcaagtaaaaaagaaaataaacctaaatactaaagtagctaccctaaatttctggaggagcaccctcccaaataagaaaatatggagcatcctcatctaaggagtcttcttcatctggcacctcaactaccaccttcccttttccagctgttgcctgggcagcaatttgaatcgcttcttcaatgtcatctctaacttgaataggctgctctacttggtttcgactttgtttctttggtttattcttctcattcttcttcagaactttccactccttgactacttagtcattttcttgtaccgctttagatggataaagtccgtactcaagaaaatttctagtggtagccaaagagagatgttttgagaagaagctagaagttgaggaattgtttgtgcctttaacctcaacccaatgtaaaagggagatgacaataactcagagctaattagaatgaaaggtggtcagcatccatgtcctttacgatatagtaatcctggatgaacccgccaatcttcgagacatccttgtgcgtcatgccactcatccattgatactctgcgagaaatataagtaacctgaccagatttgtttcgagctacacttcaagtcaaagagctagttcgtatcatgagcagacgactgaccctaaccttatttgacgtgtagcacgaatagtgcggccaagtacttaatgccctttagagtgaactggatcgggaaaatcttacaataattcacaattttcttaatgtacggatggagaggaaaatttgcccccttgcttagcgtggggaccgaaccatgtacagagcccctcccagagttagtggcaagctgtctgtgagtaggcaggaaggcttcaactccacctaggagacccttctcataaaggttattcaacctcttataagtgagggtggaaagaggtgaaagccactgataaaattttctttccctagtcctcataggacaggcctcctcgtactctacttttacgtagtcttggtccagaaccaagacatctccaaaatccgagatgggctctctgacctcattgtaccctctgaacgaaagaacttgaggagccttttcctctcctcttccactacttcttctccttcaccattaggaggagtagctgcacggaccttgccctagttctcgacttcttggatttctatgtccccaatggctatttcaacatcctccatgggaggctcaacatgttctacaccgaccatcgcaaaaagccaggaaaaatgttggtccttagccaagtcttttctgtaagtttgtttagtttcagccatcaccctatgcttagcgtggagttgggtttagtgttatgctttgtgacagagagagcaattctgctagtgtagagtttttctttaaaagacctaaatgaccttctggaagcgtatctagggcgtttgcctaaccttgtacgtccatgtagcatgcatataatgccttcaacctttgttcagttcctaaatgaattgaccgtatccttctccattaattcgaccagggtaatgatggtgttgcaccacaggctctggggactctaaagagtcacttgtaacctcccacgccttaaagctcaaagtcgatgagttttcactcgatgaaaatgaagttgcatagagtctggactggttctcgtgaagaagatggagtaaatcgttatctatctggtagttaactccccagttattgccaaggttcatatacaaaagaaagcaggaatagctggcattagaatctaagactcgactttagcttgtcctagacctgtactacattaggtatgtgctgcccgtacccagaaaaaaggggtctgcgtaggggcgagaccgaaagttcgtaaatggtcaaagaaaactaagctcctaggagagtcaaagctggagccgaaacttggtgtgtgaagttaggagttgtcgtggaaggagtttgagctggagggactccaaaagcttgtatgtaagcatcttcaaggttgataatgccttgggcctttaccataaactcactcaaggtttcagctttcttcctctgcatttctccccataacagattcccaacgactaatctagtttggagggccatcgacttcatgtcatcgctaaccttagtcttggttgttgcctccatcattctttgaataaaggctttcaagctttcattatgattttttttgacattggtaagagaaccaacttccatatccttgtctcgcgcagtaataaactgctcacggaaggccgactgtaaatctttcgagctatcaatcaatcttggagctagtcgcttccaccaatcttctacaaacttggtcaatgttagggaaaagcataagcacttggcaccgtaactcacccagatgacttgcatcattttgttatacttcacaaaatgcactcgcagatcagtccttccttcatacaactcaatgtggggcattttgaaaagttctctagaagtacggtctttgaggtcctcctgacacagggttccgggccttcatctttcgagtctgaaagggctctactttgtttctcgaccaacttggtcagggcaactatctactcctccaatctctttgtgtcactctcgggaagatcacgtcccctcatcttatcgctcaagtggtttctaaggtcaccccacgtggccttactttctcactcatgtacttctcgtacttggcgtctaatcgtcagaggtctgcggtggaccagttggcctcaaaatgtcccacaactatcctttcgccctgattgatagaatcaatggggtgattccttcgcctttttggctttgcatccttgcattttgtccccttggtgtagtttttcctctaggatcaaaagggcgtccaggcccgaaagcatcgatggccttctatgtccttgaggattggccagctagattcgtatctttttgaggaggtttaggaatgaatttttgtgggggctcacccaccttgcctttacctttattcttgcaaggattcaaggtttcaacttctgtttgtttgtcaacacgttcttcggccattacttccaccgaaggttcattgtcagactctggaaggtcatcaaacttgttttgaaggcatttcatcatttttttttcatttttgcagtgagcttcctctgttctgctaactctgtctgagtagcctctacctccttggtcacttgcagcaagtttggattgtggtcatagtaataaccatccttgtagtacccatcttttatgttgtcattgccatcatcttcttgtccccaccttcaaggttcatgtcatcattgaggccgttaaatacgttctcagcgtcctccccctagttcttggcgtggatcatgccctcttctttaacactgcctgtctgggggccagaggcgagagagtatgcttcctccgtaatagtttccaatggagtttttttgcttgtattcttttgggtacaaaccatggtcgaagtgatgcagcaacgagtagactttcctcagctctcaatgaaagcaccaaaatatttatcgagatttccaaaaatcgattaattaaagcttaaggaaaatataaaacaataaataatagacaaatagttttttatgtggttcagacgttaataattcctagtccacgagtccgttgtattagccttgccggcgagcattttagtattatatgtgtttataatattaactctgtattctttttatttctcttgaagaagagaaaagcctcttaggaattttggcagaggttttgtaagtaaaattgttcatcctttgcaaattaaaaaaaataggaaattttttaggcacatgcatgggtgaggaaatacccttcacccacctaaggtttcgtgttcatcatatttcattagctggcgtttacaacatggcgaactgttggtagatagggaacctcctcatcgtatggtgcacaactgctgtattccaactcataggactaacgacacatgtcgtccaaaggtttcaccttgtaaagttagtgtatatacaagctgctggataaaaaaggagctacagagcatgtatgcgcactaccaaggtctgacacaggggataagatctaatttggtatcaggagatatgcaactgtcgggtttagcacagaatacgtctggctaaggcttttccgaaccaaagtaattcgctaccatcctgagcacatgtgatttctgttcccttccgatagcagtattattaatgagaatcctgaagtcatttctgcctctgctagtagggagagcctctgggtactacaacgccttccgtaaccccaagaaaaggaaggtgtacaataacaatgcgtaatctgacgtggtatcctttcatgattgccacgtacacttcatacgggaacacgaataacactttacatataaaaataaaatatacacttgatctattaaattttaaaatatatttgtatcatctgtattagatttaaaaattactttttttttttacattaaaatagtaattgtatatatttttaatatatatataaatatggaacacttcttaatgggtattactcatgaatggatactaaataaatttagctataaatattaattttagaaatatcaaactatcgaattttgatctaataacgaataattaaatcacaaatttgaatttctatgcttaatttaagtacttaattaaaaaaatatatcaaatgtggattgattggattggatcaattactttcatatgtcaatcaacatttaattcgtacaagtgtggatattcgcactttacgaattgaaatgaattgaagtgggtattttatgaacactcctaactgttatgatttttaaatttttttttcaagattagacaataattagttcattttattttttttattttattttgtatgactttgtgagctttgtgttatctcagattgacaataagtcgtgtgattttaaattatttggacattttttagttgatctttttattataatttttgtatatatatatatgaaaaaaaataaaaataaatgatagtcataatatttttatttaaaaaaacaaaaaaaaatcaaaattcatatttttttttaaaattgaaaaagaaaaatgaactacagaacatacttttaatttttgtttttaatattacaaaacaaaaatatttacagaacacacttttatttttttatttttaaaataaaaggcaaatatagttataaaacacatttttttttaaataaattgaaaataaaaattctacttttatttttgtgattaaaaattttaaaaaagttaccaaacaaacacaccttaatacatttaaaaataataataataaaatcataataagtctttatacaaatagtccacaagtcttaaaatcttgaatcccataaaattagaacacacattgcacttgtttattagtccagacaaagttgaaggcatatcaaggtatgaatcagtaaccaccgaacaagtggcctagtggtaatgcttgttttcctctagaaagagtgttgaattttgtgccctaactaaaactctattttaatataatcttgaatattcattaatcaacacagaattatttcattacttatttaatgtattacttggttcatatgtttatttcatgatcagttgtttgatttataaatccatctaaatccttatcacattggtattcatgagtactgtgttgtctacatagtggaaagtaatcaagattatatgattaaatattgtctcacgatttattagtacataggatttctattgatatgataatcaacaatgtagtttatttacaccttggatgggtgtaatgtcctttccaaggcattggaaaagtaaagcttagattggatgtattgttatacattggactggaccgatattgaacttaaataagatatcacacacttattattatatctatctaagtcaatatcacttagttgatcttagatcaataatctcaatactgagatggttaggttctagttcaattgtattatttgtgttctttgatttgttcgctaaagttgaccaattggatctttccgatacttacatattgagaacatggtagttcaactgagtgagagcgctaatcataaatacagaatctatagcttctataaatgcttagaggtgaaataataatttccttcgagcttaacttaatagagataaatggtggaatactcatttcaataattatattagtttactacattatcatttataggtagccaagtgtttcaaggataaaatgcattgaaaggtagaacggtaaatttgtccnnnnnnnnnnnnnnnnnnnnnnnnnngatcattgattatttagattataacaatgaataactaacaacgtatctatatcttggacatttagagcgttcgacataattaagagtggcaatttcaaatctttagtagagtaaagagaaattaataagttagagaacttacttgataaattctagaactacttattggaagcttaattatataagctcatggtccctacactagttgagataatactgcttgtagacttagttaattggttttaataaatccattgtaattctaaattagattatgtcttatttaagaattttcactaagtaaggacttaattgtgaagaaaagaaattttagggcttatttgttaattaaaagactttgtaaggtctaattaataaataagttaaatagcaattttatttgataattaattattattattaaataaatatttttgacatttataggattgaaattagaaaatatagcatagtgaaagaaaagataatttgttgaataaaatgacaaaattgtaactagtgtggtccactatgtatggccggccacttaacgcattattttgctgttttttttattccatataatttaaaccctaaccctagataaattattgtaaaaagaataagatggctctcattctcataactctaataacctaatttttattcttttgtaaaaaaaaaaaaaaaaaaaaaagagcctccttgtatagcaatttcaaaatcccttctcttcttcttcatcagttttcgaactcatagtaaagagtacatgcatactcatatcaagtcaagtactcaatcacagtgtgaaaaattgtaaagaattctaacacttgaaggaaatctaggttcagatcttgttattactccacgacaaaaaaggacaagggttagagatctaaacggaaggaatcataacattccgctgccagcaatgtaagggtttctaaactttatatgtgtttattttcagttttaagaattcatgtttaaggtgttaaattatagaatataatccaacatacttgctagtaaatgtagatcgtgataaaatatgttccaacaatgaatgaggtcatgggttcgaacatggatggcgatgccttaaatgtgaacctttggtgccaacccattttctcaaaccctttcctttaggaaagacattcaccactaactgttcggtgcggttctggtgacgcaccccatcgtaaatgggacacgattgaagctctcttggcaatcccagagaggggagccacactggtacccccctcctcccccttttctttccaacaagaaaaaaaaggcatgaatcaacaattgcaatttgatctaggagtgagcaacggtcagtttgattgattttttacaaaaaaaaaaaaaa

SEQ ID NO: 114632 - DNA, 4586 bp, Cannabis sativa
  modified_base (1819)..(1823): a, c, t, g, unknown or other
tttgtttctatatttttttttttttttttttatgaaaggagaagtatcttattaaatcaacaacaaaatttcatcaaattgtaccaatatagacaggctcaagataacactaccaactattcacaacactaggtataatcttatctttaaaggatattttccttttatctaaacaaccaaaatgggcttttattccttgtttaatcatatcattaacatactgaacagtgagcgaactaaattcaaaaaacaaagatttctattaacccagaaaaaataaaccacaatccacactctccaattcgcatacacaatgggccaagttgtaaatgccacccatccatgaaccttgcgcaggagcgcaacagaggagcgaagaaacaaaaaagtgatcatagctctcaataatgccattgcagacatctacatttaggaattgagagcctactccacaccacatgagcataatctactttctcaacatcaagaagagagttgtaaaatttactaaccttaaacctcccatttgcaatagcaccatatatcatggaccgagagatgatcaatctaagcttgaggagtttcttccaataccaactaggatcccctctagttgtgcgttgctaaaagtcttaccctttcaagtaaagactttgcacccatttaacccaaagagcatcaagtttaaaagaattatcccaaatgtatttactgaccattgctttattctatttagaactctctctaaagccaatccttccatattgttttagaagacaaatcttgtccaaagatgcaaagtgaagcttttacctgttatccttggtaccccatgaaaattcctacaaagtttgtcaatctttttaacaacactttaaggaagaagaaaaattctcatccagtagatgcaaataccaagcataacataatgaagaagttgagccctgccagaaaaagaaaggtgccgagtaacccaattatgtaaacgaagttggtccttagagataataggcccacaattagcaactctccatcttgtagtcttaaatggacccctaagtatttcaaaagaaaagaaccttcctcataacccacaatgtccaaaatgctttgcttagtttcctggctagtaccctcaaaataaatttgagacttctatttgttgcaaaacaaccctgaagcttttcaaaactctaaaaaagcctctgaagaagctgagcactcaaggaatgacccttacaaaaaatgataagatcatcaacaaagcataaattaactaagcccaagtgcttgcacaaagggtgaaaacgaaaatccttggactttgattagtataaaatattattataatataaaaacaattataaaagcaataattatctatatatctataaaattctaaaacttagagagatgacgtgacattctaagatttctatattatcttttttcttattttttctcacttttgaatatatttacaaattttaggataatatgcttcatagtatatgtttaaaaaaactcccacattgattagttagtatcttatatgttatgttgtactttataataacacattcaattatttacttttatttgtattaaaattactatttgttttttctcacctcttatatgagtgactaattaacttagtattactcaattatcttaatttaaaatttgttaatatatttcataaaatattaattataatagtattatataattatattctatatattattataaaatattttatcaatatttaaaattaaagtttcttttaataaaaaaatgagaaatgctaaagggnnnnngtggtgcctagcaccttcttatgtgttagtatcgttattggtctaactaagtatcaggtcccatttagtttaatataataacttttagggagtattactagtcaatcgcaacgcgacatgtcaagaaggtgctaagcaccactagtgcctaataacaatgctctaaaaaaatttatatctatctgtctatatctatataatctaaaactaagagagatgatgtggcatctaaaatttcatctttttatattattttttttcttattttttctaatttttgtatatatttttaaattttaggatgatatgctacatagtacatgtttaaaaaaacttccatattgattagttaatatgttatatgtaatgttgtaaattataaataacatattcaataattattctcttttatttgtatcaaaattactaattctttttttctcctcttatatgggtgactaattaatttaatattacctaattatcttaatttaaaatttgttaatatatttcacaaaatatcaattataatagtattatatgattatattttatatattattataaaatattttatcaatttttataattaaagtttcttttaattaaaaagtaagtaaaattaatatgtatgcaaaaataatttataaatcaaataaaaaataaaaaatatagaacaattttatagtagggactacttttttccttagcagatatcgtctctatgttttacatttagagaaattataattctatatctaactatatattttaatttgtaccatatatgcttatattattcaatttttatttatttgtaatgtttctctattatttgaagaaagtccgatagtcttttttaattttaaaaaatctaaaaaatttacgtatgcaaaaataattaaaatataaaattaataaaatagtaatttaaataaaaaatctagaaaattctatagtagggcaccacttttgtcaaaattttaaaataaaaaaataagtaaaattcttatattttaacaaataaaagtaagtaaaatttttatatatgcaaaatttataaaaatcaatttaaaaaataaaatataaaaaaattctaaagtagggactgcattttccttattagcgtctctatgttttacatttagagaaattataattttatatttaactatatattttaatttataccatacattcttatataattcaattttttttactaatgtgcgatattcttatgaaaaaaagtctgatagccattttaatttaaaaaaaatctaatatttttatgtatgcaaaaataatttataaatcaacttaaaaactaatagtaatttaaataaaaaatctaagaaattctatagaagggcatcactgttgtccaaactttaaaaactcttttattcttaaaacaaataaaaatattttatcaattttttatctttaaaattttaaaattatatatattttttagtttataaaatatctaaaattcttatgtatgccaaaaataatttgtaaatcaaataaaaaaaataataatttaacatatatatttaagaaaaatttatagtaggctccactttacttttattagttggcgtctctatcttttacatttagagaaattataattttgtatctaattttatattttaatttataacatatatttttatttagtttaaattttacactatattaaataacatatagtattatagtaaaaaaaagtatatacatcatattaagaatgagtatatttccttgtaatagtaaagtttagttgcttggatattcacattttattcatgaagtattcattagttaatgatatttcatctcatatgaaaatgaaatgaatatctataaagccaactatgcatgacgaaaatcaaatttataacattgaattatagtgtggtggcaggcaatatggcattgatatatccacccgtttttttctcccttcttcttcttcttttgggttcttcattattactctactattttaaattgaactacatttaattatttatcattaaatagctacataattaactagaggtgtttgcggtgcagatggtgcggtcttttactattttttaaactaatttgcacatgcggtttttctaattttctaaaccgcccgcacctcaaaactaagaaaccacaaaaactgcaccgcaaaaaatagtgtagtgcggtacggtttttacggtttctacagtttaaactatgactaaataattaaaatatcacaaatacaacaaagcttgagcaacacttgtcaaaaataccataaaacttagaaataaatatgaataaaaaatttaagtttcaacaatacaataattagtagactttgggttggatattcacatattgaacctaaataaatataaaaattggtatttttataatgtccagtgcagtgcgatttgaatcgcatattaacaattcaaaaccgcaaaccgcacagcaccgtgcggtttaggaaaaattcaaaccgtaattgcaccgcaaaaaattttaaaccgcattttttttacgatgcggtgtggtgcaagcggtttgaacggtttgatgaacacccctaaaattaactaaatcttaataaagaagatattgtatcaccaaccagcccttatttatttattttgaaaggggaaatttgaaattatatgcatattagggattaaaattggtatcctaatctaaaattatacataatttgtaaaatgggataacttttactta

SEQ ID NO: 114633 - DNA, 1442 bp, Cannabis sativa
cctccggtgcctcccgccggtcctgtccatcgccaaacatgctccgccggaagtctgcaccttgaggcgcgaaaaatcgctcgtcaatgaagccactaagatccctggttttcgggcccgggtctccaacccgtctctgattcggggctccgcagttgaaccgcaaggagtcttcttggaacaccaggtgggagttgagtccgttttcgagcctctgtgacggaaccaaacccatgtcttcagacgacattttctgttgttctttgtttttggcgaaaattaaacagaagaaaaccctaatcgcggcaactgggcatgattctagggcttcgaatttgaagaaaatgaggttttagttttggagggttttctgaaaattgaattagggtttaggacaacaagaacggtggcgtgaaaatgggtgtatgtaatgtatcagtgtgtgtactactactgctcatttttccttttcctttttttttttgtgagaaaaagaagagaagcactaattttaaattctaatatttgtgaggggctaacatgaaattttgggaaaacatcgttttttttttagctttacgtcagcaacctctgacatgagacaaaataggtatatataacgcttttgctttcatgtccttttttttttttctcctaagattttcttttcgtgttttctacttctatctccaaaaaatactaaataataaacctttgtaacgttgtcgtttagcaacagtgaggttccaaaacaattaaacaaagttgggcctttagaaattctcaaaaagtaaggtggcatttctgtagagggaatgaatggaatgggataggaaggaataaattttcattttttttgtttgttggatagtattagattgtcattctagggtttaatttgaattatatgttatattgtgttttataatataacattatattgaattttattgttgtattctattaatattatttattacaacactacgtttagtattgatttgtattaataatttatgtaagaccataaaatcaaccacaattcgatcctatttgggttcggggtccaaggccaggtcaaggtccggggctgagttcatgtttgaaattggggtcgggtttgagtcggggttcggggttaaagtccaaagcgaggtctgaatttcaaagtttagggttggggttcgagctgggtttaggccgggttcggtgtcagggctagggtcggggctaggtccgggctgaggtttaggtccaggtcagggttgggtctgggtccaggttaggattgggtctgaatttgggtttggggctggggtccccaaccccaaaccatttgtaaatattatagtagggaaatttgattttatatacttaaaaaataaaaaaaaaattattattaaaccaaaaacttaaactctaaaaaaactataccttttttt

SEQ ID NO: 114634 - DNA, 2146 bp, Cannabis sativa
ttggacatgagtttttgtagaagtcattgctaagctttgattgagcagtagctgctgccacgaacaacgccagaacaagaacaatggctgaaagagcaagaatcgagcttcgaggacttcccattttgatcaatatatatttattaaaatatattagagcaaatatactttctacgaatattggttgttttgaagtcctatttatataggcacacaaatgattagtgttgacaaatgatcgaaactgttgctgttggaccaaagaatttttctttgtccgatcacactctggcttaccatttaatataattaatattgacaatcaaaatataaggcaatattcctttaccatgttctacaaattaaaaactagaagaaataaatattttctttttatttatacgaggatatacttatatatatttcatgattcgaagacattcatttgatagcaattaaaaaccacatacgtgccccatttgtgcttggacatttaaattagtttacctttaatttattcttatatagtttaatttaaattaagatgaaaggccaggattgaagggacagatatggacaaaaaaaaaatcatttgtttattaagatggaaaataagtggaaacaagaggtgagacaaaattgtatgtataattacgtacatagattaaaattatctaccaaagaaccagttaatatatatttatttataaaagttctttctgaggggggtgacatatataaataaaattttatagaaattaatttgccagttcaattcgatgttagtgcctaccaactcctgttgatcactactctccatgactatatgatcaatatctccaagaaaattcgactctcacacgattctttatataaatgaatatacatatttaaatataaatataataatgcaaaatgtcatatctactgttctgatatattaatagacttaaaaatcctacttgttaatttatgccataagctataatctagctataacatatatagaaagataggtttgactttttgttttttttttttttaaaaaaaaagaaaataatttcattaaaatattaatattttaaaataatttaatttttatttttaatcttgttaacgcagattttcgttaactaataataagtcttttacataataaattaattatagaaattataggtatataatttaatataataataacaccaaatatttttacgtggttttgcagttaaacctgcatactccacgaatctatctttaagaaaaattaataacttaaatttaaatatttaaaataattgaatatttttttaaataaattataaaaaataataataattacattttattttcaaaaataataatttcttaatttttctttggctaagtgatgtagcacgtaattaatgagaagacgcatcatcttgaagaaggcctgcgaagtacactggcaagaaaaatcaagaaacgaagtttagcataccttaggtgatgcacctaggcgtcatatgctagtgtatgccacccatgtagaaatttttaacacctgggcgacatacatgtgcctccaaggtggtctttggggtgcattttttcacttccaagtcgccttcacaaaaagtgatctgatacgctctgcaagaaggaaaagtgatgtccaaagtgcccaggtggggagcacacacttgggcagcatagaagcatatactatgctgcccaggtatgcagctttaccacttgggtggcattactttgttccccaagtagattttggagtccaatttttcgatattaagctatcttccaaactccataatctaagaccttcttaaagtaaatcatgcacgagaatttaactaagtgtttcaacaacttaaagatttttccttccataggtaaacaccattctgggagcattggtatacctatgttggcgcccccctcatgtagacctaggcgacatacaatcagggtacggaggaagggttatctcacctaagctcattatcttgtggaacaactcttgcacataagatttactcgggtacaagacatacttcacaaaaaggaaacaagctaacatagcaccatactagggacctcagacataaacctgtgctccccccccccaaaaaaaaaaaaa

SEQ ID NO: 114635 - DNA, 5755 bp, Cannabis sativa
aatgcatcaatatatctattttaaaaggtgcattgtaaaattttctaataatatttacatattttgtaacacatgttgctattttctttatgcctttggtataattaattgttcgattaaaactttcttaaaatttatgcctttggtaattagtttaaaaacttttttaaatgctgaaacaaataaaaaatctaccataacaactttaggtacataaatttctcaatttattaattattaattatatttcaatatacattaagatgataaaaatgaaatagtaacactgtaacagtactcttaaaataaactaattttaaaaaaatatataagaaaaatgcaaaaaaatacaataataaaataaagggtaaaaaactatttgaagctttactcaaaaaaaaaataataataataaaaaaataaaaaaactatttgaagcggcagggcaggccaaaattgagtcgacatacactgattattttcgtccaattaatacccatcagtcaatatattatataagatactataattaaaccaattaacactatattatatttatatatgtattactacaagacaaatgaacaaaataattactagttaattatataatataacatccatatattataattagaaaaatacaattaaacgcgtttgctaacgttgctgtaatcgtatatgtatacttgagttgagtcttttgactatatattgattttgtaatatctatgatctcatcaaccatgaattatgatgttgatgcatgctgcatgcatgcatgtatgttacataaaacgatatttttgtgacattttttaaaattaacttattggatggatagtgatggggcctaacaaaaaaggaaaatcatgcacatataaatctttgggaaaggagtcatattagatcgacctatttggatatttaaaattcacattaatgtaagattaaaagaatgatttccaatctgtaactaaaatgtatttaaaacattatattgtatagataatatacttgctgtagtcattgtaagaccgcatagcgcagtggattagcgcgtttgacttcggatcaaaaggtcgtgggttcgactcccactgtggtcgactgttttatgttttcttccttttttttactgatttaatttaatgtgtatttatttacttgttggctactcatgaacatttgattccattcaatggaatctcactcttctatatataaaatataaatataaacaaaatcatttatgggaaatgtgttgattgataaaagagtaaaataggaaaagtaattaccttcaataagaattttttggtgaaatattttattatgaatgggaaattattttgttaatcgacaagttaataaagagataaaattagtataacgctcaaaaggttatatgtaaggtaggttaaatgcttagctcttataaaaagaaagttgagggaatagacaacttacataaaaagtgtagaagagtctctttcttataactctaattttatcagtgctcgctattcttctctcatacacacaaccatcccttctcatcacttcccttttatatacaaccatcccattcttaatagtctctttaattaatcacacccttaccattataaaaactaaactgctcattaataagattttataaaaattcaggctgcctattttataatcctctacgaaaatcctgtttatttcataaccttttatgaaaactaaattgcttatttcataacttttataaaaattaaaatactcacacaaccttcaaacacatcagtcaccaagattgttcatgaattataagtttctccattcacaatcttttttttttttcttacaaacacaaatacaattatattttgtaatacaccctattcatctactcaatactcacaaaaaaaccagcctaatctaaattaccacaatttttaacgaaaatagacactatttcctcaatacacgtttttaaatgtggttgtgatttactgatttaagttattattggtttggcgtttatgttttggcttctctttctttaaactaaaagcaaattcttgccactttgacaatttgccaatgtaagattgtacaagattcattttccaaaaatagattaacagttttaatttgttatttcactctattttaactttattgattgcatagttacttttgttaagtaaaataataataaataaatattagttcaattctgtttttctggacaaactgagcttcgatcaaattaattgatgattagatgtgatgctataaaaggaggaaggaagaacagcgtagttcccaaaagtaacacattaagaatttgttgagactaaaaccaataattgaagtagtagtagtactacataggatgcatataactgaacaaaggaaaaaccaaaaactcaatggtgatactgtccccaatgattaaatttgaaaagcagctaaacaaacattttaaaagtatatcctagaaatggatgaaaacatgttaagaacttcccaagaagatccaacattacaccttgatagcgtacttcctcattggaaagtagatttctctcttcttttctctttcggtcttcaatgacaactgcattaaacaagaaaacactcagcaactacaacaaaatgaagaaagagcactcccaacaacttttcttctctatcttttaaaatacatcacgaaaacaccactttctttatattactacatcacgaaaataatatattttttgatatatatactacattaatagaaatagaataaaaaatagttataatattattaaaatatgtttaaaggatgaatagtgcttctctacatcttctctacatgtagagaagcatttgaagaaaatagggatactttaaaacagaagagtttacatcatttgttggaaggtgtttttgctccattgttctttaaatttttaaagaatctttattttaaaggagctattgggagtgcttttagaaattttttaaaaaagaaaaaactttaaacctagtcacataacgttggcaactaaaagatcacgtagtaattctcaaatacaaatttggactaaaaaatgctagtcatttcaaattagaaagattttacattttagttttctgtcttctggtatttggaatcaagaatttccctgagctctccttagatagataatcttgatatgataaaatacatatgtatctagatctttaatcaaaccctaaattcttttgaaggcatggcaataagcttgactaatcagctttaatatctataacagtaagtttacaagttcgaatacttctagaattcttgggttatcttatgaatacaaggaataaccaaaaatcaagtgaaatggatctaaaacaactggtcagtgtgcagtgggccgccgtggatgacggctgtacgggggtgtattggtaggatctgacatcaaataagagtgggattggttggtggtttataactacttgtaaactcctatttttgagagtgagttttaccttaagtagttgtaacaaatttcagataacaagcaagtttatttttctttcattcaaccttcaggaattcacgagagataaagagaaaattaggattctcaaaccccagatcacaatcagcaaagctgaggtagaatttccagtagcagtagaactagcaaaccatactaatgacttcaattactaagtcacgaaaaaaagtgatctttttaaacacatgcccgaatttcaaccctgccccaactgtgaagctatctatctataaacaaagggaaaaaataagcacaaatatgtaggtttattccaattctccaaaatgcatcaagatcaactctagccagtttcttctaattggacatataaacaaattggcatatcatatagtggtgcaataataatagtatgataaactacatacattcattaactatttacatgctctaaacctatgtatacatcaaaattttctgctatgtggttttattgttcatatataacaatatttatatgtatatatacgaattaaaatgcagagaaaataagttcaatcaaagcatcttacctggtgcttggtgagacgcctcctgatagccctggtcttctttgtacgcagatcgagcggcaaaagcttcttattcttatatacttctctcaaagcagccttttgcttctgcgaaatcacagtcaaaacctgtgcaatcgaaagcctcaccacctttctacaacccacacagaaaaataatcaaatacattatgggaataaatcatcaacatccatactttgatacattccaatatttgaaagtaaaaataacgagaaagaaatgttacatcttggagagcttgttaggtgcaccgccagtgaccttagcgacccggagaagagcaagctcagccttcagatccttcaactggctctgcaaatcggccttgttcttggtcctaagctcgtgaaccttaatcctcgctttaacaaacacaaaaaattaaaacggtcaaacgaaaaatcaatcagattgataatgaatgagagaagaattaaggaaatggatctcgtttatcttacccatttctgtaaattagggtttttcctgcttggaagatgtagacgaagacggaggttgaagccttgaaaaattagctcaagtaatatacctcagtccccaaaaccctaatttggagcgaatcagactttgcacgtgtgtccttggtaggcacgtggtgttagttgggcctgggccctggcttgattcactatttgtattcgtgggctcttgtcgtgcaagcccaatttcattaggtaactcgaaagtgttaaaaaccgataagagtactactctatagcttttctcttttctcataaatatcaaatataatttcgtcgcttatctcatttttgttttaagtttgttatggaatctttttctttattgctgtatttgtttgaagtaatgctgtatttttataattagtttaggtagcatttggttgcaggtaatgaaatagaatattatggaatattttataagaaaacaatttttattttatttttttatttagttgtatattaaagtattcgaatatcattctaatggaatgacctttctactattttagtagaatgcctattccattttaaaataaaagcaaagaccattctaatgcataatgagaaaaaatttactaatttttttatcaattttttttacgcattttaaattttattccattttcttcctattcttattcctattctcatttctatattttcattccttctaaccaaatactgatagtgtttaaaattttgtattagtttttggcaattccaaaaaatgttttctactatttcttttggagaattttctcatcaaaaaggatatttgagtatttttatgagttatattatttctggaaaaatactaatttgaaacctatatttaacttgaatacataattggctatatcattttattaaaacaattactagactttatattttgcaaaataaatcaaattgattccctgtgttgaactttggttaaactatttttcaataaattgagatatcctaagctcactttttggccaatacttcaattataggtcgaatgataacttgacagttaatcatattaaaaattattctgggtcttgctttttgctatttttttttttttgttgttaataaactataaagaaacgagaataaaactattaagaaact

SEQ ID NO: 114636 - DNA, 2523 bp, Cannabis sativa
ttttggatgtttgcactactagcactagtatgaatgtggtttatagagtgttagtatagtgttgtttataatgtggttacggtgttaccagcacgagtaataggatccagaaatagagcactatgatcagaggaggagtaatctagattaaataattttacaaagttaaatgtattcagccaagccatagaagctaggccacagtccaaccttacctctacccatcgctccgtgccacggcctctctcccatgtaaattgatacccacataggtctatatccactaaattgcagtctgcaagagccttttgaaagccttctacaagccaagaagggtatggtctgccacctctcttgtcagcttgagacaccacattattaaaatcacccaacatgcaccatggtaaagaagactcctacttcaaggatcgaagtaagtcccagatctgagcacgaagagaacgtttaggttcgccataaatactagttaacctccactcaatcaagccaggaactttggtaataatatcaatgtgatttgtagaaaagccaataacattagcttcttctttaaacttccacaacatagcgagtcccccacttctcccttgagcatcaatcgagaaagcacattcaaacttcaaactctgtttcacccattcaacacgttctttattacacagagtctcacaaagaaatacaaatttgggctgcttttgagaaatcatctctttaaggaattttaatgtcaatgggttcccaagcccatgacaattccaacttaaacaactcataatgataggtgagcccccacatgttggcccgcctggatcaagttttttggacttcctacctcctcctgttcattttgcctacccgaaaaagtattattgccactttcatcttgaatttgaatactcatagttgcttctttaggtccaatagccaaactttggtctaattcttgttcagtactctgaggcccaatattatccaccatcagtacttctacattcataagagtaggcccaacaagagaattaacacccacacgtcttctcttttggtcagaaataataactcctccattttgaatatattgcccgctattagttaggtcaataccattacagctggaattgtgtgaagctataactccctccaaatctgagataacatttgagccaccatcaatacctttattcttggtaatcaaatcttccttgcccgtaatttctggtccactaacaccttaatttctactgggaatgttcactgagatagagaatctttgaccaatcactgtcgccgagtttccgctgcttgagtagaccagaaacgatgaagcagaaggattgtgtagccatttcgaccatcaagaaaattcattctctttggtgttgctttcatccaggctccatatggttttacaatttgggcaagaggggtaaggaaaggttttgaacagaatctattcgtgtggccaatgatgccacaaatgaaacaaaaggggggaattctttcatatataaactgaacaaaagtccagtcactatccttcagatgaagcctcatcttacgttttagaggaacgtttatattcaaagcaaccggaacacgaaagtagtccctccagactcccataaagttattcgggtccgatttaacacacttaccgatatactatcaaacttcttttaaaactgtcaccgacatgagcccaggtaggatatcgtgaacctggacccatatatcaagcttattcaacatcacaagtcgtggattatcccctgcttttagtctttcaaagatcaattgttgtctattacacgtccatgggatgccttctataactctttgaatatctaattcatggaagaaatgaaaaataaaaagattactttccaattgcttcacatacatgcccatgtttggtttccataaattagccaactgattctcgacaaagtcaagatccatcgccctattagagagaaatttgcccaccaaactccatcgagaatcaaaactatcattctcctcctccccaacatcaaactcaaaaccaccattggcctcttcttctattatcaaattagcacagtcagtctctaaatcctggatagaaggattacttgaggaagccatggccaagatcagaaaaaaaaaaataagaacgacaaaaaagattacaggaaaaaactcacaactatgtcaaaacgacaagacctctcccatgcatttaaatattctttaaaaatatttttaagttatttgagatacattttagttactctctaaaaacttatttgtattcatcttactaactaattagttattttaaattatattatggtagattataatttaaaatacattttggtaactttgaccaaatcgtttttggccattggataaaaaataaggaaatatacatggtatactaacttttactattttttcacaaaaatactgccaggcggttttacttttttactatgttttttcataagtttcatactg

SEQ ID NO: 114637 - DNA, 3249 bp, Cannabis sativa
tttttaaaatgacaaaaaactattttctattctcacttttaaaaacacaattttaaaaactgaaaactgaaaacacagccaaacaagctctatgattccgtaatttttttggttatttttgggtacttttgaaataatcatataaaaacatttttagccctttagtaaaatgttctcgagacgggcctgacacgattgtaatgtgcctttgggccgtatataggaaataggggctgtcactggtgactggactggacgacatataaatttatacaggccgtgttgggaggaattctacacaagatcttgtgtattttcttggaagaaaagcttcttcaattgaataattgtactgtcttctcttttagcttctcacacatcgcacttttccaatagcaaagccaagaacacctagtagagcatttctcacatctcacatctcactattcaggagaagacgaaatccaggtctttcagtcatgagtcgaggcagcggaggtggctacgaccgtcatattacgattttctcacctgagggtcgtctctttcaagtcggtatgtgcttctttcatttcatttctttatacctctattttttgttctttgaatcaccactgtatctgagaagtagggtttttttaatactttttatttgggaattttcggagaaactgattctgaaacctagcaatatgcacttgctgcattttttgtttttacctaagaactcttagattaacagaagattcgaggggtttgacctatttttgcctgtttaaagagaagggatttacaagatcgcattccgaagtttaatatttagtctctaataggtgaatgggttatattcttccgtcaatgctaccctcaaagtcattaggtcagtgacttagtgttgttgttgggttcttcttgtattagtgtcatttcgaaacagagaaaattaccagcttgaatatccttgtcattttgcttaacaacagttcacaggacccgcttatttattcttttcttattttggagttaaggaatcaatcgtatctttttcctaagctagagattattgttttgaaactaattaattattaaatttcttctcattgcttttgcaaaaagaatgattaaataagaaacatctacactgtattcggtgaatcttggtgattttaatgatgtgaatgaattatttgttcgtaattactctagcatatatgcagtagcctttacaacgttcatcttatttcaaaataaatttgtagaatatgctttcaaggctgttaaggctgcgggaatcacgtcaataggtgtctgcggcaaggattcagtttgtgttgtcactcagaagaaggtccctgtaagtattgcgctgcattctcgctgttatggttgtttgtatttgcggtggtggcagggcagaagttattataagcttaagcttgagtttcaagtgttatatatgttttgaaatttcctgcaggacaaacttttggatcagacaagtgttacacatcttttccctattacaaagttccttggcttactagcaactggcatgacaggtttcttcttctatcctttctgaaaagatggatttgaatgttgtgttttttgttgaaaatttgttattcctatacgaaatggtggcatcttcttaagctttatcatgataatagtgttgctatttcttcccctaaatgcacatggtaatttggtatactttcttttgttactttgatttagctgatgcaagaaccttggtgtcacaagcaagaaatgaagcagctgaatttcgcttcagatatggttatgaaatgccggttgatgtattggccaaatggtaattcctttttacgactctactatggtatgatattatactagttttttttcttcccctgagctgatatctagaatgatacactccaaaaggggcttgctagatgttatttatttatcttaactggagtgtatttgtgatctagaattctttgttcaactgccatctgaaaggggaattaaagatgttctcgttgtatgcttgtaccttagcttataattcctgccttgtgtgttctatggttttttatgaacaggattgcagacaaatcacaagtatatactcagcatgcttacatgagaccccttggagtaggttagttcgtcatctaagttagtactaaatatttcttattatttaatagattgaaaagagtaaatggttattagatttagtgatacatatgttattgggactgattttttttatcttttttgtttatttatttctgcttgatttgggaagttgcaatggttttgggtattgactatgaacttggacctagtctgtacaaatgtgacccagctggtcatttcttcggtcacaaggtacactgtcataagttttcatcacttgttcctttcactgttttgttaagtcattccctttttatgtgtgcgttgtcaaatatttataattcttattattggaatttcattactttgtactttaggccacaagttctggattgaaagaacaagaggctatcaacttcttggagaagaaaatgaagaatgatcctgcatttacctatgaggaaaccgtgcaggtagatattatatgataattatgatttggactttgcattatggattgttttggcttcaaattattactttgtgtataattaacttttctaacattggggtcctagccaatttttaaaattgcgcttttattgtgtgccttgaggcgaaaaaaaatacacactattgcgtgcgcctcagcatggagaagagaggcgtacgtctcagccgaggcggtcggaagtgaggcggtaaaaacagtgaggcacaggcctcaaatggaaaaccaaattttagggtttttttaagcccattttcattcagcaacttaaaaaaaagcccaataacatttaattttaaaaaaggcccaataaaacacaataaaattaaataaacaaacccaataaaactcgtagtaatcacattgtatacccattttacttgttttaattttttactttcatttttatattctttaagatatatccacttttatagatgattttcccattagaacacttagtttaatgtaaattatatgctagacttaagtagagagtgagtgtatattatgtaactcattcataaaagtgggtatattttaataaaatataatataagggtatttttgattaatgaatataaaaaagaggtattcctcaactt

SEQ ID NO: 114638 - DNA, 2427 bp, Cannabis sativa
acatcaatcacttcaaatttcttgtgttgataactaatcaaattgtaaagcgttttatttagggcataaaacccaacaccaacagagaatatataccactttacaagtcgtattcaaactccaataattatgttttgaatcataaattgcctaagtgttgagtggtttgtcctttgcaattacataattttctttgttgtatttgttgaaagaaaagaaaagttaaaggaagaagaagaaaagaaaaatagtgaatgttatttgagtgttagtttagtattttattttaaagattatcaaagataattaaaaaggagaagaagagaaaatcatgagaaatgcttggaattaatattgtaataaattattgtttttcttatttggaaatttaaaattgttaacgcagttcgttaattaaataataaattttttctgtaataaataagcttcagaattcattatataataataataataagtgtcaataaatgataagagagtttttttttatgtggttttaaagttaaatctttgtagtctacgagtctatcttatttaggattataagattgtatacagaatacaataataccatttttcatgaatgaacaataaatacaatattgtctaaaatctcaagattgattgtcctttattttttgggttctgtccctatttataggagtctagggtgatagttattcccttaggatagaatcattcgtaattgattatgaaatgtaaacattctccacgttttatttttgtgcatatggaataattatatataaccttatttttatttgcagacaattatgctatctatgcttcgttgttctctcgccattcaagtaatacttttcttaaatattttcgtggaaaaacatccaagtgtatatttatagtgcattggctatccacaaggtatgaaggcttatacgcttatggatattgagacgaaacaaattatgtctctagggatgctgtcttctatgaacagatcttccctttattttccccaacatctccatctgaattaacaacttgttttctcacactgtgcttcccactgttaggcctgtgaagcagactcacaggccaataacgaacaatctcatgctcacaccaccatcaaaactagttaaaattggtccccatcttagccagcaaaagtcctcaatctactaaacctgaccaaattaaatcaacaccagtttccactgatgctacccctacataggcccctatacctgcatctaaatcccgagttcagcaacttcctgctgcaccaattaccactggccgcactagtaaaaaactagcctttctacaagattatgtgtgtcatgcagcctctactactcatccaattgaaccttttttttttttatcttacattaaattacatccctaatttcctattgctgtcctaacaacatactctcacattgaacctaaaaactatgctgaagcatctctacttcaacattggctccatgtcatggacaatgaaactcaagctttagaaaaaaataagacttgggtcatcactaaactctcctctgccacaaagctattggctgcaaatgggtttacaaagtaaaatacaaccaacatggggatattgacatgtttaaagctcgccttgtagtcaaaagtttcaaccaaagacaaggcatagacttctctcagacctatgcaccagccaagttcaatacactcaaaattttcttggcaatagtagcaatttacatgattggcatatccaccaattagacattaacaacaatgccttcctccatggggacccccatgaagaggtttacatgaaaataccccctggatacaaggcccctcccaactctattttcaagttgaacaacagcatatatggcatgaaacaggtctccagacaatggtactcaaaactcagtaccactctcattcaagatggcttccaccaatccaaatctgacaattcattcttcatcaaatgaacaaactctaatttttcagccatccttatttacgtggatgatatcatcgttgccgacaacaatgtctctaatatcacaaaatttaacaattctcttgactaaaagttcaaactcaaaaaccttggaaaacttcattttttttttcttagccttgaaatcagttgtactaaagaaggcatatccatctctcaatgaccatttactattcagatacttatggacacatgctacataggtgccaaaccatcttccacacctatggaaacaaatttaaactcattaaagacaaaggtactaaaatcactgacccgaatgcctatcgtagcctcattggcaaactaatttacctaaccattacaaggcccgatattacatgtacagtcaatcatctcagtcaattcctatgtaacgtccccgcttcaagcctcca

SEQ ID NO: 114639 - DNA, 2097 bp, Cannabis sativa
atatattgaactatataataatataattcctcaattacacataattatctagttagggttttgctaatctatttcttaattccaggtattacatttatggtttggtgaagtgggcgctgggtgaattaagatgaaccttttatctcactagccgttggatctctgcaaaatctgaacggttgatcctgcataggcccattttctttttgaaatataaatttccctcaatggcgttctttttacttttcccagaagaagcttcatatttttctttgtaacctttttcttctccagcacacttttgcatgcaagaagagttagagggtttgatccaacgattactcatcatccacgctaagcttttcccagacattttaccccttcgactggatcgacaaagttctttgttaggtgaagcattcaattttcaagccagctgcatcgactggctttggagcttttaggcaggcttcttcaacacgcaactcttttctccctatttgacaactaagtacattgaccctttacctgaacttttcgcatttcgcgtctaaggaaagaatttttgtttaggttagagctaggactttttacgtgcaaatagcaaggtagagtgtgtgagagatgctttgcccttacacccgtgaaccatgagattagattgcctagggccttagtctaggtagagtgtgtgaggtttgctttttttctttaattttgtgttagtagcaattgacttgagctaggaccttcccacaagtgtggttacacttactaaaggtgtgctcatctcctctattaaaagaacctctgcgggacaggatcaaaccgtggctcccagagtgacacttcgacctgaggggtccttgaaaatcattccagagaatgaacccattactaaaaagaaccccctctggaaaccagaagagaaagggggctctaaacccccccgcaagtgcaggcctataatgactccacttgggaaatggatcaaaaagccaactgcttctaatcttatgggatgctgcaagcttattcttacgttgctagccttcacaatgtccctgaattaatgtggcatagactttctgttatgggagaatctgcttccatcagtgtagagggattcagtgcatggagctagtctcagattttcaatggcgctgacctccctctgagaacttatttcacaaacttgattgcgagaatcggcattgggattgcccctttccaactaatcccctcatcatataggcttttggcttggtggtatatattctgcaagatgaataagctagaagccccttctctggaggaaatcctttacttctacagtgtaaaggctaatcctataaggacggacaggaaaaagatggggttctttagattggataagcatccagattcttattcgcttatttgtaatacagatcgtactcactacctttgcgagtagtggttcttctcttccagatttctggtgttgtctcttcacctaagttttcacctttcacgtattctaattatctaatttgaatcttgtctatttctggctctattgtgttgctgttgtttttttatatctagcctcattaacgtgcacaatttttagtaaaacttcctccccagagtacttggatagaggagatagctaagaaagaggctcaataaagattcttctttgaagaacaactaaaggtcgagggcttattgacgactgaacttctccgtaggtttggcttgattacaaacatccaaagaattgatatcgtcaacctccaaggacaaccccaaccgtctaaggaagtgaaggaggctatcgccactgatttggctgttatcatcacaaaaggagccaaaaattacaaaatcttgatccctaactagttttcacgccatcccaatcctctatccgaggaagaggaaacttggagaggtttgctgctgtgtatcacgatgtacggacccccgaagctagtacatcgagaagagataatagaccctgatgttgggttttgtgccctaaataaaacccattacaatatgattagttatcaatctaagaaatttgaattgatttatgtttgcatgaatttt

SEQ ID NO: 114640 - DNA, 4946 bp, Cannabis sativa
tcatcaattatttaaagttgttgttgttaccatattccatttataattgttgccattgttatccccaataagtttactcaatacataataatacaaataaataatataatgaagtgctaatagagataaaaatattaaaagttaaaaaaaaataaacactacaatgttatatccatagaagcaagattaataagaaatatatagtgttaaaaaaagattaagaattgagaaatttttaaagaaagcacttaaaattaagagatctttattattatgaataataaattttactaaaatattaaaaaataaaaaatgagaaactatatacaatatatagtttcaagcatcagttacaacaatcatgatactaataaaaaaaattcaaaatataaattaataaatcgaagtaaggaaataactaactacaaaaataataataaaaaataattattttattatttgcatatatatttttttttatatttgtgattatactaatttatattattaaaaaaattgtaaattgtaaaatataatatatattattttttaatatgcacggtatataattactaaaaattaattataaatattttatttaaaattaaattaatatctcaaaaaaccaacaattattttaaaataaaaataaaagttagcaaagtttatattatgaaattattaatttattctaaattaatatattatttttgtcatgcacatatatatactcttttattatatatagataatcacataaaagcaaaagtcaaatacaaatagtcaaagggaaaaagtatttgtaattactaaataaaaaaaggaagaaagaaatgtgatatggaataaaaaaataaaaaaaaaataaaataaatagtttcctctaattcacaaattttactactttaattagtgattttgtgatgctctctctttcgacatatataaaagtactcggtaaaagtagtttacggaaaatctgtagtaaggtattactatataccatttaagaaaaaagatgatatcactaaagtactactattaatattcatatattgtataaattagataagaagttattttatcataagacactcaattattctagcaagtgaaaccatgcttgagaaagaagtttaaccctcaaatatgtggttggcatgagcaccctaagattcagagccaccattgatcttaataaacccatcttcttggggttctttctgcggcggcaaaaattaaaagacctctggattcagtacaaatacgagagactaccaaagttgtgttttaaatgtggtctcctcactcatgaccagagtgtttgcttcaagacctccactgtagttaaagatggctcaggaaactactatccaaagtatggagtctggcttaaaagtgatgccactgaaagatcaacattcacaacacccctggcaaagtggttccaagactgggtgctctaaaagcgaattttcttggaccctaccctcagaaaccaactgaaagtccagaaggcgattcgtcatggagaatcggacgaactcagggaatgtagaaggcaactcccaggcaagaaacaaattgtttccgatgaggagcataaccaggaggcctcccaagcacaattggttattacccaactcccgttggttagtctgccgggtataggagaagttgccccttttggaaaaaacacaaaatcaatatccatccaagacctgcaagaactcaagaaagtggctgtaagagacgcaggagaatcctccaatggtaacccttctgctgcgaggataacagataaagatggagcaagccgcaatagtccaaagtccaccatggattaggaaaaagacccctcaagcacctccccacaggtttcctcactcgggtaaacaagatatagccgttacagatgaccaaaagcagactgccccttgtgaacaaaaagaattagcgaattcaaagcaggctgcttctcctattgtgactgaacaaagcatggcctatattgatagcccagtaacgaaggccaagacacaggatattccctatagcatttccatactcgggtcccaagctcttctaatggattggccttcaacagaatgttgggcccaacccaaggcccgagagctgttaatgggaggccttactgtggataagtactttcgagagcccacgttgtttgatgccctaatgaacatcaatgactttagagtccaagagcatcttgtaggcccccgtaaaaggaaagcctcgaatggtatcatcctcaaaccatctccagagaaacatgtttatgaccatggttataatgaagccaatctcaatactcccattactgatacccagcaccactcccccacaaaaacatcatagcagcaataatctgaaatcaaaaaccagtcagatgtctttggagagttcaattcaggttcggccgaagctcccagctctagcaagagacggggaaggccaagaaaatctcctactccgacaaccaagaccagctgcactccgaggaagaggggaagaccaccaaaagctaaacatggtctctcggccacgcccaagtcctttaaatggaaaaaaacatctataccaatggctggagggtctacgactgttcaactccaaaaagatggtaagttttttgacttaaaagttgacttggacaatcattttgtgctggtcgagaaacaacaaagactaaaaggatcttgtaccataactgagatggaggaggaattgctagttcaatcgactttgggaattgggcaagcagaatcggattttcagtttggggctgtggagacttgcccagaaaagtctccaaagtcgccatgaaaatcttcgcttggaactgtcgtggtctcgggaacaccgcgacagttcgccaattggcagcccttcttcgccaacataaacccgatgtgctactcctctctgaaactcgtctagcaccggacaatttcaagagaatatgcacgaaaattagattcgataattatcattacgttgcacatatggtcagatcagtcgacttaggcttgtgtttgattaatgatgtaaaatgtgagatagatgcctcctcaaagtttataatttatgctataattgactttgaacaaaaaggccttaaatggttgttactggggatatatggaccacctcatcgggaagacaaagaagatttttggattagtattggggatatggtgaaccaatcttcacgtcatgttctcctcattggggatatgaatggaactctcaaggatgcataatactttcattactccaaacgagggagctcttcaagatatgccttcgactttcgcaaaatggttaatggagtgggactaattgacttgggcttccaaggcccttgttacacttgggctaaggatcgcaacaataacaactatgggggatcaactaaaagagccagacttgataggggattagcgtcttcagattggcgtattcttttccctaatgcaattgtgaagcacctctcttccacggggtcagaccatcgacctattcttttggactcaacaggggcagtgaattgtaagggtcgccttttcaaatatgaaaatatgtgggctagggacccaagatgcttctggattgttaaggaaacttgggctacgtggctacaccaacaccctatgataaacttttatagagaggtgaaagctacaggccgaatgctcaagaaatggaactttatccaatttcagcatgttaaaagacaagtggaggaagccacctctctcctccgtgatgctaaaactaaacggcccgacgatcacttaaccatcaatatggcaaaaggaaaactttcggaggcgttgctgagagaagagatttattggaagcaaaagtctagagttcaatggctccaagagggtgacaagtgcacgaagtttttcattgcatcgacgattgttagaaggcgaagaaattacattcagtgcatcaagagtgctaccggagcagattggattgaggatcctaaagaaatctcttgttgctttctatccaaattcaaggagctgtttcaaaaaacgtcatcctgtgcctcagactcgcttaatcatattctttatccaatgttagatgattttgatatggagagtctccaagctatccccacagttgatgaaatcacctcggccctcttcgaaatgggccgagacaaagccccgaaccggatggcctcccaacaagtttctacgcccatcattggagggttgtccaagccgatctgttagaaatggtactacacttctttaatacaactgagctaccgaaaaccataaatgacacatccattgtgctaattcctaagaaggaatccccggcccttgttgcagacttcagaccgatagcactatgcaacatatcttacaaggtaatctctaaagttcttgcctctagaatgagatggatactcaataaagttatttctcccaatcaagtagcattcgttaaaggaagacatatagcggagaactccatgattgctatagagaaagtccactcaatgaatagaaagaagggtaagagaggatttatgatgataaagcttgatatggaaaaggcgtatgataaaatggaatgggatttcatcacttcggttcttcactgactaggctttcgaaatcgctttgttcagtggaccacttcttgtattatggtggaagagatcaagctccttctcaatggttcagtggttggaaaattccaaccgcaacgtggattgagacaaggagacacgctctccctgaccctttttatccttggagctgatgttttatctaaactgattattgataaggtcgataggggtctaattaaaggtttcaaaatgaggagggtgttggatatattttaccaggatctagatttactaagaagtatgtttcattaacatc

SEQ ID NO: 114641 - DNA, 5175 bp, Cannabis sativa
aaaaaaaaaaaaaaacccttaattttatgatggaacgactcatacttcttagtaaaaaaaccttactatttcctattttttaaaccacgcttctacatcctaacaaagtaaaatattgtggagtacatatataaacggattgggattagtacaaggaagactaatatttttgtacaacatagacaatgccaaaaatggcagttaaaatatcaacctcgctcgacaaacgatcgagtaaatggcaaaggaagacgacgaagcctagggaagaggcattaatcttttttattttatttttatcattgtttaaaatttaaacctcaaaataatacccataaaatacaatgttttggtcagtgggctagggattgaggaatgggttgatttgtttgcattgggttcgtggctgcaccaaagatatattggtggcaagcattgattgaagttttgtatatttagtgtttcgaaattaatttattgtattggaattagttatttgttgttttgttttaatgcgtaattggtacatcagtgtttgattttattctcaattgtggcgccgcaagtaatcgaaaaattcactgttaatgttatttgcaatgatatatttttgcaaatttgtcgccgcaaaaaatcatgggaaatgatattatttgtcgcatttttttgcgatggcaatcttgatccgtccccaggttgagatgactattccaaataatcacggggtgggtggaccatcaataggatctctagcatgcatatcttgcaccattgaatcgattcagccgatgtcatgggttaggcaggggatgcttgtttctagacaagtgctcgatgtatcattttgataacttgccatcacagtagatatcactactacaatatgggtctttagcttttcttttttttaactcattttataaaaagggaagctaaagggtgtgaaaacacccacctgattcgaaattgacatttagaggcgattttttggtaaaaaccgtaggtatatacaataataaactctatcccgtcggttggatcgaaattggcaaagtttaagggttttggagaaaccctatgccgtcgattcctagcaaagaaccgacggcataggtgcacactttattgacacgtgtggtagaaatccttgtgtggacgggattgtagaggtgcttgagtttgagattgtgctggaggcgacatttccctttaacgttgcaccctactcattgctcgtgcccactacgctcaaccaaaactttacacgttatgtctttcgtcaaccatttgtgatgccatgtgttgtgtgtctggaattttagttcattatacatcgaccgctaccaaaaaacagttactattagtgataaatttttagtcacaacataatttttttgtcactaaattatgacttttagtcacaacaaaaagttatttgtgactaaaatatagcatttgaatacaagttgtcactaatttagtttgtcacaacaagtattatgactaatctaacaaattgtaatttttgtgactaatacatttagccacgtaccttttagtcgcaacataagaaattataatttataattagttataacttttttacttttggttacaagttttgctgtgactaaaagtaaaaaaatttatagtgaactcccgttgtaagaaaaaaaaatgtgaagtttttttttttaattgaaaaaagttgtacaacatgattactggaaaattttccaacaatttcattagtaacttacaaaatctagttttgctagattgacgaactgatgagttgctatttctttgatattgcctccagccattagttctaaatatatgtatctcatgctagcatgattcctatttttcgtactttttaaaatacaggttgtgtcgtattgtttcagattataaaaaaatatgagacgtgtcgtaccgtggcataagaaaatatgggtcgtgctgtgtcataaaaaatatgagtcgtgtcatgctgtgcaacaattttatagggtaggcgtaggcccgacactacctgcaagtctgataatttcatgttgtgcttgcattcatatcgtgctttatttgggttgacccgtttttcttaaatagaccaacctattttcttatacgggctcaaatttgtgctccatatttttgtatttttattataattaatgagctaaatactaaaatatatgtgtattttatagttttaattatttttatattttttttcaataatagttacagacaatcatataaaaaataattataattattataatttgaatattactatcattttaattgataaataaatatttattattgttactattatcaaattattggatattttaatgtgtcacgctttagagttaatctatttgtgcttatatatcgtgcttttgggcttgtcgtgttgtgtcgtgcctaagtccatattttttgtgtcgtgtcgtgcctaagtttatattttttcatgtcgtgcctaagcacataacttttcatgtcgagtcatgcttgtacctctcgggctcgtgtcagttccatgtcgtgtcaaaaagtccgacttatatttgcagcactacctccagctatcaatatagctatataactctaattttttgggttcaccaaaataatataaatttaagagaaatttcgaaaggcactaatagtgtctattatcctcttacgcttcgatattgttattggtgcaattaagtattgtgtctcatataatttaatgtaataacttttaaagagtattgctaatcaaacctgtcaaatgaagttgatttggatcattcggtttctacagtaaatgtggattccaatgatcattcaaacaactcagcggtgattgctatgcaatcatgcaaatcatcatgaaaataatcaattagaatgcacggagtttggggaacctgagtgcattccgtcgattacgtttgcttgttcatgagcaaactcctcatgttttgtttcttatggaaacaaaagtcatggttttctctttctcatttcaagcaatcttttaattttaataatggacttgaagtccctcgtgtcggtttaaagggaggtattatgttgctacggaaagataatgttattgtaactcttctttcaatgaatacaaatccctttgactgctacttgttgtttgatgatgcccccattggcgtttctcagctgtttatggatttcctgaaactaaaaataaaaagtatacctgggcactcattaaaaaacttgctgatgtttctccacaagatctttggttattttttaattaattaataacataatattataaacttaataatatatatataattttttaaaaaaaaataatacctacgtgtgtagttttttttcaattaaaatttttattttttaatttattaataacatattattataaacttaataatgtatataactagtaagcatcgcgtgttttgcagaggatatataaaatattttaaattatgtataaaaaataaattgtgtattttaattaataataattacttagtattaaaattttaattttactattaaaaatttgtgacataaatacttaaaatattaaatttattgctaataaatactgaaatttgaaaaatagtagcataaatcatcttttatggtttaatttttgttctgatgtgtgggtttacaagattaaattcaatgctgatgggagtgtggagaggttcaaggctaggttggttgccaaggactacaaccagcaggagggattgatacacagatacctttgctcctgtaactaagttggttactgtcaagttggttttatctcttgcagcaatcaaaggttggcatctacatcagctggatgtcaacaatgcctttctacatggtgacctccttaaagatatgtatatgtctctacctcgagggtatagacctaagggggagtttccaccaaatgcagtttgtaaattgcaaacatcaatgtatggctggaagcaagattcaaggtaatggtttgccaagctctcgagtgctttaactgaagaaggatttcaccattcagccacataccattctttattcatcaaacattccaatggaagtttcatttttctgctggtgtacatggatgatgtaatcctagctaacaacaactaggttgagcttgaatatttaaaagtcatattgcatgctcgatttcagttgaaagatttaggaaaactgaagtatttcctaggtcttgaagtggccagatcagaaaaaaggatctttgtttctcaaagaccatatgcattgcagctattggaagaccttagttatctaggatgtaaacctatgaatacaccattggaagttaatttcaagcttatccaagatgagaaagaaaaacttactgacccaacattgtacagaaggattgttggaaaacttcagtacttgacaattacaagaccagatatctcctactaagttaacaaactgagccaattcttgtctacacctagagtcactcatccacatgcaacacaaagggttctgtagtatgtcaaaggtagtccgggataggggattttcttcgctgcaaactcagaagtaagattacatacttacactgactctgactgggctgcttgtccagatacaaggagaaccacaactggtttttgtatctttgttgggacatccatcatctcatggaaaagcaagaaacaacacactgtttccagatcttttgcaaaggcaaaatacaggacaatggctaacactacatgtgaagtggtttggcttctctcaattctaaaagaactaaaggttgagcacgaagggccggcattactctactgtgacaataaatctgcacaacatatagttgtcaacctagtgtttcacgagagaactaaatacatagaaatagactgtcatttagtgagggaaaaggtacaccaaggtgttatcaagacagttcatgtttctacaaaagatcaaattgcagacatcctaactaagccattatttcctaaccaattcaatgtattcaaagacatgatgagactaaaagacatttaaagtccatcttgagggggagtattaagtgttgggattttctgccctaaataaaacccattacaatctaatctgatttgttatcaataagagaattag

SEQ ID NO: 114642 - DNA, 1660 bp, Cannabis sativa
cggcccaaagtatttttgtaattttttttccttttttgtatttttttgtttttttcccttaaataattaataaataataataataataataaattgggtaataatgatgagattggaagacgacacgcagagaggaaatggaattagagatcttctaaaagtgatattgttgtcactctctcactcccatctccatcactttttcattccattaattaattataattaccaaaactccattgcttaattaatatataagatatttttatcatcagtactatatatataatatttaattagtaagactccattgatccatttcttttagttataataattacttataaattaaataaatattttagaactggtatggtacactatgttgtgttgtattatattgtctataattgtctttaattatattgtattgatattatttaatataatattatatttgatattgacttgtattaataggttgtgtaaaatatttatactatcttcaccaaaaactcgaccttaactcagatcctggccttggacctggacctagattccatcttcggccctggaccaaaccccatccccagaccccgaccctggattgcgaattagggtaaaggtccaagattcaagtccaggagccgaggtctagggtcagagtctgggtccaagatccaagatccaagttcgaggtacggtccatggttctggatcgagtttgggttcggatttggggcttaggcctagggtcgggttggggcagtttaggaccaggttcgagttcgggccgagtccatggccaagttcgggtccacggtttagatacgggtttgggtccaagtttagggtctatgattgtggccgagttcgagaccaaggtctgagtccgtgtttagggtccatagtctaagttcgggtctgggcctgaatctaggtcttagatcaggtcctaatctagatctaaagtcaggtctagataccaatatatctaacaccacttaaagtgttatatcattattagaacaattaaatatcaagtttaatataatttaatttaataattattataaattatggctttaatcatttacaacagtgtgattttgaaggtacctatttatctaataacaatgcttaatatatattttttttgaaaaaaaatatatgtaaatgtgagaatgagacaacattgttttgattttttttacagttgtattcccacccaactcaattcatcctcatctctctctctttaaactattttgttaactatatatacaaaattctatatatctagtgtgttacatcaattgaaagcaatcaatgaatgaatgaaacctatacaaaagaagaagaagaaatattgaatgactgaataaaattattaaacagctatatatattatatatagaaatgatacaataagtatttatcatatatgctatactaattaataatatatattataattagtagcggttagtaattacaaaaaatatatatatttatatttatacatatacatatacagatagaccagagctgtagttttggtagattcttagagcatgtttggtattgttttctgttttttgttttaaaaaattgtttttagaaatgagaacaaaaaatagtttttaaagtttttaaaaca

SEQ ID NO: 114643 - DNA, 1771 bp, Cannabis sativa
  modified_base (106)..(107): a, c, t, g, unknown or other
ttagtgacaacttgtaactaaatactaatgttactatgttagtcacaagtaacattttgttgtgactaaaagtcacattttgtcacaaaaaaaattatgttgtgannaaaaagttgtcactaaaagtaacattttttttgtagtgagttattgatttttgagcttcaattccagtatacaaaacaatataaacatatcaaataaatatgcaaaccacaaaagagatcgtaatacctccagtcattgatctttgagcatcattccctagtgtagctttagattgagtaatcgggtttctaagctctctccactctctttaaataaaagttgtagtttattatacaaaatgagtgaggagcttagaatcgagaccttatatataggtgagatactctttcagtatctgcgctgcattaattatgagaatattttgacaattaattcagaaaatcaaaactgtagataaattaattagtaaattgtaatatgaccatatttaaaatatacattcttatcacattttgatttgtgatcatacagttagcgaacaattgaggataaagcaaaatcaatttaaataaatttgtaccaatattagaaatattctaatattaaatatagaaatattctaataaaactctcttattgtatattagtaattgttgcagatctgatcataataaaaagaacgtggcagcaaaagttcttttaattacgattttgttgcattcatacatcccgttttggttgttaagtgctagctatataggttcattgaacactaccactataaaacctaattctcgtcggtcctcaaatcaattatttttttaggaccgtcgctaataagaataagtgtttaaaattgtcgactatagttgagcattcttgacagttttagatcgataactaccgtttaatattctcgatgatttaaaacaactacaaaattgaaaacagacacatttaaaaggggaatcctcgacaattttcaaactgtcaagtctatgttcagtaggaatcatccagacagagcttacacgtgattgcccgcacagatcctcattatccagatatgctaactttttcaagcatggtacttcgacatataaagatctttaaagatactttccataaatggtccaaaattttggtctcgatcatatccctaatttttcaagaatgacttgcaccaataagagacaataagaagtctttttagttttgtttgtttcgaaaaatcgaattaattactgtattttttccctataaatagtggagccaatccattgaacagagatccgaaatcatatattttttagagctcttacgttgtcaaattatctgtaagttttcgagagagatcaagatcttacttacttcttttctcacaagtagtacaactaaaatgggagtaggctattaccataatcacaggatttaatctctataaatctctgtgttcttatttgcttaattattatttattatctgttattctcatcgctttgattaattcaacgttgttgattaagagcggggtcaaccggttgtataatatacaggggaaaaagatgagtttaatagagcaaagagtgattgctcaacttattcagtagaaggtgtttgggtctattttgaggctgtttggctctagccttttgttggttgtaattgttctggttaattaatgaaattctttcttttatataataatagggaactaagccgcgcttcgcgcgggttcgacccaactttaataatattttaa

SEQ ID NO: 114644 - DNA, 3210 bp, Cannabis sativa
  modified_base (2733)..(2741): a, c, t, g, unknown or other
atcaattgcttctgaaattccattgtggacaagaaatgccttcatcttgatcctccataacccaagatcatttgttccattgaacttgtcaatcttaaatcttgcaacatccatcttcttgatgatttttgatgtcttcatatctgaatcttgattgagctaatcccttgctctggtatcacttgttatgattgatcatcacaattgacaatcaaaattggatggtcattgacgagctatacacatgaccaacaacaacaagagatgtagcagaaaaaaaacaagcaagaacaagagattgataaatgttgatttaattgatttatggagataattacattgagagaatgagagaagtaaatctatacaaggctatattgaaatgaattgaactctaagtatttataccattcaaactcaaaacagaaaagtacaacttgtaactaaccaaaatacagttaacaaaaataactatcaactaacttgtatctagctttctttcaaaaaaaaaaaaaaaacttgtatctagctttgacatgagatggatcaccgtacataaaaaactacaaaaatactataaaaccaataattctatatatagaatagaaatgtatattaatttgataaaactgagaaataaaattcatatttttaagagaaaaaaataaataaatatactttttttaatattatatggattttcccccacatcaaaataagcaaactaagataaagaaccaataattagaaacattatcattacatatattaagtttttttatcacgactataggaaaggaccatatttatttatacataaatatttgtaataactgtagcaataactgtaccaagcctataaaatattcatatatttcctaacactagctagcataacctcacgtctttgtggttatgaaagcaaagtctgcttaatatacttcccattttataacctggaacgaataaaaaccatcttcttattctcttgaagatcatatgctttcatgtcttcctctggttttttcttggaagattctaattcctcaacgggttttgttgataccttgtcttgttgctttaagtcgttcacgcctccttgaatcttctccatctttgctagcatgttttcataacttgatttcttcaaagcttctgattccctcacattgtttgcagctgatatattatgttgtttctctatattgttcatgtcatcttgcctttttttctccatcattaacttgaaatctcgtgccttgttcttttcactaaaaggaagcaacggaaatggatcttcctttaactcttcttgctcaaccttattgatatgctttatacctgcaacgatcatcaaatggtgagaaacttagttaattagatgcgttcttattcagtatagacattttctttacaattgaaatcatttccaacaacaacaaccattaaaatctcaacgaggtaagttttttattgttatgagaggtattatcatttacgcaaagagaacttaggagtagtgatacaagccacatatgcagtcaataagatgggcagagagccaagaaaatcattagaatcattgaagaaacggttcccagtaatttacagatgcaaaatcctaaaaactcattaattgtaatagaaacaaacaactttggtttagggctaaaatttgtgattcaaagagataaaccgtagtaaattaaattaagagacaaagtcaatcggattcctaagtaatcgaacaccaggaaaatctaattgatatgagtgatgtttaggatacacacttttgacacacataaaataaaattattattaagaactcattaaaaatcgcatggtctcatacttggcagcaaatctgtttgtctaaaatcacccacatctcatgggaggaaatcattagcctaaactacaactccaactaactctatttggcgtcaaagtaatagaaaaacgataaaataacttaattttttgcgcagcatgacatttatggccgctcaaactatcaacaattgtaacgcgtatataaattcaaaaaattctcaagctgcaatgtgaaagtggttaaaatattcaatctaatcaagcccatcaatccaaattggttaaaacataatttgtttttgcattatgaacaagtgttgaagattccacagcatgccaaccacgaatatgaaattaaattttttgaaatatcgaagtgttgcttttttaattaaagaaatctacaggtattagagaaagagagaacaaaccatttgataatttgggaaaagagtcgaaggtggagtcgaacgcgaatttggcgacgaaattcaggatttcaccgattagccctcgacgttggaccttagatatgggttttttcaagcccgtttcgttggatccctgaatccgaattgcttccgccattttccgttccttgcgtacactagtaatgaatgaaagtatatttactcttcttttgtgctatattttctgccaaaggtgaaatttgccggacttaaaatatttacaaaatagtctcacttaatttattatatgcaatgcaaccataatatatttttttttattgggaaatagggtgtaaaaagaacacccagcaaaaaatatataaaatcagcaaaaccaccagtcacagtacagaacaaacaataaaagcccaagtgaagaaaattaatacaagaaaacatccactaagggctcgtttggtacgtcgtnnnnnnnnntattgtattgtattggattgtgttctattgtacaatgtttgatattgacttgtattaattaattatgcaaagttataatatattttcagtacactctatcccaacaccaactacgggtctgggtccggcttccgagtctgggtctgagtcccaggtctatgtccgagtcccgggttcgggtccaggtctcggtctgggtccgggtcgcgggtctcagttcgggtcgagtccgaatccgggttcaggtcccggtcctgggtccgggtccgggtccgagtttgggtcccggtttggatccgggtccctgtccgggtccggtcaggtctgggtccgagtccgatcagatctgggtttgggtccgggtccggtcctcgggtttgggttcggatcggagattggtgttgaccccaaatcctttgtaaatattataatacaagttaatacagaccatttattatgtattaaataa

SEQ ID NO: 114645 - DNA, 4679 bp, Cannabis sativa
  modified_base (4643)..(4654): a, c, t, g, unknown or other
gtaaatccgcgagtcactcaaagagaaagtctatgagtaggatgcgatttgtgagtaagacgaggtctgttagcaattactcccaaccgaatctgcgagagcacttgaatcataagaaatctaaccttcgccaacagctcggtccaaagcaagaggatcccatccaattgcggatgaacaagctggaggacaagttcaggagatatcaagtgaaggaactagggagacaatctggatacgactcagacgagggggttgagccatatcatccaaatatcatgagtaccccttttccttctggattcaaaaacttgcatgtctcgtcatatgtcgtaaccactgatatggtctcacatttgaacaactttatacaacaaatttactatgtaattaaagacgtccctaaattcctgatcactagtttaaaacatagcttttgcaaaagacaaaaatatgaatttgtgtaaatttcttctataatcatttcattatacctaatagttaacattaagagagataatttttaaagaattacatataacttagaggaatgcttagatctagatacccctagcctattagtagtcatgatgcaaatggtctacattccaggcacgagggatctctgatccatccattgtattttgttgaaattttccatttcgcgctttatgttgtatctcgcagggtccttctcaattaggtcctaagacccccattctcagttcttgcaaagttgggaaaactcttcgcaagatgagatctccaacatcaaatgtatgatgcttgactttagaattaaagtgtttggcaatcttgccttgatacatctgtagttgaacttctgattgttccttaagctctttaattaaatttaatgattctttgagaaaagtgtggttctgggctggttcataagtatctcttctatgagagtgaactgtggtttctactgggatgaccacttcacatccattagccattgaatataatgtgcggcctgttaaagttctctctgtggttttgtatgcccagaggacttgtgggagctccttcggccaatgggctttacaagcttggagtttttttttcaacattaactttaagatcttattcatagctttacttatccatttgattgcggtgtagtcatagttgagaagctcttcacaattacgtgttacttacaaaactcattgaactgataactatgaaattactacccgttgtctgagataatcttgtgtggatgttcaaagtatcacacgatgttcttgatgaaaaaatccaaggccttcttggaggtgactatattcattggctctgcttctacccatttggtgaagtagtcaacaacaactatggcgtacttcagtcctccttttctaatggggagaaatcctacttagtcaattccccaaacaacaaaaggccatggactgctcatgagggtgatttttgttggtggcgatcgcggaaccttggtaaatcatttgcactactaacactattggacataatctatacaattgttcatcattgtgggctagaagtaaccctgacaaaggatatttttgggtaggcttggtccgaaagtatggtctccatagaaacctccgtgaacctcatgtatgattaaacttattttagtccccgctatgcacctcatgtatggcacaaacaacccaatatgataaagcttcccatctagtatcacatattgggaacctgatactagaccttatgggaagtttctttgtcctctaaaagctcacccaaacataagaactagtggatgagccatatctaggagttggaatgatcagcgatggcatttaaccactgtgtttctatacttaaagcttttaagtgggccataggcaccactccgtattgaatgatctcctggtctattacaagttctcttcgaatatctgcaaatgaatttttgtcctgaaggacctagcaaatgtcgttgcttttgagactttacagcagttcctgggacatcgtcacataggtagccattctttaacctttggtctgatattccccagatatttaattcaccaccgattgggaatcactatacacttggatgcattgggcttctacttccttggccaatcacaatcttgctagcatggtttgtgtttttcttcattattagaggtagggaatttgaaatagagagcactttggagctgatgtccttatggagagatcagtatgactcctgctccaactcccttctcatttgatgctcacttaacatagacattccaagttggtgtgaccaagactaacttatctaggaggtcattcagtcaagaacattctacgatgaagctagacggagcctgccctttgatttacacccttggttgatattagctgtgaaattggctaagttccatagcccatgttagcagcctactgaatgactctggcttttgaagaattttgtcgagaggattgtttgtcagtaccttaatggtgtgggcttgaaagtagggtttgacctttcttaaagagactattaagaaaaaggtcaatttctcgagcatgagatacttggattccacacctagtaatcttttgctaatacagtacaacggtagctggacccttccttcctctcccactaatgtggcacttatggcatgataaaatactaccaaataaaggtacaactacttaccttccactgactttgatagaactggagtcttggtcaaatgctctttcaatttttggaaggcctcttcagattcctcaatccattccaatttcttttttcctcaaagcacgttaaagaccgagatccacttatctgtatactacaaaatgaatctaataagggttgaaattcttctagtaacgcttggcacatctttgtgctttttgggagatgccatgtcaatgaagactttgatcttttctgggttctcttcgattcctttggagttgacgatactaaaggagacaccaaatgtaacttttttaggattgagcttcattccatacttctgaacaaccgagaaggcatcctctacgtctgtactttgctctccagatgtgtcaaacttcactagcatcatcaacataaacttccatatttctgcccaattggttcttgaacatcttgttaaccagtcgctaatatgttcctctggcattccataatctaaatgacattacgctgtagtagtacacaactttatctgccttgaagttggtgtgttcctggtctgcgacatgcatcttcatttactggtagctagagtatgcatccgtggattttagcaactcgtatccggaagttgcatccaccatctgatcaattagcgaaagagagaaacaatctttcgggcaggccttattaaggtccgtgaattcattgcacatcctccatttgccattgggcttagggaccaaaactaaattagcaaaccatactggatacaattcctcttggaggaagtcattcgaggtcaatttatcaactttcgcttttaactgcttctgcccttataaaatctaaaggtctctacttctgaggaactcgtgtcacatcttcattgatgttcagagcatgatagactgtgttggggttgatccctatcatgtcaaaatggctccatcccagcacatcttcattggccaagacagtatccacaatctttttctttaccttccggatgaaggtctctccccaatttgatggttttagtggggtctttttcacagattcaaacttctctgacatcctctagcgatttaatacttctttcaatccccacttggtggtccaatacatcttcaaagtcctcacgaatgactttaactcttgcttgagtttccatttggggataataggtgcctccgctcgaaccatgaacacatttcgaacagagacattgtaacaactccttgcactctttttgtcacctctgaccactctaacgcatccattgttgcaggagaacttcaacctagatgccttatagaagtcactgctttgaagtcgaccaagactaggtgtcctagtattgctttgtatgtcatgggacaatccaccaccacaaaagttcaacgtttgaaggcacaaatattgttttctcctttatgtgtgacaaggagttagatctttcccattggcatcacagtgtccccattaaagccttacaactgaatgggacaaggtgataattcgttagactaatcgcgtggaatacacatttgaatagaatatttaatgagcttccattatctaccaagacccaagaaactcttttgttggagatttgggctccaatgaccaaggggtcattataagaaagttcacgtgtctggcatcctcctctctgaaagtaataggcaggttcattattcgagggcgatgagctagtgattatagaacaatacacatttccccttctccatgtaattcccttaaatacctcttcttggagtttctcgtgcttccttcaaggtatggtcctccaaatatcgtggccacatgtccatccaagggtggcagagctagaacgagagggcatgtgttgcccagttctggagctaatacagctaccccagccaaagctagtggaacagggggtgttgttgttgggttttatgcnnnnnnnnnnnntccatttcaatgtaatccattttat

SEQ ID NO: 114646 - DNA, 6474 bp, Cannabis sativa
  modified_base (6422)..(6429): a, c, t, g, unknown or other
gggcataaaacccaacagtctttaccttgacttggattcacttagagctgctagatatcacagcaattgaagaacaaaaatcagaaccctagctggttctagggggttcgaaaagagagagttgaaagagagaaagaatttctttttatattaattttggtattttgtaaaaatgagattaataaaatggttttattaaactaataacatctaatatttagcataataattctactaatgtccactaaaggaaaaaacattaacttaggcaaaatgaccattttgcccttcccacactaaaaagcataaaaaaccacttaggggtatttttgtcaattctaaaatattgactattcctgacattcctaatgtctaactatattgccccgctatactaaaatatactaagatgtgattctaatagcccaacactgcgttccaatgttgccgggcacaaaatatgcaaaattatgaaattccatatatgacatataaaatgcattttgaattcaaataaatctccgaaaaattaataattcaaaactaatatgcaattttcatcattaaaccctaattatttgctaatttccaaattaaaattaagcagtctatacagagttgtagcctcggatttgccagagcctggccgaccataccatcagagtgggtatactcaaggccggccaaccctgggtctgatgcttgtacatggtcgaccagccttaagctgggtagggcctggccacccacacttctctacctggctggtggagcttctacattgacatagggtagatcacaccaattgctagagtttagtggatccaattgtctgaagtgattattttcacttctcaaattattgttctaggtatttccacccactcctggtcctcatcagttgaaaattaatctttgggtgactcgctccccttggggagggagtgctcttctttggccggccatagggacttctagaagagtctagctagccatggggacttctagaggagtcaggtcagccatagggacttctgaagcagtatgactggcactggggactcttgctggtggttggatacccacaggatggacagagggggctgttgttgagcctcagatccctggctggccccccatgccactggttgtcgagatttagtaattttttgccgtttgacctttgaggtaaggtctgtcctccctctagcaagagaagatctgtcttagatcttgaggaactaggttgatcaacatatcaatagacactccttgatctatcaacaagtcttcctttaagtggatctctgatgagatccttgccttttctatcggttctctggttgaactatcttattatatcgctagcctctttgttatggagatctaactctgcttggtgagattgaaggatgtcctcttggtcatccatccatctcaggaattcgcgtctctgctgagcgagtacatcataatcagcagcgcatggttcttcaaggaattccatctctcctaagccaatacatcaaagtcagcaacgcgtggttcttcaaggaattcacgtctttgctgagcaaatacatcgcagtcagtagcgcgtggttctttaattaggcatgcacgacctacaacttccctgagtctgcccaactcaaggtcttttcctaagcctaggtgaggctcaccgattcttagtctagtttctcctggatagtatcgggggagaaacccggttgttgttcttgtggggtgccctttagggattcttccttcactcaagggcaccaatggtgggtctattcttggaggcatgggcgtgccacttggatccaccaggatgcctgcattagtttggccactatagagtcctgccaagtaatcctggctacccatagacctacaggggaggcctggccgcccaaggtatgtaggatctagccacccaaggtgtgcaagatcttgcaggtcaaggcctgcaagacctggtaggataaggcctaccagatctggctggacaagggctacaagatgtggaaggtcactatagccctgccaagaggaggccaaactcgtggtgcctgttattgtgacattattcaccatctttgcagcgttcatcgtgattccagttgtgattggaacttgagtatttggacttacaatctgtgggtcttgagggagacccaaagatgcagatggtgcgacaagatttcttctgtgtaaaccattccgtttgatcagagacgatatccacgctctcaatgaaagcaccaaattactgacctcaaaaagtgatcaatcgacagagaggtcgtatggatatgatgcttgccacgtgttacacaaataagaatgaaaagcaataaacacaaggatttgttatagaggcttggctctcttgtgatagcgaataatgacctactccccttttcgttgtattgatacctagagataatactattcagattgttataggtgggatctgatatagctctctatatggatacaaaacatgaatcaataggcaggtctctaatgggagagtgagactgccttagagacgtctgaaagggatgaagagaagagagggagtgcccttgggggcatgttgtagagaaagagaaagaaagactagggttttaacttagaacaatttggaggattagtgacttaggtttctaggctagggttaaggcctttatttagggggcctaaaccctagattacagtttaaattcctagatacttgcataggttgttagataacttcaaaagactaaagtgcccttgaatctagatattatttagccattctcttgggcttatatggcccaatttgcaacccaattgtgttgtccacgtgtagagtagtacagaaaatttttccatgtcaatcctggccggccatggtccagtcagggtcaggtaggacaaggcctgcaagatctagcaggacaaggcctacaggatctcgtaggacaagacctggaggatttggcaggataaggcctgcatggtctggtaggtcactatagctccaccaagaggaggccagccttttgcaagttgaggatagctttgtacaacatttccttgcagagaccaggttcccttggtcgaacagaagcctccttggtccataagtcacttcttggtcaaccaacttgtgcatagatcctggccggcctataggcttctcttggctggataatgatgttggtacaactccttgagggcttacttcactccattcagttgctgcttgacgattttgctatatcttgcatggaggccctgctctactattggcagagctatactcaactgtactctgtctttggcttatgtggacatgccacgtcaggtggataaaatttggaataacagcgaggtcaacacatactattaacaaaaaacatatacatttatttatgtgttcaaaaagagatcaataactaaattattattttttttttaattttttattctactgttaaattaaaaattatctatttgaaaccatttcaataaaaaaaaaaactacctattaaaaatttatacatatataaatacaaataaataaaaagtaaggagagaacaagatgccaagattacttttcaaaatataattataaatttcaacaccatttttttttattaaatcttagtttactttgtttctttcacatgctaagtgaacaatatattatatatatttttttattcttagtagattggagttttctttttgtgtccacataaattatttatgcggataaacatattttttttttgaaaaatacaagatctgtaaccgaaagaccaacaagaaaccaaagctgggacactgattattctagacacactctttgttagttcctaaagcttcttgagccaagttatgcactaaagtattatctgatcttaggataaacctggttgaaacacctggaaaagaaaacaaagaggaagctatatcagctatatccatactaacacctctaagagcagagcgatcatagaccttcttctgaatttttgtgatcaaattctgccagtttgacaagatgagttgtattgggaatctaacagcttgacgccaacataaagcacgtcagagagcttccgcttcagcaaagataggaggcaggccagaaggggctgaagaggaaaattccgcaatgattgagttgcctgagtcttggactactgcaccataaccatgaagattcgattgagaacgagctgctacgtcaacactaattttaaacattcctagtgaaggcagcaagggggtgtcttcaagaaaatgattttcttgtgaaggatttatctttttttttttttttttgcatttttgtattcatgcaaaaaagaaataacagaggactccatatctacctccatagtcttgttatgttcaaaaataattttcttatgttgattccaaattgaccacagaagatcgaagaaaacagttaagtcatctttggcaaaagcttcgaaacctcttaacaaaaattctttcatgtcatagaatttaattttagagaaaaaaggttggaacttagactgcttccacaacttacttgccctagaacaatgcaatagggagtgggtgttagagtcgatatggttaagaaaaatggagcagtaagggttatcgaggattttcttggttaagaggttaagtttggaggggagaagatgatggccgaaagctttctaaataaagtgtatgattttaggggggatattagaagggttgtgagaattcgcaaggtgataagctgagttaacagtgaggctaccagaagggtcatgcctccaaataagacagtccccgttgaaaggatcaatggggacattaagaacaaaattaacagagctaccatccaagtaatgggtaagcttattcgtatcctattgtttatcctccttgataaaatattccacataattttaggtggataacaaccatttttaaaagataatttcctacaatccggtaaccaatttgagctagtgatgtcaaccgacttaccatcctcgatttttcaaaccagacctttggaaagaatgtttctaccccaaagaagacttctccagcagaaagaagggttatgaccaatggaagcttgaaggaagtcattgtgtttgaagtatcttgctttcaaaagagaagcaaccaaagaatcagggttagtgaaaatctgtcaagcctgcttggccaacatggctcgattatggtgacttatttgacgaaacctaagacccccaaagaattttgacctacagagctgttccaatcgtttctagtaaatcttgtgcctatttcccaaagatccccaccaaaaatcagccatgagactcctaaagtgcttacagatagaaatagggagttggtaacaagacatggcataagagggaaaagctttaataatcgatttgagcaggagttctttgccagctttggagaaaagcttttggttccagattgaaagcttattactagctttatggagaataaaaaggaaagaggattttttggaatgagagaggcattgaggaacacccaggtatttttcaatgaacggtttatcctccatgttaagagaagtgagaaaataggactcgtcagaaggactagtattaggggagaagagcaaagaggatttagtgaggttgacagtttggcccgtagctttattatagagaaggaggatgcccttgatggtggcacagttctaagctttaacctgggcaaaaatcaagttgtcgttcgcaaaaaggagatgggagatggaaggagcgaagctacaaatagaaagcccccagaacaagttatggtgggttttgtggttgataatggctgaaaggccttctgccactaggaggaaaaggtagggagaaagatggtcaccctgtctaattcctctggaaggttggatagggttagatagactaatgttaatgcaaagctgaaatgaaacagaggaaatgtatctatgaatcaaggatatgagctgaggatgaaaacctaaatggtgcatgatttgactgatgaagtcccattcaaatttttcaaaggatttctccatatccaatttaagagcagcccagcccaccttaccaaattttttaatagtgatagcatggatgacctaattagctataataatgttatcaaaaataatacaattatgaaggaaggctccttggttatgagagatgaggtcattcaaaacatttttaagtctgctagccacagttttagagacaactttgtaaatggtggaacagagactgatgagcctgaagtccttaactctagaggggtccttgatcttagcgataagaacaaggacagtctcattaatgggagcgatattagcatcgaagttaatgttgggttttatgcnnnnnnnnaaactcaatttcaatgtaatccgtattattcaatatcaataaaga

SEQ ID NO: 114647 - DNA, 960 bp, Cannabis sativa
ccatgtctaatttatttttataatcgtatacgttataattatttaaggctgttatactcattttttaagcagttaatgaatgagcctgatcaactcatgatttatttactaggcaaatggataagattcaatatatgcctcaagaaacattacttaaatgacataatcataaccatatatgcgaccaacaagacatgaaacttttaagctcgagaatcacccctcactaagagattttcctttcaataagaacgaaaaacattttcgtaataataaggataatgtcttatcggttacaatactcatttaaagagaagaaagacacatatgatacgcttcggtcgaagatggttaatttacttaagcatggtcctagtggtcaccttggaaggttcgtgatctggatcaagtcaacctttgagaagcttgactctatttacaattctttcgatacgcttttcgagaagaatggtcttacataaacttgctcggctacaacgtgttgtgaccacatcaaggcaaccgttattccgtattttcaaaatacaaatggtcacttatattcccacctattaaataagtacttgaaacatggggaacgtccacgttccataatcatttttagattggatcaaataattactatcctattcctataaatagcagtaagaataatgtaattaggacaataatttttttaacttacagaaattctgtcaaatggtaaggacatctaaaaattcacaaataatatagactcatggagtatgtagattttaactaaaccacgtaaaaatatgtcttctttttgttttccttaccgaattatgtatcatttattacttatattattattcaaaattgattatcaagcttaaaggaaatcattgtttcacttctaaatacttataacaactatagattccatatctatgatcaacgctcccactcaattgaact

SEQ ID NO: 114648 - DNA, 1524 bp, Cannabis sativa
tagttagggtgttacaggttcagcttgactcgcctaatccattgtaatgtttgtttgaatgaatgaattctgtttcaaaaaaaaaaaaaaagtaaaaggatttaaacattttgtgccttttggacttgtcatgtcgtgttgtgcttaagctcatatttttcgtgtttgatggtgccaattatagcatcatgtcatgtcgtgtccaagctcatattttatcgtgtcttattatattcatgttggtttcatattgtgtcaaaaaaacatgacccgtatttacatcattactctcaatagagaggtaaacatcttgtacctctcaaaaattaaaaaaaaaaatagataaaaattggctaaatgcttaaatatagactccaatagaagatgtataatttagctataatagctatggtcttggtctaaaaatattatctccaaggctatttaggatttttgtcccccaaactatgatatgcattattatgtcttctaatttttttaacccgttaaaaataatccttaaactattcaaaataatataaatagttcttctgttaagttctatcacacgtagctaatagaatattgacatagatatttagttcattacctcgtcaacgctactcatgtaacttaaataaaaataatttaaaattcaaaaaatatattttttattaaaattaataaattaaaaaaaaaaaatcattaactaaaaataaatcaataattaaaaaacaaaaaataaataaaaataatattaaaagaaggtctattaaaaagtctaaaacccagcggaccatctattgttcatctttttcaacatttttaagtttactaattaattaacaaatatcgtatcattgttcatcttccttagtagattcatttttacaaacaaaactttaaactattaaaggtgatgcttaaagtttgacatctaatgtttaatcgatgtcaatgcaagttgacaatgataactcttcgtttttttgaactgacgcaagtcgttaatgaagaagaaactacaatgaagttcgaagtcagccacttacacaaatacatcatagtgggaggatctctaagaatctaactcgccatgaacttgatagtgaatataacatagttgttggagacacaagtgaagatgacacattgacttttgcagtggttagttctgacaaagatttatggcttgaagccatgaaacatgaaatagagtccatgtaatcaaactccgtctaagatcttgtagaaacacctagtgactttagagtcgttgaatgtaagtggatgtacaaaaagaaacaaggtgccgatgaaaaagttgagacttacaaagcttgaattattgcaaagggttatactttaagagaagatgtaaactacgagaaaatttttagggtttgtttgtttacaaaagtaaaccctaattgttttcctttcaattaattaaggtgtcgtttggtaatacttttgttttttaattttttaatcacaaaatgaaaataaaatttttgtttttaa

SEQ ID NO: 114649 - DNA, 4675 bp, Cannabis sativa
gtgactaatacttttagttacagaccttttagttacaacataggagtcataatttataattaccacagttttttcacttttagtcataaattttgttgtgactaaaagtaagatttggtgtagtgtattgattattattttggattgtacactgtagtataattaagcatgcaactttttacttctacagttgtaatggtaccttcacgagtctttcatatatagctagtggggaaacaacaaaaattgtatctttttttcttcttcttcttcttcaaaaaaaaaaaaatacaaaaactggcaatgcagcaaatctaaacccaaaatttagctagctaggtggcaaagtgtcagtagtggtggctagctgcaataaataacaaaggataataatgggataacgtaggacccatttatttattataataagtaactctatgcattattataatataaagcgtcatgtggagacatgagagcgttatacatataatatttctttcatgtgttattaggaaccctacactatacactatgtatcactatactatatatctatatatgaaattaatatcaacccccaactgatatctatatataaaaactgggtacatgtgtgtgttatctgaagcaatcagaggaccaaaatgatccgtagcgtcttcttcttcttctgatttcatctatagaggggtccaaagttgcttctctcaagtaacaaagtgaccccataattcagttgtacttgcaatcacaccaaaaccccataatggactcatcacatggaactatttatttccatgtactaataattttgttcacaggcttcatttgatgataatcataaattcatatatcaatggacaatcgtgtgagtaaagtttgttagggcatcacttcgtaaaatgtaaataatttgtaatgttgaaatttaatttttaaacaatttatttcattaaccttcaaattataactcatatttcatgacacagtatattattaaaaaagaataatataccttaaaggtttctcaaaaaaaattaaaataaaaataataatgccttaaaagttctgtaaagtagctcatctattgatactcttttttttttatcactttttaactaaatttgtaaagcttaatatacctatgttaaagtagttattgggagtactcttagtagaatttttcttttattatttttttggatgtgaattcattatgtagaaattgtgagttggacctttcagttgaccttttctatattattattttctttgggatatgatcacactctgatttaaattattgaaagatatcagtcataaaaaataccactttagataccaaatcattattgttctaatttaaaatattgatcgagtctcacattttaatttaatagctactaaaaaaacttaacataaactgttaacaccactaatgtgcctagtaaaaaagctctatccaaatatatctttcaagatgatcatgactatttttggtcaaagcttgaatcactggatcactagtggtctttacttcatcacactatatatatctgaatctcaagtatttcactacaatgaaaatatattttttggaaactctatttggagagactcaatctgctgctaataattatagtagtagttgtgaacacaccatgtggccgctaataatcaacggagtaaatttatttaagaagaagtagcagcgactaatatatggggcctttggtatgcatttttgggaaatagacttagattgtttgcaaagtgacgaagggaatctaattaaaacttaaaaaaaataatattattatgtttggttgtgcggaaaagtattagtatgatacttggaaatattaaaattattttgtttgattaatataggaatggaatgtgattttttgtttctttttttttttttttttgtaaaatacaaataattcaaaaaaaaaaatattggttaaaattttcacattccaaaagagaaaaatgacataataacactattttccaaagatggtatattattttgctaaatgtttgcataccatgtctagtttataatccaaaaggtggcatattatcttgtcaaaagtttcatccacaagactatcaaaaagatgaaattaaccaaccaaaagttttgcccgaaagtaaaacacctacatttaaaaaagacaccctaataatattttctgaaataccatcaactatattaaattctaccttacttagaccaagaatgaatcccaacttgtattcatcatccaattagtgaagaaaagatctatatatgcttgattttggacaagaacttttccaacttcaactcgttgttcaattgtcaatctgtcaatttttttcagttcatcgaacactttcagtcttgtacttgcactttctgtcttgaactagaaacaatcaacaattcttccaatactatcaccagtagcagcttgtatgtcaccaaatttgttcactgtggtagtcaataccgaaaccaatgaatcttcattcttagacctctttctacttctatttccttattgtgttgaagttgttctcgtacttgtgtgactatcggttgcattaccaacaagaccatctatcggggcaaatggatcgaactcggattgttggtcattatctgcttctttatcaatctcatccattgtttcaaaaaatctcatagcaccttgcccaattgaacgatcctttccaaatataaaaacaaagtcatcataatgagaaagtgttttattcctcaagccccttgcatttggatgactctgtaatgaataaaaaacataataaaagaattaagatatgatcaagttgtaaattaaattgaatagcaagttaacacttacctttatccaatcatcaaagacactctttgcagcaaccacacacatttttcaccaaacatttttctgctcgaaagtcccatgcatatatgaaacttaatgtggggttgtcctttcaatacacaatgaggattttttttcattcatcaatctttttaattgttgtaaatagctagatttgaaagtcccattgtctactttcaattttctagcatttaccaactccaataaacactcaattaattttgaatcgttaattgaagtccattggtgcttttttcctagaatcctattgcttgctccaaagcatccattttcctaagatatgtatatcttacatctacttgtaataaaagtgtagcaataaatatattaacaaataaaattaaactaaaagcatagatatataaatttgatatcaaacttataagtctaaaattgatgtccaataatataaaaattcatacaaagtcaagcaaaaatattacaagaaaatgtaatatccaacaatataaagatttatacaaatttaagtaaatcaaacacaaataatataaacaaatacaatctaagtatgcctcattcctcacgataggtcaaccatctctctagctatgttgtccctctaagaagtccaagcgttagatatttcaatatgtgtacaatgatcattgcctaaactttcatctttgtcagaagaatcatcctcactttcctctaatgctttttctagaggatctataggcatttctcttttaattagattgtgaagaaggaaataagcctaaataattcagcactaaattttgacaggatagtatgatcgacttctaagaattgctcatcgtccctttaatagtctaaatgctctctactacatttcgagcagaagaatgtttcgtattaaaaaaattagcaacagtattaggtgggacatccaaattgtttaaatgatattattgtcctctatatggtactaagaaaccttcacaattaggatatccatcatcacgtaagtagtagtatcctataaattgaatgacgaaactttaaacatattatgaacttaacttgtatatgtatgatattatacatggaagaaaaaatataccttgtggaactttcaacccatttggcctagatatagcatctcgcaacactctagagtctgcagctgttccttacgatccaggtaagagataaataaattccatatcttgtgagactacacttaatacattagtagcaatttcaccctttctagtctatggaggcacattaactttttaatgtgtgttccacctagtgctcccaaataattattgaatcatttccaccttgcatcagttgaaccattaagaattggttcaggttttttttaataatttcccatgaagacataacaaagtatttaaaaatacattaaaatgtctactcactgtttcacccctttcatatgcgagtggctccaggagaactgatcctagtttgccctaaaaaaacttattagttgctattttagtttttcatctaagtttttcccaatgaatacacactttgtgggattttttggatctaaaataacttcttttaattcctcaattggtttcaattgatttcgttcatcttgaatccgaggatcaagatccttatcctgcttctcacccccttcagtcgtgattacaattagcatatgaccagttttctattctgtagctctatgcggtagcattctcaagccgaaagttgttgggttttatgccctaaataaaactcattttaagataatcagatttact

SEQ ID NO: 114650 - DNA, 6928 bp, Cannabis sativa
  modified_base (581)..(595): a, c, t, g, unknown or other
  modified_base (2759)..(2761): a, c, t, g, unknown or other
tatagtttaattaatgtgatcagttgatcttttggcacagcttttgactgtcaagacaaagcctaaggacactgctccattatatccttatagttatagccataactattccctctttcctttttaaaaaaatatatactactttacttattataactgcgccatgcaaagttcttcctgtttttagttataaaactaatcataaagtttttaatgccatgcataacctactaaatatcatatcccaataataatatataatatgtatacattgccttttatattttttttaaaaaatattttttcttcttttggcttttcaactcccattgaacttttcctaattgcatggaatctctcattaaaatgaaaagaatatagcaattaattcaagagcactctaatacataatagattcttaatttgtagtgaagaattcttcattttaaaactatttgtataaatgtaaatatattttattaattttttagggttttttttagagcattgctattagataccagtggtgcctagtattttctcgacatgtggcgttgcgattggttagcgatactccctannnnnnnnnnnnnnnaattatatgggacccgatacttataattggaccaatagcgaaattaacatataggagtgtgctagacaccactggtactctttaggattttttttttaatatgagcatatgtgtatatatacaataatattacatatatatttttaataaataaaatatacaaaaaaattgaaaaaaaaaatagttttcgtgatgtattttaatgaagtgatatagatatatgatcaatgtttaatatatataaaagaaattatgcatgatttttggtaatatagatctaattaatatcacaacatataacataaacatagcctaataattttagtgatataagaacattcacaatagatacatttataatacagtgatcactgaagttatgcatgtgaaagtttttattaatgtggaaaattaagttgtctaacacttgggtattaggtatctaacgattctaacactctaattgataacaaaaaaattattaccttaacttcaaaaagatgctaaacatcactagctagtgccttttaccatttatcatatgagttcacatatatattatctagtaattattaacctagctttttaatgtatatatatatatatggtgtaatatgtaatcaaggagaagaatattattgattataaaaaatggtagagaagagagagaacgtacggatgaagaaaatgctcaaagagccaagctcttaagatattgacagagcgttcaggcaaacctcgttgaggtctccaagcttcttgttccatcatcccaattgattgaaaagctctttgctgtcttaagctttgttctagaatcttaagcctaggagtttctcctttagtgataccagagcttccaccaccatctttctcacccaataactcacagctgtgtttcaactgagctaatatagcatctttaagacatcgaaaatgcctagacattgccttttgagctagggcagtgtacggcaccgccgcaccaaaacccataactaagtcgaatgagttaaccaccatttgcatttgctcacagtagtggttgtatcttcggtcaacctgtaataataattattaataatttattacgtcatccataagtaataataattcataaggattttatggttagtatatcaaaaaaatagcgagttgatgaaagtaacgtgccaacgaaaaacgtttaatgaactgatcaaatgtctaaatcatataatatatatatttgtagagtgaggggatttgaattttccctctctcaaaagattaatatataaaaattgttgttgttgttattgtaattaattaaaagagagagagagagagagagagagagaaatgtatatatatatacataggagtttaaaattagtgttgatggagagagtactagaagagaaagggatgatgattgatgatcctataaaggagggagtaaatatgcttgaatcaaagacttgtgcagagaaatgattgtatatatatataagatagaagaagtagatcagaatccctgattttgcttttatggtcaatatattcggccaacaaacaggcccctagctagttactacagttaattgtgctacatatttatatatacacacatatatatatatacatacataaaaccaaaacaaaagaagaaaaggattctatacctcttttcaactaagtcaacaaagattataatgtcacattatataatatagattactatgatgtgtaatttgatgtgaagctattatatatgattatattttgtattaaaaataatatttatatatttaatttggtctagctagctaaatatcttcccaatcacaaggaacgtccctttttcttagtagtactagacacatatatacccctaatatagtagtctctcacgttttcaccaaacttcagctcacattaacaaattaccaatattaattgtaccttgaagcaatcttatacctctaatccaatcaaatacctaaaccaaaataaaaaacactaaccctttggatcttttttaatggtaatgaataacttgccggaaattcttgtttgtttgtcataaaaaaacactaatgacaataattaatcatggacttaataataaacgaaactatgtatgtgcctttgactcctgagaaagaaaaagagagagagagannnagagagagagagagagattacatgcctcatcaagcatggataacagtttgacctttctcctttgatgctcaattctatcagctgctgacaatggaggagcactaacatgatcttttgaagaggaagaagaaccgccaccgccaccgccaccgccaccaccgctactggtggcgggattagggtttgtactattattattattgttattcttattattattataaccgaataacttgttcttcttaaaatgattacccctacccacactgcaaaactcttccaaaagctcttgtgcggctttcacgtacttagaattcctcaacacgttgaccacacccaatgaagaaccgaatccgacgtggacctggtggtggttaattagtccactaccaccaccaggggcattaccgtaattattatgattcttattgtaaggataatggtgatcttgtccagaagaagacccaccaccaacacctcctccgccgtaatacaataaggcggtgtttcccattcgaagctcttctgctttggcagctgcatctaacggcgatgataacgtcagcgatagtccttgaccttcaaccggatgatgatgatgatgatgatgatggggatgatgatgtggatggtgatgatgatgaggaattccgccaatttcgtgtgtggtgggaccaccaccaccacctcctccttcatgagaactactagtgtccggtatccatgtgaattgaccaaaagcccctcctccccctcctcctcctccttgaactaaggaattagtagtagttgaaggattgggaagaagcatgtgaagggtagaattggaattcgatacaacagttgaaggagaaggagaagatggagatcttggctgtgatggattcattaagaaaagctgcatggctgctgctgagtctgcattaatgccagaaatctggtgttgatgttgatgatgattagactttgaattatgatgatgatgattattattattatctatcatcatcccttgtcttccactactaccgtaccattcgctaacctgttgttgttgcggtggcctcggagttgaccggtaactcggaggaggcggcgccatcgcctgttgttccaacaattcagttgcagaagtagtgtggggtccttgagggaaattgaacatctcagataacatcccagccgattcgtaaacagcggatggtaaggttcctgattcatcatcaacatcttcctcgtgatctaagccgaccaatggcggcggctcgtagccgccaccggctgctgcttgcaccctcagtttgtctcttcggatctgttgagctatgtggtgttggtgtgaggcagctggagccgtgggtactactactactgatgatgatgatgatgatgatgatctgtcgaaattaccattattggatgatgaagtgaaagtgttgttgttgggtgtactgaagatgcctgttgcagctgcttgagcttggtggtggtggtggtggtgatggtaatcttgggacatagaattcaaacaacaattgtgattgtaattattgtttttattgttgtgctgctgatgatgaagaagcttttgatgataattagagtttgagaagattgttgtagttatttccatatctgaagctgatgatgatgatggtgttgatgatcttcttcttcatcatcattttctttctcctatctcttcttcttcttcttcttcaattaagtcacccttttagtttactgttcaattcagtatatatggatcaattagttataaaattaatcacacacatccaagaaagaaaaaaaaaaaagaagtattgaactgttttttgttagcctttatgattttttattttattttaatttatttatatatacctttatcattttctgctttgttcttatataaatataatatatatatatatatacctgttggagttgcagaatatgaaaggatgtaaagctctgagacatcgttttcctcttctgtggtattgattgaaagcttcttgaatttgtttctctttctctatctgtctttctctttctctccttttctaaaaaattttctctgcagtgggttatagtgtgtactagtatactactgagtgtttgtttctggaaaaagagagattatgaaaaattaaaaatggaggctaagatggatgatgatgatgatgatgggatatggagaggaacaggttaattactcatatctctttctctatctctcaaaccaacaaacaaacacaaaagaaaataaaaagagagagaagcaagcagtcgctattctctattcctctcttctcttcttcttcacaattcaatttcacatcacaccctctctctctctctatctcaccattattttatatttattcaatttttattctttcgtatcaaaatttatttaagaaaatataataatcataataaatgaccaagtttatttcttttctttttttaaaaaatagaaaataaataaatatattttatatttatttattagcctttttccaaaaatgaccctattatgctgaatgatatatgtatattttgtgaattatgggatatatatacatataccatgtaaataaaataaaatagatatattgttaggtccagttctttcgagactaaatgagttttgttttgtatatctattttatttatttatttttatttttattttcatattatcatttaaagtatactcaatttatgttctcattatatttttaagttaaattaaattatgtgacttaagtgaatggtgatagtaaatttggcaatccatctacaaaagtaggaacattttaataaaatataatatgagaatgtttttttttattaatcgatataaaaagagtattcctaaacttaatcttttgtttttgggtacctttctaaaagtctcctactaattaagtaagtggaatacttatatttaagacaatttttacgtatttttttttaatatgagatttgagttaatgtcccaacaataattataagtatctaatttagctgactttcttttttagtattgttatttgacatcttaaaatatttataataatttttttatattatttattaaattaaaatatacataaattaatattaaaatatacaaataacaaatgactttttactgtgttaaaatgtctgttattatttctttttttctatcaaagaaaaaagttaagaatttaattgcacagtataaaagtgatgagttaataatattctacccttttgcttggtagaaattgttccttttgttagtggaatatatatgtttctttattagagtttagtcatagctaattatttttttttcttttttttcttttttctcttgttataactagaatagaatttgtttatttattttttttgcagagaaaaagaaaaaagaaaaaaagaaagatgtgtcggttataattgtcattttatatgagaagagaggcttttggaaaccaacgcaaactacggaataaaataaagagataaggtcagtacaaagtcatctcaatgatccacacaaccaccatccctcccctcctctcttcaaatgaccattataccctttaccaatcattatcatcatatcgttgctaacactactttggtcttttcaccacggttcctctaaatgcattaataaaaacccaaccacagtaagatgggagacaaacatattatcagaaccagcaccaaaataataataataataataataaatatatattattatttttttaaaaaaaaaatctgtatttatttttgggagatagactgcgagctaggattcattcataatcattaatacgaaaaagctactttttttttttattaataaaagattgaaaaatgaaaaaaaaaaaattatggaagtactatttttattttaatttagtaatttgataagttataatttgtttttttttttaatatgattatattatgtacattgtattataatatgataatatttcattctctattgataaattttttaaaataatttataataaagttaaatttaattatttaactactattatatatataacataggaaaattctacaatgcacctccttaaaatggatatattgatgcatccctatctgttttagcatccgaaataattt

SEQ ID NO: 114651 - DNA, 2520 bp, Cannabis sativa
tctttgtgactcacaggtgctctgcgatgtaggtaagggaaaaggaaaactggaccagccatgagtcagaggtctcccggcaatatacatatcagctgccgtgtcttggctcttaatggacaagatccatcttttttgttgtatttttgaaatgtaatcatatttgtaatatgttgtaaaagtttataaacaaggggatccccgaaaccaattgtattttgaatgaaaagttaagttttaacttaaataaattttagtaaaagttttaattaaaccacacttttcctaaaccattagtttattattataaactaattaataaaagcacatacgtggcacccttatgggttagggcgttacatggcatcttgggaaaataaaaataataaatgaaactgtctttccgaaaccctcgacaagacaactaaaagtcatcatcttgtgacaataactcgcatgtctctctttaatagtttccctatatgacatagttgtcaatcgcgaaaccagggacatgtgttatattctaatttctcgcttagaaatacgagagcagtctcatataaaatgtacacgtggatccagttcccgaaaaaaatatgatgtgttaattaatgactcccattgagttagtttcacttgatctaaactcgtaagatgctgcgaccatgataagaaatttacacttagcaggtcgcataccttgctgcacttaatacaagaacaaattaaattgctcatcattgattctttaaacatttattctaatttaataatgtcatttattgtaaaacagttctaaaactgatcagttatgtaaatcctaaagaacatttgctttctatataaaggagtggtcttaatcaaataaattaaacttttaaacgtttattatgatttaatactatcatttattgtaaaacggttctaaaactgattagttatgtaaatcctaaaggacagttgctttctatataaaagagtggtctaaatcaaataaactaagctgaaatctttacaacagtagactaagcagaccaagctctgactaaaccactataattcccttgtgttcttattattttgtacttttattctgtttgtttagtagccaatagtttgagtactcgcacgattttaattgagtgttcttatatatattagatactcacacaaatttagtattgtctaaattctttagacaacaacgttaaagtaactaaggtaattacaatatgtacaaggtggaggaatttcttcaatatatccaatatagtttcattatttctcgtaagcacatgttaataaactaatttataagccacaacattcaaattgcgaaagacaaacagaatagacaatttaaatatataaaaagagagatatttcttccacagagtagaaagaaaaatgacaaaataaataaatcattcccatttgcatctaatctggtgggtgtgcttgaaatcatatgtaaaagcaacggttctgtccattcttctcaaaacaaagctctccaccaaaatatagcaaccaaagctagtccactcacctaatccatcatagttgtactctttcactacactcccttttcccccgttactaacccatccaactctttcttgctcccacttcattctctcaacaataaccacattcaaccctattccatattcttctcccactctttcacaacttctaaaccacaccacctttttggtattcacatttctttcgtcacatatagctttcaatccctcaacaaaaacattttctgtctcaagaacaacatttacaaacaccgtgttattactctcgttttcaagctttttgcatcccgaaacccttacccatctttgctcaagtgtcatttcgtagaacatagatctctttacttggtctttcaacttcatgacttcttccacaaacatgaatggacaataccatttcccaacaattagggttgtagaatcatcgttgttaagcaacggaagagcaccacgaagagcagcgttaagacctagtgcttgcctaagtttgtagtatggaggatacattcggacaatcaaatgttttttcctaagaaagttaataggaaacccatctgaagcagcaatagctttggctgagaaataatcgttgtggcaagttatctcaacctgctgattctggtcaaatggatcaagtggcatgggtttaacgtctttaactttattactactgaaacatgaggtactcatgttcttttctttagaatttgtgtatgctttcctacaggtaccaattaattatcaaaattataaccaaattaatttatctgtaagcctaaaatagcattttttttaagaaaagttgtcatagctagttagacttaattaattagttatgtaagaaaaagcttatttatgaaattttctaatacagatatatattgagttttttttacttgagtaaatatcattttagattatgtgttttgcaaaagttattaattagaccctttattttattaaatgacaa

SEQ ID NO: 114652 - DNA, 2209 bp, Cannabis sativa
gggttgttttgtagaaatcagcttatttgagagctgtgcttgttttttttccctttatttgttttgaaagctactattatacttagagaaccagcaatcagtatgagtaatagaaagcctggtcgtaatcgaacagaaattcatgttgttattgtgctaggagaagctttatctctatgtcttaattttctgcacatgttctttgagttaggaggttttaggttttcgtatgtgggtttcaaatgtgatgtaggagatatatttgccaagcttatacagaatggtctagaactttgatttgttatattttgtcattttatgatttactttgaatccaatttgctgcatcataaagtaattaacaaaatgatagaatataacagattacagatctagactaagcttggtaaatatatctcttacatcaaaatgtccacaaaatgttggcatacattaacagtgatacagaatatatgtatgcatttgcgtgtgttttattggtttttataaagactttcgtagaaaatagtattccgaacacattattgtttctgtatcttaatgtggcagaactctagtaatttttaaggagttttgtagaaaatagtattctgaacacatcatggtttctgtatctcgttctgttaaacttctaataatctcgtttctcttagtacaagttacattctactagatgaataacactgtttttattattttggcagaatcaggctggtggccgttgccacacaaaaatttgtcgcagaggttgctactgatgctctacggtaagtcaatgctgccatatgatatgggcttgttttataagctcaacaaatacatgcaatcttgtttatttaagaattttgtggtgagctggaaacataccgaagagagtggtgtagtttgtttataaactacgtatgctaaaaatagtacaatggtggattttatctcaaaattgaactcttttcttgtggattgtatctgtgactgcatttaatgtagacatttaaaagatattctcttactgggttattacaggcaatgccaagcaagacaggcatcagtcgtcaaggacaaacgggataaacagcaaaaggtactactactatttactccagttaatccgtgaagcttttcctttcctgtttaaatttggctggtctattaactctttgtggaaacaggagaagcgccttacattgacaatggaggacttgtcgaaagcattgcgagaggtattataaacttatattcttactttcatggctccagtttctagacttaggacactttgatttagggaaaacaatacagttagcaaaccatatagaatcattaagtaataacagatcttagattataccgagtcttgagcttattctacttttgtcaagatcaagtttatatcttgttaactaatgttgctgtaaataacagttttcttgtaatatcaccacctgtatttgtgcatcgacggagtctgatatattgtatgaacataatatgatgctgataaaaagggtttgttttttagttttggtggctagcatgatctgattcaagtaacgatttatttaccttaaaattgttgaatgaacagcatggtgtaaatgtgaagcaccaagaatattttgccgacaatccttcgaccgggatggatcccgcttcaagagatgaatgaatgaattaatgcatgtatgttgtggctggatcaacattcaacagtccatttagttactctttgtggctttggagaaaagtcactgctattaaaactaaaatgtgcccaactcacttattagtaatgtttgaattttgtacaattgtgtttcatattgtggataatatatatttgatttcttagatcacttcttgtatttccagagcttagcataacagatcaagatctctatggcctcctcctttaaaatatttttcgagtgatgaatcatcaaattagagacccaaaaactatgttaggttgatcaatctaacacttgccagtttcagtatgttctattatctttttagggcacatttgataaggagattgtattgtattcaatagtaaaataatgtaaacaaactagttgcactattcaatacatgataatggtcaatattagtttgtattgtaatatttttgaacttatattttattatgtgaaaattacatgaaatatgggatttcataacaaagtta

SEQ ID NO: 114653 - DNA, 1469 bp, Cannabis sativa
ggttttgtactgacgcccaatccttctaatttgttgttgtggtgttttttgttatatttactatactatgagtattgtatcatctacaataataagctcaatcaatgctcataatctttaagatcatacatcttatttaatgcattgtatagatttgcacttatctcattagttaatagtttgtcactaattctccaataatagccttcaccttctatcaattgaaaatctcttataacccattattaaatcatccaaaatcgcacatataaatgttatgttaccctaaggggtaaagtggacatgttttaggctcataatactagcagtagtgaattatgatttaatgatcgactcgatatataattattaaagttgtactatgtgtctcaaatatcattaattaagtcgatcatctcattgtaattctaattacataatagtcactataccatattttttgaatattaggtttttactttttgttttattattattattagaattttttgtttaacattattaaacattcaattggcatttaattattatatataagatatttatttagttagtaacaaaagttttattcaaatttaaattttcaaatcaaaattaatatgagtaaataaataaataattttattagtatatagatatttttagttgatatgtataattaattttattattataataaattttaagtaataaatatgaatggatgaattattatttttaatcactaaacaatattgatatgtatttatttaatttttggtattttagaatataaataattttattgtccatctaatttttgtttgtggcattgaaacctccatatatctaaaaaaaaatattctttaaaagtaattgaagatactctagaagttctcatcactaaatatcaactacttataaaattaatattaatcacgtattatatgagtgaaaagaaaaagacatagttgaaatatattttcaatgcctgcataaaataccaaagtcaaattgaacataactaaatgattaaatgatatattattgagattcaaactatagttcagaagattgaaaaagtaaaatttttgcacctgagaattcaagatgcatgacagcaccgagagtgaagagtgataaaaggattcttacgtatcaaaaaaaaatcctaactgtgacattaattttcatcgtccaaacctctttttcttgtttaataaaatgttttttttttctgtccatgcagcttaccaaattcagagtctctctttatatcattgaaaaaaaaaaatctctctttatattttccaaccaaggatgatattactaactaatataataatatgacattaaattatatcaattttatcaacaacaaaaaaaaaaaaaaacctacttaaattataatagatatcgtggggatgaagaaattttagtttgttataaatattaataattatgtggat

SEQ ID NO: 114654 - DNA, 4604 bp, Cannabis sativa
  modified_base (4528)..(4532): a, c, t, g, unknown or other
atgtagaattccataaaaatacaaaaaaaaaaacgattttgaagtgtaaaaataaaaaagcccttttaagtaatactaggtatcactaaaatctaataataatattatttaatttaataattattattaatatcattaattaatttataagacatcacttaataatacctttagcaatgttctataaataatcgagtaacaattgttttcatctaataatattttaattttttttacatgatgtacagtataattacactagacttctcacaaaatataaagaaataaaaaaattatttactatgttaaaattatgatatatatatatatttgaaatcaattatgatatagatatattcacataactaattattgtatgcatttgcatgtaataaattatctaataataattttagcatattaaattatcatgaatttttaccaaaaatttgtgcatgattatatcgtcatataaaaagtatagatcagttgcaaaatagtattgtagcataaatataaaaattatattatgattaagtgagtcccatattgactttgttgaatatgtatatgagtgtaaagaaaacgctttatttatatcactggtattgtttaaatccacgtctaccaatagactttttaatatttatatttaattactgtgcgtgtcagaaagggtacatcattagtatgttagtattagaaaatttgataaaccatgctaaaaaaattaatcatggtgtttaattaaatcaaaaaattacacatagtaaatatatgttaatttttaaatttccttccaaaattacccctatctttttaactaccccattctctctaactcctttctccctcctccttccctctccattttcaaacccaaaattgaagtcccccctgaacctttgaactcgaacccagccactccattcaaactaggacgtactcgaacccaatcgacccgacgaccccagcgacccaatcgacctcaatgacccacgagacttacgatagccacttgaaccccagcgacccatgaaacccactcgaactagtctccgatcaccgtccccgccaccgtccaatgtccagagacccactcgaacttaggtgcattttttttggatatttctttaatttatcctttaaatgcgatatgtgtgattaaattgaaattattgatgattaaactttcgatttctaattttttgtgtttgggaaagaaactgagttttgggatgtagttttttttttttgggttttgtatgtttttgcgacattaggcgatatatttgtaattttgtgcgatgaaccatcctaagttaatggtttctgtgttcatatttttttttttgtttttttggacgacatcatgcgagtaatcatcctaattaatggttcttgtgctcatatttttttttgcaattttttggtgacattgtgctattttgtgcgactaatcggcctagatttgtgtgttggtgttattgagcgatatttggatgacatttggtcaatttttgtgtgatgtacattttatatgatttgcgaatttcatgaataaactttaagctattttaactgacgtgtgtgatctatatacaatttgtaagtgttgttttgtgattttgtgcaatttatacaaagtaatagtcatctttttttttattaatgcagatggctccagaacttattcttccattgtcagagcattttcagggcatatcacgtatagagggaacatgtactttggttcaataaaggctaagttcgaagtatttaagttaaccaataaggtgaaggaaactcccttggagttttttagaatgccagtgatttgaaattctctagggtgattgtgcatcaactgttattgaggaaaaagaaagtgagtgaggtcaaaaacaatgaagtgtggttttacgtgtgtaaaatcgaagcaaatcttgaaaattggtaaatatttgttgcatgaaataaaattggcttgaataaaatatctaagagcaaaccttgacatttttctcctagtcacatgaggatatggtcggtattgatccgtttgtcatgtctcacgccctgaatattgatctagacttttgtcacgtccagtagaagagaggactgctggacaaagaacattcataggcactaaaagaagaggtagaaaggttgaacgcacacaagatcattattaaagctttgtacccagattgggtggctaaccctgtactagtacccaagccaaacaaaaaatggcgagtatgtatcgactttcatcaacctcaataaggtgtgccccaagggctattttccagttcgaagaattgatcaactagttgatgcaatagacgggcatgaaatcctaagctttatggatgtctatttggggtacaaccaaatcagaatgcatccacctgaccaagaacatacaagcttttgaataaatatgggtctatactgctataaagtaataccattcagactaaagaatgctgaagctacctatcaaaggttagtaaacaagatgttcaaaaactagatcggacagaatatggaagtatatgtggatgacatgctcgtcaaatctaggaaggctgggggcacatagaggatctggatgaatgtttcaaaattctcaaaaaatacaacatgaaactcaattccataaagtattccttcgtggtcagctcgggtaagtgtcttggatttattgttaatgctcaaagaatagaagccaatctagagaaaatacaagccttcctggatatgaaatcacctaaaaataaaggaagtacaatgcttaactggttggatagccgcactcagcagattcgttttaaaggcgacggataagtgtgttcctttcttcaacattctctgaggtaacaaaaagtttgaatggacagaggaatgcgaaaatactttccaggagctaaaaagacaatttgcaaaacctcctgtactctcaaaaaccttggacaaagaagaattagggatatacttggcagtcactgaatacgctgtgagcgctgtgctgataagagaagaaaataatgtctagcatccattctactatatcattaaatgacttattgaagctgaaggtagatatctttaattaaaacgcttacttactgtttgatcctagccacaagaaagtcaaggccttatttctaagctcatcatttatttacccaccaacccttgcatcaagtcttgcaaaagcctgatgcttctggatggttactcaagtgggctatatagttgggttagtatgaaataatctttcaaccccgcgcaacagtaaaagggtaggctttcacagactttgtggtggaatgtataggcaaagaggaagacattccaaaagatagccttgagccaaacaaggaatccctgccagaagaaaataaagacaaacctatctagaaattacatgtagacaaatcagccactgataagttttttggtgtgttctatcattacacttgggaggcaacctccggagcaatcatatttgggtttagagcctccaacaatgaagtagagtatgtagcactcatagctggattaaaggttggttgagaggtacacgccgaatacattgaagtctgcagtgattaacagttggttgtatatcaagtcttaggggagtacatggctcgtggagaaaaaaaatgagagcttatctcagcaagatccaggacctgctcgcacaattcaagagttacaccctcaagcaaattccaagggaggaaaacacaattgttgatgccttggcacggcttgtgagcaacattatgatagataagcctaacttactcccaatctaattcttggaaggacccaacatcacctgtgtagaagaaatcaaaatgatagatactacgccaaatttgatgactcccatagcagcttatctcaacactagagaacttctaaacaaccaaaaggaggctcagaagatgatgaggaaaacttcacggtacatcatagtagaaggtgtaatgtacagaagaggcttctccatgccactgctaagatgtgtaataaaagaagaagttgcacgactcttgtccaaagtacacgaaagattttgtggtaatcatgctgggaggcaaagtttatcaaagaaaaatactaaggcaatgatatttttggccaattacgatggaagattcaaaggcccatgtaaagaagtgtgacaagtgcctgagatattcaaaaattcctcaagcacctccaaataagctaatacaaatgagaagtccatggccctttgccatatgaggaatagatctgatcagacatttgcccaaaggcaaaggtggagtacagtatgcggtggtcgcaagggaatacttcactaactggacaaaaattgagcccctggcaaacataacatctaagaaggtactagattttgtagtaaaaaatatcatatgcctgtacagacttttgcacaagattgtttcagacaacggtaaatagttcgatagccagatttgttgggttttatgccctnnnnnaaactccatttcaatgtaatccagattattcaatatcaataaagaaacaaaagtattttttcattcatttgt

SEQ ID NO: 114655 - DNA, 3392 bp, Cannabis sativa
aataaataaataacatgttaattaattctcaagaataggtaaataattgaagtttatctcctattttcatgggttattgaggcctaatttgtaactagaagtgttgttcaggctaaaagttgtagaggcacaaaaagtgcctgccaggagagaggttggttggtccttcctttgctggagactagctggctatgctggcaatagggctggccagaggggttcagccagaccccttaagttggccagttcattgtctctttgtcctgcttaagtatttggactcctcgtgaattggtatgttgtgcatgatgacttggcctttttgttgacaagctatactccacgtgccatcaatcttgcctacatggacatgccacgtcatgtgagaaaaaattaagataacatttacacccctaagtccctgtgtggacgtctgtacggatagggactttccaactttaattttgattgctggagtcttaaccgagtaagttttatataataattttagctatgaaatattttctcttttttgggtgctcacgtcccctaatagagaactgataatatttgcatggttattttgctagttgcataattatttgttgaatgcttaatgcgagggacccaccagaaactatataaggttacttagcaaagcacattctcatttcacactttattttatctctcttcaaaaaaggaaacaagagaagctcttcaattccccttggaggttgacacccataagtccctcgaatcatgagattctcgctttgttttgacgatccaagcttcccactgacttccttgaaggttatcactagttggtaaactttcaaatctcgctctctacttcttttcttgaattttctattgttgtgttcaagcttttccatgctttatacattcttgattctcatgttagattgtagtctttttggtattttgattcgcatgatagttttaggatgcataatgtgtgatttcttgatgaaaaagaattgattttgaccttcattgtgattcttgactctttgagtcacgaagaacacattcaagttttgaaaaaatacacattttgatccaaaacacaccttggcctgccctaggggtcttatttaagacttgacaagttctagggtattgtcatgggggctggcaagttctagggtttaccctaagaacttggccgattcatgcatgggtcatggcaccctggcgggccctcttcatgcatggggaccctggctagcccagggcttcgatcctaaatgggtggctagttttttatcctcttttgacctcaacaggaatcctatatggccttgtgacctatacaacctttgtctcatatgtggttcccttagaaactctatatgacactttatggtgagtctattatagtcaaatactcaacttaagactcaatgtttgtccaagttattacacttgaaattgtacttggctgatacccaaccttgtacaataaaattatctagcaattaccttttggtacggttgaccagagtcttgtctaaactttattgctttgtcaggtttctcacctccccttgtcttttatgtgcagatgatcatgagtgactatttgggaggtgacaaccgtatcaatgaagatttacttggtcttctctttgaagactagtgtccagttgattcctccagcaggtcctcaagttatctcgacgtcagtagtggttctccggaacctaaggtctagcatgactgccatttggagcgaatatgtggtgagttttacagccagttcatttgggagttaagcctcaggtggaggcagtttctttttggttcttggacttacatcgtttaggagggtgtgcctgatactttgctagttagtagggaaatttcttcaccaagagatcttcttgctgcggagactgcagttactattgccaggcactcggggtccattatggcaaggaccaagcagaagtgccgtagggcacaaccctatgaccctcacatagctatgctagcgactagagggagagtaggcattgttgaggaggttagacaacctcaatatgatggagaggtaggggcctgccaggcttaggcacttgtggctgatcgagatgaggagacctcagatagtgagtccaaggttgaggaggttgtgcctactaggaggcagtacaagacttgtgttgtatttcccaacaaccccttagatttgtatgatgaggccaagcggcctttgaatagccttggtcatcttcctgaggtcgggatataccatgttatgaaggaggctgcagcgccccgagtccttgagcatggggaccaccaggaccggtggatatctcccttgtcctctatttccacccaaaagctcaacaagattaaggtaggagggctaatgggagatgttcggtgtgataggcctatgagagaccagcaagcacatcaattggcattcaaatggatgacttggtcagagtgccatatagagcagggagcggtgctgcccctgtacccttactatagagacatagccatgtacttcagggtgtgtccgacttaggtcaactcgaaaggtataaagtacctttcaactatgttctttctgtatgcaaagttgggcgagactcatccctcccccgacgagattgggtacttttttaagctgaaatccattttgaagaaaaaccagactggatacttctactttagttagctgggctatcgatggtttggcaacactaatagcacaactttatcgaaagtggaaggatatgccaggacttatttcatagcctaggacatcttgcaggtccaccaccacttttagagggtgctgaccttctaatgttccatccccaaacttcagattagggatagggctaattacatcctatccctccctgttgagaggaggaatatatggaggttggcatgcgagaccaactttcagaagtatggtctgtacccttctgagtctggtgttgaggaagctgaaggtctgtttggaagcccaaatgatgtcccatagtagaggagacttgcccaggaggtgggcatacacctaatttggatgatgacatcccattctccaagcttgtgaggaccatggagaagagagagaaggccctccaccagtgcttaactcgcggaggcactactgatgatgttgccctgtcgattaggcctagaggccaaggttctgctaggcctacttctagaggcaagggcaaggctgctgttagtgatagcagttcagatgattccacctttgtggatgatagtagttgataatacaaaacttttgaatttgtttgtaatatcccagaaatttaattatgaataattgaggtttattatatattatggattaattaggtagtaat

SEQ ID NO: 114656 - DNA, 3067 bp, Cannabis sativa
  modified_base (2979)..(2982): a, c, t, g, unknown or other
tgtaatattttaatttttaagtaatttaatatttttatatatttatttatttatttttaaaaaaactttattctaagcaaatatattgtattacattaatattattttaaaattactttaattatttaagggttatctaaatatgaaaaaaaaaaaatcttataaaggaacatacctcatactaaatgatgatgtgtgtacgagacatcataaagtaattttgtactgaaattttaatagaataaaaaaaaaacaagttatatgccatgaaatgttgagaaaaaaaatagaaaaaataagaagaccgatttatcaataggtggcatataaattaaactatggtatatttaacagaaaaatatatatatagtaacggaagtaacacaaatgttacataaagtatttaatccataaaaaaacatgtggcattaaagtatataaaattcaaaacataagctatttatgtcgcaatagcaataattcctatatatatatatttatatatgcatagtgggctgggcctggatttggtagatatgggctagatatataagtggcttgtcaacacaccattgataagatgggcttgggctctctcttcccaatactttgtgaaacaacccactttttttctcaattaaacatttttactactttatacaatggcactttttaaaagtaaaactacattaaattttgattggaatttacaaatgaaagttgtttttttttaaaaaaaaaggtaagatgaataggtaaactttcagcaccaaaagttttctattttctttctaattagtacaaagtggtgagatatataactttaagtctttaagcagtatcgtcatattgtcatttggtaaactatcacggatatccacatggttatcttgcaataacttaaaaaaatagcgtagttaaattatatgactagcatagataattgtatattaataactgtttgattactatttattaattaattttaagatggaatgtaaataattatccaaaatggtcacaatattggtaatatagtagataactatctaaattgatttcttttggcacataaatcattatcaaaaatcaagatacatttagtagctattaaatcttaatctcattataaaattttaataattagataatatcttttttattagtgtaattaaatatatataaaaaataaaagtcacgtgactaaaaattgtgaacataagctaatcttaaatatcagacaagctataaaattctatggccatagaaatgtgcttggctgcatcaattaaattttctatgatttatagttaatctcaaaattggatggatacttatagtcttgaaattgctcgagtacaagtgatcataacttgttaattagtgtgtgtaatttttaaataaatgcttaatcaaatatctaaaactaatatcttataaccagttactttttcataataacttgcaatgttactttcactattacaaaaaactcttttggcgtcaatttatatgaagccaataatcttttgcgttagttttggaatcgacgtttatttcgatgatgcaatattgtatagtcaaatgcatcggtttgtaatgttgttaagaaaagtacttaaaataaatttcaaaaaataaactaatgaaatggagacatagtttggtaatgtatatataccacttaaaacagttgtttttatgaatgtatatctatatatatatatataaatttatatcttaattaaataactcatttaataagatcatagtttggtaatgtatacatataaatatgcattaatcacacattttgtgtgactttgttcttattacatactacattggtaccattctctaagtactaaatgataataaagattttgagagtggatcaacccagctattgataaagtagtaaaaagttgagtccgccccaaatttgtgggtcttagaccaaatgaggtacctttttgagcattcgtagatgtcatgctcaggtggggttctctggagattgtggcgacgtggctatccagtggtggtggtgctgttcctatagggtaagggtttccttgcgagggagcaacgacattgtcacgagtttgaatagcttgagtcctttaagggagctgtgttcttggaggcctctcatagattactctttagggatagtttgttgtatgggaaacaatatatgtcctagaaacatgatgttgactcttattcactggtagaaataatttgatcaggttttgttgatttttatggtccaaatcagagtagaaagggaaaatatttttctaaataattttagattattataatctgaaccataagtctcaagatctcaacatatttatatacataaagtttacactacaagatgagatcattatacctgctgatgaactatcagggtatcattggttcttcttgtatatacaaacgatcatccattccaacgcaattcaatgtcttccagatcagtatctcaccacacaggacaagtgtgagcttgtagaattaatttcacgatgactatttttctattacagtttgtactctactcatgagacactgtgatgatgaaagagatggagaggctgcaagtgtagaacacgagaaggggagagagaaagggtcgactatataattttcactatttcacaaaaggattccactatgaaaaatgtgtgatttttactatttcgattaaaatgattgttagtgcatgaaaactactcttttactcaatgtttccaatataaaattgatgcacaatggtcttggctttgtcccctttgaaatttcacgatttttggagctttctagggtgagattttaacagaacacaaacaagtgtaagagtaaggaaaaaacttattaaaatttaccatgaaaagataaatattttgaattttttaattagggggtcattttaaccaatttttacgcaaaaccaatcttcatattcannnnttagtagtacaaatttattgtgacaagtgccaaaaaatatttcgagatgagttcgggccacattcacaaaggggtaccactatca

SEQ ID NO: 114657 - DNA, 1620 bp, Cannabis sativa
gagggttgttcctcgaaagggatagaagtggacaattcaaatatgcttttcttgtagattgatttggctggggcacggaggacgtctttgtagctcagactggggggaaatggatggtgatcacagtgatggaggaatttaccacacttgttaaaagtgtggtccagcttcccacaatggtagcaataattttgaatgccctcatagagaaatttcagccatttagtaagggataacttcctaaagtgaacgttcataccacggtgtagggatttagtagtatccaaaagaaccctaacccgcatgaacggggtgacagagtcatacaaggagattaagtgcacctcaataaggtcacctatggtgtcggccacgaactgggcaagaccatatgaacgagagccaaaagggatgtggtgaacctggacccataggggaatataccggagttgagagggaaggatagtgtcaaaaccatcagggattgcaaaaatcatgagggatctgtcgaagtgccatggttgaccttccataactcttcgacgatctccctcacaaccaaattgcaccaggaacaaacctgaatggtattcggagaaggtgaaggggcatcgggcaacccaggcttcagacatagccttctgaatccaatcgactttcaggggtttagaggacaagattttaaccactaagcagaaagactgggtttggggttctgggtgaatggaaacatgatcgaaatcatggacaagggcttcctcggcagtgagttgagtggagtgggaatcgggaaaggtggccatgagagaaaaaggaagattggtggtggaagagttgtacaaacgagttgttttggaagcaaagtaggtagcaaaacaaacacagaagcttaaatagaagagggaaggaaaatgataccttgagcatgaagacagatggatgtgaggaggtgtgaacgccattaattgctcaggaggcctagatcctcttctgcccatccttagggcaatgattcgcctccacctgaagagagtgacagttagtaaatgcatgaaaagagggggggaagaagaagggccaagagttttctgatggagcattaatggggtctcgtaaacgggaaaatgggggctggaattaaagagaaaacaatgattaagggggcgatctcaagttagggcattaatagcatatattaagaataagacagggaaagatttcctgatatggcatttattgaggtattgggaagggagaaaaggaggcgtaattaaagaagctaatgatgacggtgaggaaggcagaaagaattgaatgaggcaagagaagagggagggagagaaggcggaaggtgaagcgacggggacgaaactggatgaaccagaaggaaagaccctagaacgttccagagcagggaaaaatccttgtattcatatccctgttatttgttggacttggatcaagtgtattatgtaggattcaatcttgggttgctattcttggatcaccatatacactgtgctatattttaaaagaaaatttacaaaaatattaaaatttaggttaactttaacaaaaatactgttacacggaaaaattttcaaaaatactgtgttttta

SEQ ID NO: 114658 - DNA, 5184 bp, Cannabis sativa
  modified_base (4969)..(4974): a, c, t, g, unknown or other
tgtataaatgtttaatgggccggcccaaagtatttttgtaatttcttttccttttttgtatttttctgtttttttttcctatttcctatgaataattacggtcactaaaaagtactagccattttatgtatattattatttgtctgactataagtgattaagttcaagtcaaataataaaacagtttaacccagacaacccaaccaatggataactgaaaagttcaaagacaaggaaactcatgattacaatcaatgccttagtggaaaaaaatgatttattcattttataaatcttggggaagatactgtgttcctatccaaattatacagttcagaattaatgttaacttcctcaaaacatatcaaacttgagccaaaacactaaactatttctggtttacaatatccaaaatctatgatcaagatcaagaatcaagcttctcatttcaagcagctgagaccctttttcaacctgctcccaaatctgaacaccgaggtattatacggaaccttcaaatacgaagaaaaattttccaccaatatatatttatcaatttttcatttacatgaaatgtatgctgttctgatctgcagaagaaatcaacaaaagagtttcccttagtatgatataacgagaaaatgaaacgatgcactttgatgttccacaactctcaacaaaaataagtgaaggaaatagagagaaaacgagtttataatttgcaatttgaaagctcgcaaatattaaaatcatcttgcagtacagtagtcttaccactccccctaaaatatattgagttttacgaaaagaaagaagaatgtattccatatgcaaactatagtgtccattcctatctaacaacatcctgtatgcttatcaaacataaaatgcagtttatttgggggtcccaatagcttgttctaatctaaagcaccttttgcagtgtcaaaattatagcagtaaattgtctcctggtcaatcttcatgttcatcttcagaatctgtggagaaattatggaagaaaacacccaaaaatcagacaacacataaaaggataatcaacaacttgagcaaacagctatctttaaataaaaattacttataacaaaataatgaagatgttaatggtcatataaggacgtctagtataagtaagaaacaaacccatttgaaagcaaaaactatgattctatttcaatatcatcatggatgattgtgcacaaaatacatgcctagactatagaaaacacaagattttactcaccagatcgaacatcatcactaagttgtcctcttgcttggatttgcttgacaagcattctatacatcaacacccaccaataaatatgaagtacaagcaagcagtatagcagagtattgaacacataataataaatcggtccctctactgggtgcttctccttgtccaacgtaagaagaacttcatagctgccaccataaaaataaggaaagaaagaaataattaattctaatgcttcttaattcaatgtttcgatctaaacattttgagaagaaatttgatgaataatacataatggaaaaaatattgcttctaattgcatgatagaagaaattttatctccccaaaaagttgtgcagaatggattctcaaacaagatttatctttcatactacatattttgtgtagtgtgcttaaaactttcatgaaactgttcttatacttatatggcagaatatggttttattccatgcagccataaagtgttgacagggaggaaaaagaggctgacaactacagcttcagaagatactgaaaatgcaaagaattgatccataatttcacagatttggcattagtgttttgacaccactatactctgatcacaaacttaaaacaacattttaaatgacacttgctttatagattaataaagaatatattcacaatagatttctatagaaatactagattcttatttgacctggactaaaactgaagttttaaatcccgaaccaacgtttagaagccaaaccaaacatgtctatgtcagttagacattatatcatactaaccttgtactccagagaatccaaaatgggtagtaaatgaggcgcaatatgatccaagacaagacaaaaagaataaatgcagagctcgctactacttcagcaccactgtattttgacatcttccctacctccagaaatacatcactagcatcatgaatagctaaaacaactgaaccaacacgggcaaacctgcaagaatttttttcaatcttattttgtaatatttaaatcttgccttcacaccttctccatcatgagataggagacaatacacttgtgtaaccacataagccccttccttgtattttatgtaggtacttagcctcaaagcaagggggtgttgacatgaagaaaacagaaccaaattcaaatgaaattcatgaaaggcacctgaaaatataagatagcactatgagaatgaatgttgcaacatgatgactcatggacaccccaaagtcggaccgccttgtctcccaaaaaatcaaagcaaagatggagtatgtgtaaaatccaccagtatacaaatacaatcccttcaatttcaacctgacatccatataaatttattccggtgtttagcaaagctgaaattctcattttagtcatgcacaggtaaagcaatatcagctacaaaaacagtagaatgtgaatatctgatttaggagcaaaagtcatttgacatccaactctagatgatcttactttattttctggtcgggccagacttgatttcctggacctacccaaaagtttcttgtgttagtaaaccaaggttcatcatatgtaacatagagagccagaacctctgctgacagataataaatacatttccaagctgactccttgaattttcttatccttttccgtgtatcctcattctctagtgcccctacattacgccacctcccaaaaatcaatcgtcttcccaggctctgcaaagatgagagtgagaacataaaatcataaaagaaaagtacaaatgcaaataggtttaggaatctcttgagttgtgcacgagataaatatggtttaacaaaataaataaataagtaagaagcttttgtcacttttttaccaattaaaacaaactgatcttgaacaataaatgatgaagcctaattcgaaattgggtaacttaaacaatattagctaagtctttttagactaagtgtagcccaccatattcaatgcacccttaccatgtttgccagacattaattccaaagtgcatagattattagtaaaaggacaatcatattatgatgtgattttaaagtgcataaattattaaacaaaagcgtatacaatggcaactcatagtgtaagaaatagggaaccaatcaataatgatattgatattctattttcttcaattttgctgagaatccaaatttactcctcaagcctagagtaggagcaagtaagtttaggacttcaaaattgcttaatgtcataaaagacatgcatcaaatttatgacatacaaaagtatggaaaaacatgtgaaaacaacattttatagaaaaacattgagaagcgtccagcccaaataaatgctcaactcaccggtataattactattggaataatgaaaaaccaaatcacactaactagattacgtaattttcaatccttttaacactcattctcacctaattttcccagttaaaatactctcttcttgctcatccgaaagtaataaatgaagttataaacaggaagataaagtcaaactaaggcatgtaaaagagaagaagaaaaaacgaaaaacataaacaactccaacactgattcaaagcataagctcgtcacaatagcaaaaactacatgttaaattccacagatttgttaaatattgaccaacagtattcataaacacaaaaactaagcacaacccatcaaagacaagtcaaaatctcatctgggcgtatcaaaagattaacaaaggacattctcaacgaacaaaaaatccaagaatagatcaattaaccaacaaacaatgaacatttaaataagcaccgtttccgcaaccgaaaagattagcaaatataaatacatatgttataacgaagtacctcaaatacgaatctatcgagaaagaatcgaacggagaagaagaagagagcaaataaaggaataagaaagaaatcttggtattgtggatgcgattccttctcccagtttcgagacttgacgtttttaatcaaatccatctcagaaaatctgttttcaacgattcaaaacaaataaaaacgaaaggcgtcacactgtggtggagagctcaaaaatggaacaacatgagagactctctgagtttgagtctctttctctgagtctgaagccgaaagattctgaaaactggtgtctctctctgggccttgtgtcttcagtcactgcgatgcgagttagtttcgtagtctcacgatgagaatggggggttcagctctcgactccagtccagctcatctaatttcttttttcttttctcttttccttttatcccctcatttaattattacttttgcaaatttgccctcaatgttgtttgtaattgtttaaacaccacttatattttttgttaatttactaaattgccatttcgtcatttagggatgtgtgagtccgaatgggtgatacataaataccattttggatcctatgttttgtaaaagttaccaattggatttcctgttttgttaaaggacaaaatggaccctgtattttccaaaattgttaaaataggaccctgaactgattttttgtcaagataaaatttattgataatctgatctaaaagtattatgacaaaactgtatctgttcgtatttttcaagttggttatatgaaaaaaaaaagttgtcaaaaattaagttaagggtcctatttgtaccattttgaaaaatacagggtccattttnnnnnntaacaaaatagagggttcaattgacaacttttgtaaaatacagggtctaaaatggtatttaccctatttcttttatagtatttccactaaggtttaggatttaaattatatggattaaaaaaagataaataaatggataaaatcaccttaactgccctggccatacatagtgggcctcactagttacaattttgccattttatttcataa

SEQ ID NO: 114659 - DNA, 3175 bp, Cannabis sativa
  modified_base (3114)..(3123): a, c, t, g, unknown or other
ctagaatgagcttaaaacttgataaagattgtacgtttcaagatggttagacctagagtgtttgggtcttcaagacagtttaggatcacattttgatagttgctaggcaataacttttgtagtaaatatattttgaaatcagttgtaaatttttaatgggatcccaaaattatgtaattacatgtatttatttaagtttaagtttatttatggaagttttaattattcacgtttttcaataaactctttgattagcaaaagagtgtacagtaattaagaaagtaccatagtgcgcctaaactagtagggcgttataatttgatattaaagccgcgaggttatctttcgaagattgttaagaagtacaagcatcatcaaagataaggtcgactcacggttcagtaatatttttttatgtgttttagtagattatttaataatttattatgcatgattagaaaagcatgataggaagcatgttagcaagatgatagttgaataggagtatattaagtttccatgtgagcggtaagtagattacaattttaatcactgcctgacctagatgattaatgtattcgtagacttgtcctatagaatgtatgcatggcttaacacaagaagttgagacaatgtggtcaagatgggtggtgattgcaaagattgagattctcctcatttatgtggccgggatagattttgtgaaagaatttatggaggtggtcatgagaatccactacaggctccaccagatttagaccaagggttcgctaaaatggaagttagaattcaaaaactagaggaggagaggttgaagtaacatggatctcttgttgtgccttcaactcaagctccagtgaccttagctccagagttgccagctgaacagtttattcttggtaaccatatggggtcagtgtatgggagatttggatgcaaggaccattggttattctaggagatctagatgtgatgaacgcttctcgagccaagagcactgtagattttgttcaagagtccctagagacttcagttgttggtggggtcactgcccctcttactttaaatcttggtagaggtggtcctggttccttggataatcagaagaggaaagcttcatctaatcaatgggctcaagatagagaaagaggtttcataggaaactaggtctaggtggtcttggaggacactatacttatcaagagtgccctcattgcaagaagcatcttctaggagaatgtaactgtaagacatgtttctaatgcgatctagtagggtatttcaagagagactatccacggctaaataaggaagaagcaaaacaagaggcaaaacccactttagctctggttttccattacccaagcagatgctgaagctagtccctcagtgtggtaccatgtcagcccctagtcaactactctatttactttgtgttgtttgattttgaagctacatgctcatgtgtggcggctaggataatggataaattgggtaggccttgagacagttatgaagtaggatttggaatcttgctacctgacaaagaattagttatccttgaaaggtggaataggtatatacaaattagagttgaggatgttatgatttatgctctgaaaagcctataaagacatttctgattatgaataaaagttaaatattttaatatatgcatgaatgttaagttattaatatttaaaattgaataatttatacataaatatcagaaaatttcttattcatacatgaggttgtaacttgtagtcgtacagagaactaagatcacataaacatgaataaaatagtcaacaacatattaaagtttaagaatctttaatcaacgattgctagtatagttcactaatgcctgttattcagtgcaaagtaatctcaatttagagtaccgatgtagtatgacatctaagtgaaggtgttgtatacaatgaagattatcaaatcagtgaagtctatgcacactcgttgtgtcccatttggctttggtaccagtacttgattagccaaccactgtggataatatacatcttgaataaagattttggacaatattttttccacttcttgttataaagccttggttggattctgatcacaaatttgaattttctcaacttcttgcataggttcaagagtggctttggctcccactcgcagatccagttcatcttgtatctccactaggcatccttctttcgtgtgttggactatgaggacagcttgcttggtggctacattgtagcattttcttgcttccccctggtttcctcgaatagtttccactcttggagaatgcgtagggaatttgaggcacaagtgctcgatcaaggttataactctgaatcaaagaacataatgaacataaacatgagttcatgtatacttaagattcaggctgatctactaatgatcttcattatgatatgataaattcttttcatggtaaatgataagttgatgaaagatgtttattacatatcagtccagtcatgcataatctaattatacaaagtacctttactacatgtccctctacatatgtgatctgaatcaaaattacacacactaaaagtatagtctatagtaaaccatacttagcagctctctattaaagattcttaatactttaatatactaccgacttgttttatacatattgtataatctaaattctcttgtacatccttacaagattatactttctgcatatgaataagaaatttttagatatttaataattatactcttataattaatacaccatttatcttataattgtatttcatatattctttaatatattatccattaattactttttttttgtgggcataaatcccaacagctaggttctttattcttttatttttggccttcctcgggctgagagggctcttccttagtcctctcttgtactgatgggactacagttggatccacttggatgctcgcattttctatttcccttttcatggcaatcaatatatcttgcattctcttgttttgttccttctgttctgccaactcagcctcatggtcaatatctttttgcttagctcaactagttctatatataagtgttggaatttattttannnnnnnnnnagatctactcacaagtatgtgttatattattttataatataataagtgtaga

SEQ ID NO: 114660 - DNA, 1676 bp, Cannabis sativa
  modified_base (876)..(882): a, c, t, g, unknown or other
ttttaaactgaaccaaatttattatgttaccttaatgttagatgaataaattatcttaaaaaaaaaatagatatttgcattaatttttatagttcataaaaaaaatttgtaacaaaaaaatcaagaaacaaaattctaccatagttatagttcaggaagacaaattatatttatttattgataaatgaaaacttcgacaaattaaactagttttggttccaccttggggtccatttttattgggagatggtgtactgtgatttggggaaaaataaaataatcaaagccataatttgcataaacacaaaaggtgggggaagtgtttaaagtctacaacttacacttttttaaagaagcaatatttagtcttcttaaagagtgagacaagaaacaaacactaattaaatagattatcaatgagaaaagaaaactgtcaataaatatagtgagatggttgatctgggttttggtggagtactatgtggaccattatgctatataggtgattaaattaaaggaaattgaaaggctcaaattggatgagatagtacaagttaggggagctttcgggatcaatcaaacacacatgactttaaagccacaaaaagagagtgagagtcctacactgtaattttatagcatatttgttagattttgtatgtgaattagtgttaaaaatatggataattataaataactctataattgtcttttgtttttatctatttatagttatgctgatttgatttattattcttgtaagaaatttagttctaatataaagtaattaacttctgtaatttcagattcaaaatcacacttaaagaaacaaaaattaaatcaaaacaaataaattaagaacaaaaaaccagcaannnnnnnaaaccagaaaaatataacacagataaatctaaatggctgtcagacacaataacacaagagaattatactggttctgatcttaagttcaatgtgaacttggtcatactccagtttgaaagcattacaaccaatctttattgataatgagaataagagatatcaatctcgagagctacaaggaaataatcatagcaagtcatccatagtgtaatctctcaacactcattaactcactaacccgagccaacataatcaataatgttgctcaatccaatttcccaatctcagctctctctctctctctctcactctaacttctctctctctattgtattatgtctctctatttcttgcccttcttcttctgtttgacttgttataaaatgagaggagtagttcttctttatataggtcaagggacccaatatgcaagctgtcatatttgacagctaagttagttaaagactaactaactaaccgaatggttgttgggaatttaaggaataataccacattatcattcaatcaacatttttttaaacatttccatagaataatgtctaactgtatagttatattacatcttgtactcttccactaatattgggtgaagtatatgcaagacacttatttcaatgcgtcaaaagcgaaatgaataatgttgaagttgttttctttatccttttaacatactaatgggtatgtgggttaatgatctacaaaactcattatccacctattccgaatgattccataatgtattctggttatcccaagatagatttattcatctc

SEQ ID NO: 114661 - DNA, 2102 bp, Cannabis sativa
  modified_base (2064)..(2067): a, c, t, g, unknown or other
tttttttttttttttttttgtaagcgtgccttgttagacgggctattgttgtagtgatatttaattttgttggaaaaattaatgcaaaaaactgctcagaattgtgcaagtagattatcagtctcgttgtctccaggataaaataatacaatcgaaccactgtatcgaatctctattatacgataaaaaaccatcaaaatacaacacccaaaaatactgttgtttagattacatatcgtaatataaaattgtttattagattttgttctgtgagaaaaaaaaatatctttctcctgttagttttaatgcattatatagagaatacatagaaaaatataacaggaagaaaatcattgttttttctgatcttgggagattgaaatggatcatggctaaaaaatctaagcattttctccaaacaataaggtgtacatcacactaaccagttcggatcgatcagtggcgacgcgcgtctgtggtgttcaagtaaccctttgtgtgacttagtgatgggaatttgaattgcaggacaggtatccatgggtacccaacccgaatggggcgaagattacccgccttaattggtaatggagcgggggtggagtgcaattttatatacccgaagcggattcaggacggtatcgagagtgatactacccaccccatattcgacctagatatatagtttctaaacttatcatatagttttctaattattatgtattaaaattattgactatacttacaaagttaaccaataagtctccatacccaatatggattcccttaccctaaatccatcagggattaagcggggtgggagcgaggatggcggcataaatgaaaaatgaagaccggattaggaggtgcactagcccatcattttccacaaaagtgagtacctcttggggccaacttaattactcacatctgcattatatatacacttataaaaagtgttccaaagcaatgtgtgaatactcctgtacgaacatcaaataacaccttttcattttgtttaataattcatgaataatgttccaacaatctaatctaagggacgagtctcttattgagagcgaccacttggtgagatgatactccgtctgatttacatagatgacctctttaatgttgggacccttgtttgggggtttcctttgtactatcattggtcattgagtcttagagcactcttaaatatttctatcacaaaaattttaatttatctattttatctcaaatttttacaatacactatataaaaacttttctatttttttctatattatttaaatataatatttttaatatattttattcattttatgaaaataaaacatataatattacacatatatagaaaaaatttaataattaataataatatatgtttagtttaatgaatagtaatctctacatttaattataagtactattccttaattaaggtaaaaattatgtaaattagctaaaatttggtttatttattttattttattttttgaacactgaatctccacacgaggagaacttacaacaaaatagccaaatctacctaaagagcacaatttggaatagagtgaagaacccaattccataaagcactaactctagactctagagtatacttggcctaaatgatgagtaataaaattggcttctctaacaaaaaaacttaaacccagccaagccttgacttggaatgatgctcttgatgctccacaaaatgccatctaaatctctccaataagactcaacaaaagaagaaatgggggaaatagcttgagcacaatctgactcaatagagaaaccattaagcttgaggttcctttccatttacaccatttctttcatggcaacaattcaatagtgagactgtcaaagggcttgttaaagaacttaccttatcaaatattaaatattatttagtgtttgggtatagagataggttattcttagttgggtttggtgtctatcctagggttggatatcctcctgttggtgttgctaaatttataatcaatacgcaagtatacgcaatcaagtagtaaactcacacannnnaggtcgaaccacagggaattggactaattactact

SEQ ID NO: 114662 - DNA, 3016 bp, Cannabis sativa
gtgactgctcgaagtgcatctaaagctaataagatgattatgaataatggcaatgcattatgggctagtaatcctcataatacgaaaaattatcttattcaatgtagaatccttattgtccatcaacatacctgatccatgtcaaaagaaacccccaatttttggaagcatgaaatgacagctttggcagttcctgaagtgtcaaccttgctggattgatgggattccatcacctaatatataacaggttaatcagaggcatgtttgttagtactcaaattcagcaaatagaatatgataccctgactttatgttgttttaagcgtttcaaagttcgaatctaataaagtttttgtggtagcatgctgaaatatgacaactcaatatacacatattaaaagagattgaagaaggcccataataagaaagtttaaagcttcattattatcaaaatcatcaccattatcttaattgtcaaaatgaaatatttacaaagagtacctgtagagagtaaccagagaaagcaccaggaaattgctcagccataatttccatggctgcaagaaatgcaacaacctaaagaaaataacagcccattaaatactcgtgaacgcaaagcatacttcaatcaatataggtatccaattctgattacctgctgtccctttattaggatacctgttttcccatttgtggagatataactgcataaattttggactcatcaacagtcttatataaacgatccctgtctccaccagtggttcccatcacaaatggcaccccgacactggaatatagctctgcattatctgcaccatggcaaaacaaaatgcaaggaaactcaaaaggcaaactcataaacagaaaaagggttataaatgagaaacagaaaggggaaaaaacgacactctttatgtaatttacaaaacagcacaaccataaggatcacacttggcttaactaatgacaaccaattaaaacttttattagagaaaagtgagccacaatctagtttctaaatcaatgtttcttggttcatcagttattgttattctacagaacaagagtagtattcctttataaaagcatttatattctaggctagtgtcaaccagatgtcatctacacgaaaagagtcaatgccactaggtctcaataaattcgtgcacaattatcttttccaagctaaaagggggaaaagaaaactaaatggattctcacacaataacccactttgtttcttgaaatttaaactaaatactaaacaaaattttcaaaagaagtacagaatatatatcatttttctttatctagttagcttttattggagaaaataccattgactgctgcaggcacagtgtaatccacaacaatcaaatttggatactcagtataaagagaggccagagtgctttctcttttagaagggccttgcaccgtgatatccttcccacaaacttgcacaatcgtcccagactcttcttcagagccaaatgatacaggaacaatgttaagaccagcagaatctgctgcattaataacagcctgacccatttttccagtacaaccatttacctaattgatgacaaaacaagatccatatgatatttgtcacaaatctaagttaagtacaagaactaagggaatacagataagttggtgaggcaaaccatgatttgaatgttagagacagatttactcagtggctgaattttcggtgcagccattgaagcacgtggtctcatagctaatgacgaaattcgactatgattccgcattttcatccattggttggtttcactatatattccaacagtgcttgttgggactttcacaataaaagacatttgagtatttcttgtatggctttcaatgctgcaagataaagccatatttcagcagttataaaacaaaacaaactgcaaacacatatcttcacatcacccaaaaggaacttcctataagcaagaatcagtttcgttcttgtagggcccttttttccttgaaattgattcttgcccttttttcagattagtattagctgatttatttatttatttttggatagtagaaaatcaagtccttcagtaaaataaactttatcaaaatttttattagtaaaatgacttcaaatatttttattagcaaaatgatagttgcagaaacgacgatgaattacacggtgcgaccataaatgtttattatggtcacaaaaccactatcatggtggcagagtaaattaagtgaaattattttacaaattttaatattccacattgttagtttggcaaatttcactctgaagaacaatgcaatattcaaatagtacaaactacaaacacatgttttcacatcacacaaaaagaactccatataggcaaagaatcaatttctgggaaactcaacagaacaatgtatctatcaacaagagtttaagtagtacaaaataagattactcattccaagcaatacccataaacaaaattttaatataaaaatctatgcaaatagacatatcagctggcactactaccgctcatcatttctttatatattacagacaagaaaccaacttttattaaccacaagtgagaaaatgaaaaaaaaagagaagcttttcaccaattaccgtacctgtgaatgaagcgcagaagttcgacaacccaacggtctatagttaaaacggaattcctactgtccgatcagttagtgatgaagaaaaggaagaaggaccagagttgtggacgaccggaccggaccggccggcgaagtgaagagagaaaaggagagggtgagaaatgtggagagaggcggctgtgatggagggtttagggtttcgttttttatgattatatattaattttttttttttttgcataaagttcatattgttaaaaatcgtggttatgttactatattgtaggggaaatttcaatttttgaccctaataatacaacctatatcaaaatttatacccctttataatttgtacaaatttagtccattaattaca

SEQ ID NO: 114663 - DNA, 1085 bp, Cannabis sativa
tctatacgtaaaaatgtaaaaaaaaaatctataagcgtaaaaatataattttttttacaaataatagtaccttatggttcttaactaactgtgctacctaactattgtaagcgtacattagcaacaattttatatagcatattttgaaatttcagggtaggctttagccctccctggtctcaacataagtccgcatgtgcctcgagatgcaagttgtttggccttctatcttttgagttcactgatttaaataaaatttattctttgaacttttagggggccagatgctttggcccatcatttttttagaagaataaaaaaaaaagaatttacaacaaaagcctaacttttaagaatgtaggggaattctatttctatcatatgagaaagtaactaccccattagtatttgctttaaaatggaatatgagaaacataaagaggtaccaaaactaattaagctttaacgattttaaaaggggaaccatcagaatctacttacaaaatagtggaagttttacacatacagacaggagttctaaacttttgactaatttgcaattgcaactacttttctcagtttggatcaaatggtccagctgtagaaaaggatatgaatagtttggattaaggtaagtgaaattttaaacttggaataatcatgcaaaatagcaaataaaataatatactagtagctatgttttgacttaataccaattttaaatgtagattcgaatttatcaatattttcaataatcaatacacaattgagaaggtgttcttttttactgttttgttgacctaatgatctggtatcgaatcaaaacacatatgcctacaatagtataatcctgataaaataaccagtacccatgttcctgttcctccacgtagttggagtaaacagtaaactacaagtttcatgcatgtgctaaattgctaatcattgaaatacacatatatgatatatttatatatatatatatgaaaaatgctaaagggcaccagtagtgcctaacacgctcttatgtgtcaatatcgctattagtccaactaagtatcgagtcccatatagtttaatataat

SEQ ID NO: 114664 - DNA, 2680 bp, Cannabis sativa
taattataattattaaataaatagtagtgacatttataggattaaaattgaaaaatgtggtatttgtaaaataaaagatcaatagttgtaaaaatgataaaattataactactgggcccatctatatggccgaccacttaaggcttatttttgctattattttatcattttttattccatataatttaaataataaccctaggtaaaatagtataaaaggaataagatggtctgattcttatcaaactcttttaatttagtttacattgtgtcagacaactagagttcttgagacctccttcttccttcttctatttcgaatctccttcattgtgttcttcatcaaattttgagcctatagtgagtgagtgcatgcccacccacagcaaatctaatactcaatcatagtgtgtaagattgtgaagaactaacaacctgaaggagaatcaggctcagatcttgatagtactctgcgttaaaaaggaacaagggttagagatctgagtggaaagagtcatatattctgttgcaatcaatgtaaggtttcttgatttcatatgtgtttaagttctattattttagaaattcatattttggacgttaataaacatactggttagtaaatctagatcctagtaaaaatatattccaacaacaagttcttctgatctatctttgaatagtggtgaagctttctttgaccaaactctctatcgaagcactttaggtgctcttgagcaccttacatttactcggctaaatgtagcatttattgtcaataaattaagccacttcatacatgatccaacaattacacattgggatgcttgtaaacgcttgttcagatatctcaaaggcacaattcatgaagactttttgattagaccaactattagattatgtctacaaacatactcagatgttgattaagcaagttgtcctgatcatgacaaacgctcaacaagggctacacagtgtccttagggggaaatctcatctcatggtcagcaaagaaacatcaagtagttgcccgttccagcaccgaaagtgaattccaaactcttgttgatgttgctgctaagtaaaattgttgtgttctgttttaagagagctttagatttctatactagcacctcttattatatgggttgacaaccaaggcacaacttctttagcaagtaatccagctttggatgcttgatccaagcatatagagatttgtttgagatcaaatctttgcgaaggaactggaagctaggtatgttccatcaatttattaaacattagacattcttaccaaggcattctcagtttctatatctaaaagacaagctcaaagtgtgttcatcacttgagtgggatgataaccaatatatatttttctattttaagaaaattagttagcttttattgttggctaaactgttagttatgccacctattttttagttttacaacttgtaaaattctgttacaagttgttaattacaactaaccctttcttgtatctcctttgttaattacaactataaccgtttcttgtatctcctctctataaatacaattcacactcaactcaagacttctgcaacttttgctagtctttgagattcatttcacaaagtgtgtctagataaagtttgtgtagagaagttaatttcacaaatgtatatatacatgtttgttgcaaatcatttaaaagattgtcattatttttgttttactctatcattctctccctctgtgtctttttctctcctacaggttgttgggtggccagtgagagagatattacagactttgggtgggagctcatccggtggtaacgacaagaagaagaataaaaacatgtagtaggtctcatttgtaagatgtttgattttttaatttgaattgatatcaggttgttttgattctctgactcatgatgttgttgataatgggatacttgatggaatttttgtgcatttgttgataatgctatgaatttaggctttgactgttcacggggtttgtacttgaattgtttagtcttgtagtaattaagattgatattatgtttgggtttgtatttaaagtggatctaaaactattttatatggtactctgagggagagaaaattagtatgtgtacatagtttttgtcactagatctagatatccaaatgtaaatataaggaaacattcatttatttttcttgttgttagtcatgaatcttctagtttggttcccattgaatcaatgagatatcacaagaagaatttttcgttaactattaaaccagtattatcttcgaaatgtattccttctattcttcagtgatcagttcaagttggctctatagggatatgatatccataaagtaatataggttgatgtatgtttattaacattgacttctattttaatttgcaacattcgtgtcatcaaatctctttaaagttgctaagttttgtatgtactcatgtattttcaggtaatggcattggcacatccacattcaccattcacatttgaaaagcctgtttctcttaaggcagggaggaatgttgtcgctcaactaagcgtcactacaaaaaatcttacttttagttacaacaaaatttatgattaaaagtaaaaaaaagttgtgactaattataaaacatcattctcgtgttgtgactaaaaggtccgtgg

SEQ ID NO: 114665 - DNA, 2528 bp, Cannabis sativa
  modified_base (50)..(53): a, c, t, g, unknown or other
gacacattttaattatttaaaaaaaggacattaactatctatagagttannnntagggccatttacttacatttctcgatcatatttccccttatttgtttatttgggctgcgaaatttctctctaagctcttagaggaggccctcactaatggaaacataaaaggtagccaataattattagcaatgtgtgaaattttgttccaggttaggacaacaaattaaagagcttttggtaatgaaaagagggattaaagagcttttgggaattaatgagttgcacgagaatataaaatatttgggccttccacttctaaacacgagacagaaagatgtagatttcaattttattttagagaattttattgccaagctccaaggttggaaggtgaagactctctccaaagctagtcgtgctacttctatcaagttctgggtttgtcgttgtcgatgtattccatgaatacgactaagctttctaatattctagcgacaagaattgatggaatggttagaaatttctggtggttctttgaaaaaggaaaccatgggatccacctaaaggcgtgggacaaagtgtgtctgcctaagtctcgtggtggattggccttccgtaaaacaagagagatgaatcaagcttttttggttaggtgggtttagaatttgttaacgggtaatcaatctttctattgtaagattttgaaagttaaatatttacagggtaaaagtttcttccactgggcctacaagaattttgatttctagttctaacataatatggtaaaagctaaagcaacaatcaagaaaggtggctgtaaaatggtatcttttggtaaagacaccaggatctgggaggatccctaaattcctcacgaccagacttttatccccacgctaatggcaatcattcctttgggctcaatttagttgcggatctacttacagagagtagtaattgggatctctagaagcttcattccttatttgatcaggaaacaatccaagctattttaaaagggggaaaaccctcaggtaaggggagggattcttgggtttggacaaaaggaagcagtggtaagttctcatgtaagtctgcctacttatttaggctcttcaacggaccccccctttgtgatgtctcgccctccctcttaaacaagttttaaaatagtaagatactagagctccataacattctatggtggagtatcttttttaatgcacttccactttgttttattttgaatagcaggttccatttagaaaatcccctctgccctatttgtggggttgaggagaaatcaatggagcatctcttccttcgatgcaatttgcttataatttatggaggtcttccccataagatatttttcctatcctcgacactggtattcgtatgtgagattggataaagttttttgggagtttaaaagataagggcattgatgtgaatgatgtttttttgtatacgtccattgtggtggacactatttggtgggcacagaatgataagattcataataattatttgggtggcataaagtttttcattgactctatctatttttgctatatagattatcgagcttctttctcagttgcccaaacttgcagtgcgcaaagatatttggtgccccctccgattgataggatcaaaatgaattgtgatgtcagagtaggtttggagcacatgtgtattattgtggtcgctagagatcatctaggtgtggtttgttgggtgactacgtcaaggcttgacttttcaaatgctcttagtggagaagttgttactcattgcttagctctggatatggcgactgagaaggggtacaattttataatagttgaaagtgactctaaggtggtgatcaactctcttattgggctgagtctaggggagattgcaaaactattcacatcactgtcgatgcacttcttttgcttttgttggttgtaatttttttaatatgagtcggtcttgtaattttgtggcccattgcaaagtgggcatacccacaatcggtatggttgttagaatgttgaagacatactgtcggacttattttgtaatgaccatgaggtctaactttattattttatatgtaacgcttttcttttttttttttttaaaaaaaaaaaataaaattataaaaatacactttgctcagtaaaaagtaaaatacaactagaaaacaacgagaaatcattctcacgataatataaatcaactataaataaattataaaacaacaaaaaaataaccagaaaaatatcatgagaactataatataactataaaacaacaacaaaaactgtttattatttttactgaaaaagtatttttgttaatagaaaaagtttaaagagtaaaagtaaaaaaaattctgtgatgtattactgtaattattttcaaactttttatctaaattatgtattgttgacctcacttttagccaacgacaatgagtctattttataagcgataaatgatttataataactgatatacgataaagcaataaaaagaca

SEQ ID NO: 114666 - DNA, 2075 bp, Cannabis sativa
  modified_base (98)..(99): a, c, t, g, unknown or other
aaaaaataaaaattcataacatggaccaatcagagattgccacgtgaaaatttacttaacattattgtcgcgaggagtgctaattacaacctcctatnnacaacctctcagtcaacctccacgtccgaaatcacatgccgaaatatttttttcatagcgttattcattctagttatgatatcatccatgtaaattttgaaaaattccgaataatttacgataccaaaaacagagttcttgatattccaatttaccacgcgtgttcaaaaaacttcaaacgtattttcagcactgaaaactattcgaaatttttcaaaattttacaggaatgatgttgtaagcataacaaacaccgcagtaaaaaaaaattgaaaaaaaatattccgacatgtgttttcggccatgtaggttgactaagaggttgcaacagtaagttccaaaaattaaacttaggcatttatttgcaactaggagttaaatttaggtatttatgccacaaattactctaataaaaataaggtttcatcggttgaatcagagaaaaaaaattattgaaatatttttaaaattgttttagaaaatgcaaaaaccaagcagtgttggtagtttcaaaaattaaaaagtgtttggttgaagttttagattttttttttcaaaaatgaaaaccttaatgaaatttatgtaataggctcctaaatgttcgttctcgtagattttttatctgtttcggtaaccaaaaaaacattttagtctaatttcttataataatcgagtatgttgtaaatatttaggattacttgtaaatttttaaaaaattcaaaattaaatttaaacagttacttactatgcatgtgtataagaaaatatagtcgtgcttgcaacaaatatttaaaacttatttaggtactgtaaattactcaaaaatttttgaaaatttacaagtggatataataaataactataatacatgatcatgaaaaaaaattgactatatatttttctgtatagcgaaactattagaattgattagttttatgttattgagctttctcctttgggctagtctctctataattgggttgtacaactcttgtataaatactaccatttatttccttttacaattatatgagaattttaccactttcttgatcttttttcctaatatggtatcagatgatattcttctctcattctaacaactttacctcaaaaccctaatcaccatggttcaaacacgaggtaccctttgtctctcgcctgccgtcactgccaatgctgtcgaccacccttttcctccattgaagcttcgaactaggtccatgttgaatcaattgtggctcaggcatcttctccagcacctttgccgacctctgaaggtccttcttcaaaagcttcgatgatctctcctacatctacgattggttctcttcctgttgaaatcttgaccatcgatgtgtcatcttcgctattcattccactgccctcattgaatcctaatggatcgttctccttaccttcgttttcctctattttttttatgagcttcgcactagtgtcctctattttttctagtttttcagctcctcatcctgtggttctaacaacatctttccacctggctttggtatgtttgatcctcctggtgtgaatcttgatcaaccttctattgatgaacgcaattcatatcatctgggaactagagacaacccaaacttcctcattgttcccttccaactgactaccccaagataattttcattcatggaagcatgctgccacaatcaatctggctgccaagaataaaactcccttcattaaagtttctctttctcgtccccctatttatcatccgtatagatctgcttgggatcaatgtaattgtatggttatggcatggatattgcaatcaatttcaagagaaattgtagcaagcattatgttcaaagactcaactcttgctatatggaaatatcttcacgatcgattcaatcagagtaatggccctcagatctttcatctcaagacttctctaactcgcatcaaagaaggtgtcaattctatcaccacttatt

SEQ ID NO: 114667 - DNA, 3503 bp, Cannabis sativa
  modified_base (53)..(58): a, c, t, g, unknown or other
aaagtaaaaaataccgcctggcagtatatttgtaaaaaaatagcaaaagttannnnnncatgtaaatttcccaaaaaaaataccacatattattttgataaaggacttaatattttttttcctaaggtccagtcaaggaaatttacacaaaatactatgttcggtaaaaaatgtatacttttacgttcaaatatatattatatttttacgattttttataaaaataatacaagaataacaagaaaacaatacgaaagtaacaaaaaacaaacaacaaataataatactacaacataaaaataatatgataaacatcaaaagaccgtatttctataaataaaatcttaaaaacaataaaagtgtttgaaattctatgtagtggtacttttgtaatctttttgttatttttgtgtatttttgaaataatctttttctttaattcaattcttttttctcaacctcataattctttgattctgaaaccagttaaataaccttacaataactgaaaattttgattggcttttccagatatgaaatgggcaattggcattgcatcaatcataatgaatgaactttccaattttggaaaaagggtatttttccctttaaggaaaaggtgactcagaagatatttcaatgagtatttatagttatttttggattgaataacgtttaagcaagtattaccacttatattgattaattaatcttattgaatgattagcaaaacatatcactaattggtgatttgctgacaaatgatgacattgcattggtgaaaggaaaataaagaagataaggacattttgaaatttcatgtgactaatttaagatggtttgtaaatggaatgattttattctttgaataaacaatagcttgttttaacttcaatttttttaaataaatttatttttttttatcttcgatcgaataataatattaagcacagtcacagaaccagaaagacatcccaaccgttatagtactatatatctcgataaatctttttaatgattctcgataattgtattatcaattttacggtaattgtatagttaattaacatggtttagaaatagaatgatttcattcttagtacaaacaatatagcttattttaacttcattctttcaactaatgttatttttttctcttaaatcgaacaacagtctcaagcagggtcagcattataatttagtaagtcataaaaaaaaatattttgacctttatttaaaaaaaaaaatatatgatatttttaaaattataaaaataatatgtaattctaaaagaagacaaattttttgggctcctgagctaggtgggccttaagcataggcctagtccacctatacccaaaatcatgcatgatctcaagcaactaagagaatcaaacagacctcccaaccgttatactactatctcggtagatcttttaaacgattttttctcgattctcatattctaaccatttaaaaagaagattcatgcatgtataaattataaactttccaataattgcatagctaaatctaatattaagatggttttaggctccaacttccttttgattattttgttttgaagagatggagtgatgtgtaagtaagtactaaatatgctttgattaaatgtttgaaatttaatacactccaaaaagaccataccctgcaaaaaactatgtggctccctatggaccacaccaccacaccatgtatttcattttgttttcttatgatacccacaaaaatgttgccaaaaacaatatattgatgggttcacaacactaaagaaaataaaaatatatatattttaatttatttttttcaaagaaaaaaagaaaaaaattgagattttggttgttacaaagcatatcctcttgaagaaaatagaagcatattgtgtactaaaaacattattgagtgtaggccatacataaataaataataaaaaaaaatcattcaatatggaagttgagtattataatggttaatcttaaatttatgatagtaatttcataaacccaattaaattttctagttgcactttttttttttcattttcattaaaatattagtctaaattgttctgtgtcctcctaaactatatggcataatctttattgtttttaataaatgtactttatacttatatggtgcatggtaataaggatatatattaaatggtaattacaaattctctattccattttttatagtaaatttttaagtttgaaatcacatgtgtgaatatttttttaatgatggtatttgttgtatttacaatatgatccctataaatttttaaaagattcttaatagtttacagtaccgaaaataaaatttttaatattccaatttattacttgtgtttaaaaaattttaaatttatttttcagcactttaaattattagaaattttaaaaaaatttaagtgaatgatattgtaacataacaaacataaacataaaaaaaaaagattttaaaaaaattattcaaccatgtatttttatattcaaaaattaactataagattgtaatagaagaatgatggcaacactctataatttattttgaaaaaataaaaataaataaataaaataacaagaaagtcaaagattttatcttttaatatgtatcaccaacatggtttgaagggtagtattttgacaaatttgtggactaaaaaccactgtcataatcagttggctgtcatccattaacatctcttatttcctgcttgttttatttatttatttatttttcatttttaaacttttttttttaatttttacactttcccatatatatttcagaataacagtttattttttaaataataaaataaatatatatggacaataaatatttgtaatggtgtgaatttttggatacatgcaatttgatggatctggtttgtgaaaaatgttcattttgtctcaattataatttactgtagcttaaaaaaacacaataaaaactttaataataaagaaaacacaataaaaacaaaaataaaataaaataaaattgatagtacatgccagtgttgataacagctgatatgaattaatgtgaaattttattaaaacagtcacttattatttttttttttttggcagagactgtatcataataaaatatattaaatgacaaagttgaagggattaaatcaattaggtctatcttatttattttattttatttttttcttgtatttaactttaaattcatgtgaattatcatcctatacaaccaatattattcaattcatattggaccaaaatgtcagtttcatttattttaattaagttgcttcaaaagaataagaataagataacaatagtaaatagtaatattattaataataaagtatagtaaatagtaatattattattaataaagtaaaatttctatttaagagtactctattcaagaataatctctaatttgttataaaaaaaataaattctaatttgagccagttataaataagaataacc

SEQ ID NO: 114668 - DNA, 2051 bp, Cannabis sativa
  modified_base (27)..(47): a, c, t, g, unknown or other
  modified_base (1976)..(1981): a, c, t, g, unknown or other
gtgttttatttatcgttttagaagttnnnnnnnnnnnnnnnnnnnnnacatacttgtgagtagatctaggatcctcgtaaaataaattccaacagaaagtagataaaaaatatctattttaaggggcattcattcttttgaatttgaagaatttaatatgtaaatatctcttattttatttgctaattagggtttaagctctcttatatgaagagcctgccttaactcaaccctaaaactctaagtctcatttatgttgtaaagctctaagtctaataattcacttcatctctctttctcacacgaccactatagcatctttcaacacttgtgattttctatttttgattcatactttgtaaccttaagagagctatatcaggtctcaactatacttatctgaatagtgttatctctgtatcaatataacaaaaatggtattaggtcattgaccgctaactaagggggtcgaacctctatgaaaatccttgtgttcttttactttctagttcaatatgtgtaacacatggattaatttctgaggtcaacataaataatgaagtttattttataaataattaggatagttattatctgaatttggattcaaataataaccatcctacttattaattaataaataataaaatagttttattattttcaataattaaaccaaaataagagatttttatgggatatttatttttttaaaaaaaaattcatatataaattaaataaatataattgttttttaggtttgaaattcaaaataagagagttatgtgtttattgtttttgaaacttaagcatgtaaagtgacaaaaattaatttagaattaacttattaatttaaaaattaacctattcatttaaaagagttttaaattatgaattaaagagttaattcagatttaatgattatgacgggatttttcttttataatttgaggcttttattatgaataatttgattataatttttaaagtgattaatatgtattaattgcaagaattaataaactaaacacattaacttaaaatactgagtgagagaagaagtacatgtcaatataacttacgacctatattattggtcaacaccgagggagaatagactgtcctcgagacgactttacttttatccccctaaggaaggtttgtgtgttgttgttcatggtgcaaaggttgatgaaagtgcagaagatgcatctattgctcaagagtgcaccaacaatgatgataaaattatttttgtttcaagaatccttgtagatttgaaagatgtttgtttttgagttgttttattattattttttccatggtttgaattttctaagaagttgattgtttttaaattatttttgtttttttttcttttgtgtcttttgaagcaagatttaatttcaaaagatgatgatgattttgttgatgctggtgctagtatgatatttaatttttaactgttgttttatgtttgttttaagattttttctttgttattttgttatgtttgacatttgttattttattctgaatggaatgttcttctattgttgttgtttctcgtgagtataccatgtcttatggtgttcaaggtgtggaggagaaggtatgttttttgatatagtgtatttgttgttgttttgtcatttcttttaataattttcaattcatattttttgtttctttgtttgtgtatcttgacttttcttatgttattattggctaaatcctctggcaaagttgctagtgattcttaccgcattgattgggttcaaaatgatattcgtgatattattgtttttgaggagattttagttccttgaaagagggatagaaaaaaggaagttttttaaaagactccctttatggaagtaggatctagtgatgctaatttagattcaatatctgattctcctgatggttctgacaacaaaattgctaaatatgtttctgttggaaatattttaccnnnnnntagatttactaccatgtatatttcattaacatcctaatatgaattctttaaaacaatgaaataaacacat

SEQ ID NO: 114669 - DNA, 1295 bp, Cannabis sativa
ataattaaattcataaataattctaaaaataacagaaattagtgctaattgcctttactaatccaatttactaaagcggtcattacaatgctaatttactttggattacaaaaatttttgagcagaagctactgtcatagcatgttatctaatcaataggtgcccctcatttgcaataaacttcaaaactccaacaaaaatgtagtgtgaccatgttaccagctatgaccctttgaagatttttgggtgtgtggcctatgctcaccaaacaagggaagcttgatcctagagctaggaaatgcatcttcataggataccctgatggtgtgaaaggatataggatgtggagcatagaagagagaaatcatcaaaatattttcatcagcagagatattgtattttattaaaccccatgtacaaggatccgtcaaagggaaagaaagtaaatacaactggtaattaaattagaggggaagttcagattgaggtggagcaaactgagaaaggtcagatggtagatgaaacatttgacaagaggttgaacaatgagctaaggagttaactgatggagaatctgaccgtgatgtggatcatcaaggctatcagttagttaaagatagagaaaggagagacatcaggccacccaacatatttgggtatgttgatttggttttttatgctctaaatatgttagaacttgatagtgaggaaccttgttcctatgaagaagctatgatgtctatctataagcttcattgggattcaactatgcagcaggaaatggtatctctaaggaagaatgacacatggatcttagtaagaaaaccagcaggatgcaaagtgatcagctggaaatgggtgtacaaacacaaagagggtatccctggaattgaagaagctagcttcaaggctagattggtagcaagaggttttacatagagagaatttattacaatgaagttttttttcttgttgtaaaacacacctctattagattgcttttgatcattgttacaattgaagaccttcaattagaggaactagatgtcaaactgcctttcttcatggagatttggaagagaaaatctacatgaaatatctaaggggttttgaagaagagagaaaggaagatcatgtatgcttactgaaaagatcactttatggccttaagcagtcttttaggcaatgctacaaaagatttgatgaatttgtactgaaaattggttttaaaaaaagttcttatgatagcagtgtctatgtcagaaacccggtaaacccgctcgatgttcagccct

SEQ ID NO: 114670 - DNA, 2889 bp, Cannabis sativa
  modified_base (56)..(61): a, c, t, g, unknown or other
  modified_base (1511)..(1511): a, c, t, g, unknown or other
  modified_base (1975)..(2001): a, c, t, g, unknown or other
  modified_base (2844)..(2850): a, c, t, g, unknown or other
gtcaatatcgttattggtctaattcagtatttggtcctatataatttaatataatnnnnnntagggagtatcgctaaccaatcgcaacgcgacatatcgagaagatgttacgcactactggtgcctaataacaatatgctcaattatttatgtatataattaaaatgccctttttgaaagtttccataattttgtacttccaataaactttgaattatgtaattttcactagaatgaaaatataaatattcagctatataattttttcttacaattatttataaattagaaattaaacaaataaatgaataaatgaaataatgaaataatgaaataataaggagagctaataaatgaaataatgcatacatgctaacctcacctagtttaataaatgtgacaaaaaatataacattttaaaatgtaattaatgctattttttggtgtaggttgccgacattgtatcatatttagatttttttttttaataaaaataaaaattagcatatgtagaaaagtcagtaggtagtacaaattaacttaggagttgcacattaatttgggaaaatgaaagtaagtgagagaacactgtcccaaaagccaaccactccattcataataaaacgttgaggcacacacaaacacaaggctgtcttgtcttgggtcattatttgtcggactcctataacaacacatatatttatgtaacaagaccatcaatattgtaagagcatatggggcacctagcaacgtaagacgtcgttttgcgattggctaacgatactctctaaaagctattatattcaattatacgggacacgatattaaattagacaaatagcaatattaacacgtaggaaagagtttgacaccactagtgtcttttagcatttctcatattgtaagattgtgtgtgtcggatttatattttttttcgtactttaaaaaaatggactatgttctactgtgccacaaaaaaatataagccgtgtcgtattaatatttttaaaaagtaggcctaacacgattcgaaaattcagtattttcgtgtcgtactttgtttgtgtcgattcgtattttttaaacaagctagcttattttcaaatccgaacataaatttctattttatttttttatatttttttactattaaatatattttataattttaattatatttatataaagtttgaataatatttttcaaataatcttataaaaaaaaaattaatatcattaaaatttatttaaatatctatatatatttataaagctaaagtatgaaacggtgatatggtgttctaaaatgaatttaaattttttttctctctttaattctccccattaaacctatttattaattaaaaaaagaattataatattttagtcatttttttaatttttaattatttttcacaaataaaaaaataaaatatcattaactatatatacatacctttaaaataagaattaattactttaaaccctacattatatatatatatatatanatatatatatttatataagtttagctcaaaactagctattttaattattggtatttttcaatttcttcttagttttttagtttttttctacatttgatattattatttatttttttttttttgatgttatgattacatgagataaggacaagaaaaatgtattgtgtgaaaattaaaatatttttttttgactaggtgaatatatatgattttttgaaaaattatgagtcatatacttagataattataatgtatggttattttctctccttataatgtatatacaatatattaaaatgtattgttagtttataattgttataaattatatattttgataattaataattaatatatatatataaaggagaagtatgagacgatgatatggcattctaaaattacactaaaactattttttttattcattccttaattctctcaattttaatattttgttaaannnnnnnnnnnnnnnnnnnnnnnnnnntattattttaataatttttctatataacaaaattataaatctacaaatcgatattttactattatttaataaattttctataaaagtataaaaaaatttaaaaaaattgaaataaataaataaattctaaaaaaaaaattatttaaacttaaatcaaatataatttattgtaaattttatatatatacatacatagaatatcattcatctatataccttaacgttttttaattttttttaaaaaaaatataataataacaataatagatttataggctgtacctcctgatgcaaatcgagcttactctattaaagagggttacaaacttctatgtccttcttatccaagaactgattggcagggaagagtgtggaactggctatctattccaaaacatcaaataatttttgattagtggtgcttgacagattaaaacttaagacttgtcttaatttaccatttcaacatatgcttggatgaaatttgtcgaatgtgttggttggataaagaaacaaaggaccagcatgtatgtttcaattgtcacttaactggaattcagctaacaacactgttcagggactattgaagtggatttcaaaatctaaaatcagtaagtttcacaaacaggtttttttcggcaactttggctgctgcaatatgccatgtttggaggtgtacaaatgaagcattttagaacaacaaagtatatataattgactcgattgtaaagagagtaaagagtgatgtaaagaatagaattaaaggcgtaatgcctaagaagatagctcaaaaagatagagattggtttcaaatattgagtttgttaaatttaaggacttttnnnnnnnttcattcaattttactgtttcaggtactaaatcatgctc

SEQ ID NO: 114671 - DNA, 1441 bp, Cannabis sativa
  modified_base (1388)..(1404): a, c, t, g, unknown or other
aaagccaaatttggcacaaaatttacatctgtaatggtcttacaaattctcacttccagctaagtttgtacaagcaaaattcagattataacaaactatcattcaaagaccagaataggaaatattttctatgcaacaacattatgtggactgtaaacaattaaactgtgatgaagctgatgctacactcttcaaactcttacaaaccccttaacaattgcaagtgcagcagaaccaaaaacaaagaaatgctcatcaagacaacccttcttggaccttgcataagcatatattggcatctcccttttgctctatgctcagcaatcaccaaaaatattctccgaccataataatcttgtgcaaaacacaatattgagattgccattttgttttcggacacgtgctcactgattttctcacttctccttcttggccaaggcttctgctttgaactcactgccagcactgaccacaaagcctgcaccgacctggaatgcagtacaattatgtaagatacctattgcaagtctacataaaatacagagagagagagaaatctaacttggcaatctttgagtatgacacgctcttggagttgtacattgctgcatatcaccgagccttgaattgaacaaccatctccgattgtaacatgattcataactattgagttaacaacctgtacatattcaagaaaatgaaaagtacacagaaattataatctcgcgtttttaggaaattatattgaaataacaccattgatcccctcatgcttataaactaatgaaggataagaaatatagaaaacaaattaagcttatcccttaaacctctataatcaagaaacccttgtaccttcacattagagcctatccgacagtgacggccaataacagatcttttaacgctgcacttgtcacccatttgtgaaccttcccctaacatacattgtggtcccacctaaaatcattcaaacagatcatgagtacaataataatgaacttaacttgaaattttgttgtaatgacctaaactttccaaacacattatactaacattgacttgtattcattttcaaagcaaatatttgcataggtgttgaactcacagttgttttcgacccaagctctgctgaaggatgtattatgttatgatgggcagataaagaatacccagacaaatgaatcttttctcctatgacctgacatagttagagaaaaacagaaagaaatttgaaactagaaactgcttgaacccaaaatgcagtcaagaaaaatatatatttgtgtgtgtgtgtgttagagagagagagagagagagagagagagagaaacccgagccagagccaggttaaatgattacatcagaagagagagagagagagagannnnnnnnnnnnnnnnnagagagagagagagaggaggggggggggggggggggg

SEQ ID NO: 114672 - DNA, 1738 bp, Cannabis sativa
  modified_base (1611)..(1616): a, c, t, g, unknown or other
ttgctcaagttaataaagaacactttttattcaaaaaataaaaataaaataaaataataataataatagtagtaatagcactcatttattatagagtattaagacatacacatacaacgtaaaaatgggcgtaggccacatgcaaatgctcccccaattttaatgttatataaattggacccctaaaattctagatatattaaaatcattatgtatgcattaaaaataaaactaaaattggaaagaattttatcaaataaaataacaatacaatcattcattatttttacattgtacaactggaaaatgcttattttttttagctacaaattattatgttactatttcaaaataagaatatttgttggaaaatcattattaagagagttataaccgtggagtttactctgttgaataatgtgaatgattttaatgaattgtttttcatgccatatgatatttgacttaatggtaataataataatatagggtataggattaaagcttaaaatctttgttaattaggaatggtcaaagtaaaaaatgcaaattatgtatgtttctcatttttaatgtcttactcacaattccttaaacacattccatatttcataaagcattgaatatatactataaatttcaaatcacacttcttaaggtctagtcatccgctataattaagttgaaatgactttaattatttatttttacagaagttgaatgaaattaatttaatacaaaaaatattaacatacttataagttatatatatcctagagtaaatagcaacataaatatttaaatatcttaagttttttttttttttttttttgagatatttaaagttttaagttaagcgacataaatctaatagttatttttagcggcataaatacttaaatatttgtaaaaaattattattttcatcaatactaactccattttaaatttattaaaagaatatttagaagtaactggtactacatgattctgtctaaactcaatgatttagaatctgggccttatatatactctgtttaagataatagcagaatctgtactgacgaaattagagaaaaattacagttttgtaaacatccggtactcatgccgctaaaaataaatattaaatttatgccacttacaaatttaaaactttaagtaacgatttatcttataatatagacccaaaaatatcatgacattttctcaaccagttgtagaaatatatcacatataaagaaataggggattgggaccttgggtatcatcatccccatacccataacttggatagtgatttttatcaattttatacaaacatttcaaaaatgttagtgtacaatatttattaggggcaccaaagaccattgtattttgtaatgggtttaaaaaaaagtcacaatcaaatttatatatatatataaatatagggcaaaattatggtaggacctagcaaaagtttcttaccggtagggaactttttttgatcattaattttagatcatgtggttattatgatgtaaggtgtatactcttacgataggactgcttgtatacaattaaaactttaaacatattataataatatttaattttttttttttaaannnnnnatattaataattaaaaaatttataattttttctcaattattattttttaaaaaagttactttgaattatttttatattggtatttatttttaaaaaagaattattttttctaaactcatttt

SEQ ID NO: 114673 - DNA, 2268 bp, Cannabis sativa
  modified_base (35)..(42): a, c, t, g, unknown or other
  modified_base (2235)..(2242): a, c, t, g, unknown or other
gcagccagagtggcatactcgtgtataagagccannnnnnnntgggtgtaagggcccaatggaggcctaaagcggggacgttacaacctagcaatcattccatgaagctcatggatatttttttgggggagacgaaagacccccatcgtgtagtagggtattgtttggatgactgctttaataagcacttctttacccgccgctgacaaaggcttcttttccagcctctaagcctgttccacacccgctttttaattgcatcaaagagctcacacttcttcctttccacaaagattgggatcacaaggtacttataagaaaacttcaccttcttgactccaaataagtcaacacattctgtttttgaatcttcattaaccaacttcccaaagcacatttctaatatcctgaaattgatagtttggcctgaggctgctttgtaggcagtaagaatcttcttaatttggtggcattcttctctgttagcttccacaaaaaccagactatcatccgcgaagaataggtgggataccgacacacgatctctaccaaacttaagcccatgaataagacccttctcttccgcatccaggattaagctagacaaagcctcggcattgaaaaggaacaaaaatggggataagggatcccctggcgtaaacccagctttggaacaaactttctagtgggatccccattgatcaaaaccgaaaaggacaccgaggaaatacagtttgagatcttcttaacccattgactatcgaaccccaattttaacatgactgcctcgataaaatttcattcaactctatcgtaagcttttgacatattaagcttgaaatccactttagatccgaacctgaattggttccgtttcatacagtgtattccttcaaaacctacaattgcattgtcttggataatacgatttcccacgaaggcactttgaaactctgagattacctcgttcaaacacgtcttcatacggttagtaaggcacttgcaaatgatcttgtagacgacattacataagctgataggacagaattcttccatctttgtcgatttatccactttgggaattagagcaataagagtgtcgttgaggtggtccataggagcattgttattaaggatgttgagacacacttgtataatatcccctttagtaatttcccaggtattttgaaagaaaagagttgggaggccatctcttcctagggccttcagtggattcaaggagaagaccaccttggttatctcatcctccgtgaacgccacaaggagatcactgtttgtgctctctgaatctttgctttttaccttatccaccacatcgcttatcatcatctcactcgagttaatagacgtaaaaatattttagaaatactcacaggccacctcgttgatctcataatgctttttcttctacctaccgtgctaattcatgatcccaccaatcttgtttttcttctttcttactgtagctttatgatgaaaatatttagagtttttatccccacctttcatccataaagctttactacgctatctccaatacctcttatgcttctctaaaatggcattaaggttgttttctgcgccttttagtaatccccaattaccagcattcatacttttgggtagatcatccaccctcttcatgccctccttcactctataatgcaactcttttttcttcttggtattccaatttctgcgtcttttagtaatccccaactctttgtattcccaatctgaggagcaggggtccaaagagttcaacccatctctaacaatgtcaccacattcttcttcctctgctcaagcctctttaaaatgaaactgagagtgttgtttcttcccattgtcatctgagccaccttcaatctcagtatctagcactaaggccttgtggtctgaacaccaccattccaagtgaaaagctctaagatttggaaagagattaacccaatctaaattagccaagcatttgtctaatttttccaacatgaaattcgccttctgaccattgcaccaagtaaaggtattgatatccttagtaagatcctcgaggtcacactcctcaacaactttcctaaaaccgtccatagcagacaaatttttctccctacaccaaggaccactgacttcatcactgagtcggtgaagcgtagcccaaaagttatgtatttggcttctaaccggatcaccatactgttgggttttatgccnnnnnnnnaactccatttcaatgtaatctatttt

SEQ ID NO: 114674 - DNA, 2900 bp, Cannabis sativa
  modified_base (27)..(33): a, c, t, g, unknown or other
aattatgttatatatatatatatagannnnnnnagagagagagagagagagatacttaatcacggtacattttattttattgccgttagcatttatttaaactaaattatcagaaattttgggcgtgggaatagctattaaagcgacctttttcttgagaacaaggccaaacctgtcagaaatttcaagctcagtatcattaggtaatttccaatcaaagtggtgcaagaaagaagccaatgtatagagagacatcttctcccctaaagaaactccaggacatattcttctccctattccaaatggaatataatcggaattgttacctgtcaagttataatcaacattattacccatcaagaacctttctgggataaattccaaaggattttcccaaaggctaggatctctttgtacagcccatacatttagaaaaatggcactccctttgggtatagtataaccaccaacaatagtagtttcttttgcagaacgaggtattaaaaatggcccaggtggatgtacacgcaatgcctccttaaacacagcactcaagtatgttaatttgggtaaatgagactcttctacgatgttgttcaatcccacaatttgtttcagttcctcattaactttattcataacctttggatgcctcagaagctctgtcattgtccattctaccgatgttgctatagtatccgtagctgccacgaaaagatcctgtttaaaaagaaaacaaaaaacataaaaagtccatttaagaaatattgaaatttttgatacatagggtataaatttaaaattatgtacgtaccgtaagtacagctttgatttcgggtatggtaatttgagtttctttatctttattttcatgatgacgctccacaaggtacgttagaaggtccttgtatttggattccttgactatgggactatttttactattcaacgctttcatctgcctagcaatagcattatcaaacaccgattggaacactttattaaccctgcttacatttcttccaattttctgtaaatcgaaccacttaagcaatggaaaaacgtcggagatattaggtttgcctagcatctcaacgagttcctctgctgcagcataaaacagaacagcatcaatagagtcttttccttccaaagaactaccaatcgtcatgcttataatgcaacgaattgtcccttgaaacgtcaagagcccgatattaattggggtatcaatcttttctttgatgtcttccactgactttctcatctcttctctcctcagccctattagatcatccatcactgtattacttagcatctcacgaaccaagatctttcttagcttcttccaatctggaccatagtcttggaaagcaatgtcgtgtccaccttgactgatgattgtggaagcaacacccatatcacggttggcaaataatgtgtctttttctttagccacttgggagactagctcctttgaactgaccactacacatagttttgttcccatccaaaacttgtaaattggaccataaacatcaaccaaagctgctaggtctatgtgaaggtcctcacccaaataaggaaggtatccgacgagcggccagccacggggccccggtggtaggggccgagccaccggtgccgatgataacttcttcccagtccatcggaaccatattaaggcaaaagctgctacagagaaaagaattaagatgtcaaacacttgaagcccaaaataattgactaagttattcaacatagttttcagttgttggttgtaagtataggtgtgtgtgtttattgtgtttgatgagaagaactttgtgttggaagaactttatatagagagattaaggacgccaatttttaacagagtattttattatgtagtagatggcgtcactttgttgaaaattattttttaatttcattattcaaatcctaggaaaagtaaaataatgtttcaatgcaggtctctttactcttgtcttcactaaaaaaaaaatatcacgtcgtccttgaataattaatttttttttttaggaaaaaaacttgttataattaattagttcaccctttcctacttttttactcacgaactatactatatcacttttatgacatgtattaattttcatacattgtttattaaatttgagaaaggaagaaaattcttctcaatttttatatgttatacttttttgttttctaacttaatttattttaattttattaattaaaaaaaaaaaaaaaaaaaacacatatgctctttaaaaatctataaacagaaaataattacatattctaataatagcaattttgtaaaattaaaatattttacttttattagttatgtaaataaaataatatgattttggttttctttccaaacaatttagtaaagagcataataaattattgttttcgattattttctattttaaatcgatacatttctttcattgattattctgattctaattacagtttattaaatgcgtcattaagtttttgctcattccctctaaaaaaaataacaatttgatgttgttgcagttaaaaatatatttatattattttattttaaaaaaaatttaaataaataggtaaaatttatttcaaaactaaaaaattgataaaacttagttttaaattttttaaatataaaaagtataacgtagaaccaagtatatacaaatccaaacaatcatagtaacattcatagaagttattaattttttttttttttaaaaaaaagtaaaatactaataatcaacattaaaattgaaatacaaatctatacaccattaatattaggttaattagtaatttttccccccaaactttgacatataccaaattatgtcccctgaaccttttttgccgttaaaaattcc

SEQ ID NO: 114675 - DNA, 4469 bp, Cannabis sativa
  modified_base (265)..(265): a, c, t, g, unknown or other
cacatagaatcgcataaaatcgcacaataacctaaaaacccagaaaaagctattgttcgaaacccatattcatcccacagttttattgcacaattaatcctcaaaaaacatacaaaataaaaactttcaattcactaccagattcaaccacaaatgtatgcattttaaaggataaattcaagaaaaattccacaaaaacttacctggattgctgtaattggggttcgtgggattcgactgggtctccttgttcgctcgggcgtcngtcgatggggtcgattggagtgggttcgtctaggttgtcgtgggttcaggggttcagttcgtggtctggtcgtctggtggctgtgggttcgtgggttcgtcgtcgtcgtgggttcgtcgtcgtctggtggtcatctgcgattggggtttgtgggtttcgtggtctgggttcgtgcgtccgtccgttggtctgggtgtgggttgtcgtgtgtttgggagagggaaagaaaagagagaatgtaggtagagggaatgtgggaagtttgaaatgagaagggtatttttggaagaaaagtgaaagattggtatatttttgctatgtgttataattaggtacaattaaacaccatgttcccttttttagcatggaatgtcaaatttcccttttattttttcttagaaagatttgggctcactagcgaacaaaggtaagtctaccatttatggtgcttccttgaaggatgaggtttggaaaagaatattggctggaatgactagttttatgagaggatctctactttttaactatctggggataaaattagcaacatgtgtgtaacaaaagttgattgtcaatgcttggtagataagttgatgcagagacttcgtcttcagaactccagaaacttatcatttgctagaaggtgtgttctaataaactctgttctactttctttaaataccttggtcccaaatagtgatattactaaagatagttattaagagaatcaatcaattttaccgagctttcttatagaagggtaaagttgattataaggggcctatccaagttgcttggactaaaacttgtaagactaaaaaacatatgggtcatggatttagagatgttgatttttggaacaaatgtgctatgggcaagtttttttgggcaatagaaaaaaaagaaagataacttgtgagtcaaatagatcgattcacaatgtttacttgaaaggaaagaattagtggagctacaaaccttccaccctagtactggaataaaattttccacaccaaattaagatgagctcatgaatgtgtttgttgcagtagacttgcaatgtaaaactatagtattgttggattgtacatattggttgaagaatttgatgatggcaggtggcactacactagtcctatttggggatcgaatagtgttccaagtataaatttattgtttggattactctgaaaaagaggctttagatcaaagatagactgatcaaatttggtttaaatattaatggtagttgtttgatatgtgggcagcttaataagactcgtgaccatacctttttatggctgcacttttagtgggcagcttaaagttcaggttcgagtcgaggctgaggccgggtttggagttctaggtcattatcttggttcgagtcggggatgaggttggggttcgggttcagttctgaggtcgagtttaggtctggggttccatgtctaggttcgagttcgtgaatgggtccaagtcgaggctgagcctgaggtttgagtttgggcattggctaggtttgtggctgaggtctgggtctagtggtctgggtctgaggtcaagtttagattcgtggtccaagtctgaattcgagtccaggtcagggttgaggctagggtccgaatcgaggttcaaagccggggtttgagtctatgtctgtgttcgggaaatgggtctgggtccaatattggggttcgagtcctgtacatgagtttggatttgggtcagggtttgagttcgagggtcgggtctaggtcatcgtccgacacctggttcgggttgaggcttaggattgagtctaggtttggttctgggtcagtctaggtatccccgggccctggggccaacatctgggtttttgtctggggtacgagtcgagttttgggtcagggtcaaagtgtccagtttaggtagggtctgaggctgacatttaggtttcggtctatggtttaggtcaaaaagtcaccaggtttgaatcatgagtcttattcatattggggtctcaaagtattcaagtatttttttagaaaataaataaaaaaaaataaaataaaaaccatttctaaaaaacaccaatcaaacgcgagttgtattttcaaaacttaaaatacaatgtcaaacatgcatggtatatttaagggttacacaacaatagaaatgaataaaaattaaaaataattagtattaatttttaatccctgaactttcaacactacttgattctgccatctaaaatatacgacttgctaaaaattcctcttaaaatataacagttacataatcatgccctttttattaggttctattacttttaccgtttaaaattagtatttttactccttgaactttgaccaatactaaaatttttcccctataatcaaaaaagttaatttcaaaattataactttctattagttatgaaaatatatatttaaaaaaaaatattcaaaaatctgataaatcaaagtattgaattaataaaaaaaatatatttagtttactaaaaaaaaatttaaattatccataaaaaaatattttaaaactttattttgtttataaacacatatcttagaaaatcaaaccaaaattatatattgaaaatcaaataaataatttaaacaaactaagatttttgaagaaaagatcaagcttatttgtgtttacaaattcatatcctaaaaactaaagaaacataaatagaaatttaataaaaaagtagaaattatttaaaaaaatagaaattaaacaaaaaagaatgttacgtttatttaaacaaatctaaatttttagagaaaaaatagactcaattttgttctagtaaaatttagttgatacaaaaattgaatttttaatataatttttttttatatatctaaatagatttttttatcaaaaaataattaattatttaaatcacttaatttgtttaaattttttatttcttttttaattttctcaatcatttaaaataatttttttgagatctaaaatattttttaagatttaccgaaaaaaaaaaagaaatgttgaatctttctcatatttatttggaggtacaatttgatagtcgttaaagttttgggagtgcagtttttaatttacaaagacatgtcagtatttaaatgaaataagagctagaggtcctcattgatgcggttgtcaccgccccaacagtcacgagcatatatctgtgatgacaagtaggggaggtgagaaaaccaacatgagtgaggggagtgttatgccaatgtgatcacttcaacccaaatatagctagggaagctgatcgatcacgtcagcccaaatgcatcaagggtgtctcgagaggtataacactctaaaaactattttcttaaattatatgagactcgatacttcattacacttggtataacaccgaaaaagatattaaacatccttttaacaattctcatttacttacgatcagatataagaaaaattaatattataatgtataacattattcattattgggagtgcatgcacagtaaaagcactcaaacaaatctttattattatttgatagagaagatatgtatttattaatgttggagttaaatttggattggagttgtaattgatttggctggaagctttatataaagcttgtaattaattggattgtatagttgagtttataattgttttgtgattaatacaatatttatagagttttaaaaaaaaagtttggattggagtttaaaaaatagaattaataacggtgaatattttgaattaataaatcatacattgtaaattaataattaagaagaaaaccaactaacttgtcccattaaaaatgctaatcctcataataaataaatacattataattattgtaatcaatacacatatatatgtaatgaggtcaatcttccgacgtgggctcattcaatattcatgcatgcatgcatgcatttttgtggttttgtggctatattgttgttattcattttgtctaaatatatatcatatatatgatccaatgaaaaaaagtaagaagaagccttatacatacaaaagaaaataatagtgagtagtacatatatatatataggtgagttgagtagctagctagtattaattaattggaagcagttttgttgatcattccagcagtgaggggggatgagaatatatgaatgtgatgtgttgtttggtgtgtttgaagtagacatta

SEQ ID NO: 114676 - DNA, 5381 bp, Cannabis sativa
ttgtttagaagtctgggacatcgttcttcctgatgtcccttctcattacaatttgaacataaaagagtatgactatcaattgtacttgaggaagaagcatagttagaagcttcattcttaattcttttcctctgacaaaagtttgcaaaaccaggaggtggcattgcaatcatattccattcatgagctcgcaattctgcttctagcttatccatgttggaagagttaaaattgttgatcatataagatacaacattcactaccgtggatttggctcgggagtaggcgtaggacatcttcagattgacttgcacgggaaaaagttaaagcctgcattggtaaaaagacaagataaaaataaagaagaaaatacttacgcgagctgcttcctttaggatcccacccatcactagctccaaggacagctcattgtctgccccagaaaactgattgctaacctcgaggagttaccgatcaaggtaatactggagcatgcccttgcctttctcggcctccaagctcagcaccacggtagtagaggaggccttggtcagatcagatccatctgagctcccccctttcacactttttgatttgggtaccttctggcgtggagggtccatagcaggcaccacctcctcggagagctcaatcaccattttggccaggctcctctccttagacagaacctcgtcacctttggatcgattgggtgggggagtcaggcccgagctgtcaccagtcctcttcttcaaagcttggagcactttttgagacatggttgcatataaacaagacaagaaagttaaaggcaaatattgtgtaaatcatgtatcagaataaataaatataagttaaaatacactacacgtgagcaggagcattcacccgaacaagtaaggatgaagcctcatcatctgaagactcttcttattcctgctccgtcaggacgacctttccttttccctccactgggtagatggctagacaggtctatcaggttccttaatcctgataacacacttaattggtgcatggtcactcggaggaacctttttcccctttttgctcagtttttcctgcttggtcacttcgtcctagtcagactttgccttcttcgccttcttcaaagtcctcgagacaaagtctgttgggaatattttgtacttgacaaaattggcctcagtggccagaagagtaatgttccaagcagcatccgccagttgaagaattctttgtgccctcttcttgagccccaatgtgaagggagggcggcaatacgatggtatctgctggaattgagtgtggacggtgtccattcctttgatgaagtagtatgcatccacaaagtgccctatcttactcacctcagagtctatagtgatcgtcaaccacttctcctcgatctgagaaaagtagaaatatcccgacctgctctgcttgggacttgattttagaacaaaaagccggttggtatcatgcggggatggctcaccccatccttgtgaggtatagaggatgaacaagacggacaagtacttgatgcccttaggagtgaactgggtcgggcaaaggtgatagtaatccgcaaccctcctgaagtacggaagcaagggtaacatagcactctgtttagtgtgagtgcccgaccaagcgtagtacccctcccttggactagtcgccaactagttgggggaaggaaggaagcattcgacgttccctaagtaaccatgcttaagcagattcttcatctttgccttggttaccacggatggaggagaaacccaccgaggtcctagtacaccttgccttctcaaagggacagcctcagtgtattcttcagtgacatagtcttcactggcctctaggatctccccaaccttgagaaaagtagaaatatcctgacctgctctacttgggacttgatttcagaacaaagagccagttggtatcatgcaaggatggctcaccccatccttgtgaggcatagaggatgaacaggacggacaagtacttgatgcccttaggaatgaactgggtcaggcaaaggtgatagtaatccgcaactctcctaaagtacggaagcaagcgtaacatagccctctgtttagtgtgagcacccgaccaagcgcagtaaccctcccttggactggtcgccaacgggttaggggagggaaggaagcattcgacatcccctaagtaaccatgcttaagcagattcttcatctttgccttggttaccacggatggaggagaaacccaccaagctcctagtacgcctttccttctcagaggaacagcctcagtgtattctttagtgacatagtcttcactggcctccaggatctccccagcctcaaacacaggttggccctcttcatcaaagccaccaaagggcaacctccaagctgcaccttcctcctcagatttagaaggagtatcgagatggacctcgccctcatcctccatcttttggacttcaacgtccccctcaatgtctttttttcagcagcaggctgggccttctccgcactcggcattgtggcgagccgtgctacgcgtggttcaaatagagaagacttctgcacggtttgtttggttcgtgcatcatcctagtcctagacggagcctggttggtatgtctgacgatggttacggcgaatgtagcagtaagtttacctgcagcggtaggatttggacagcctacaagtaaggtgtcaattgtatctggtcaaacaatatatgtccagttggacggtagatagcgcctccaccccttcctaagctctcagatgaagcgtccgtagccttcacctttgatctggtcggggtaaaaatggtgttgtacttcaggttctggggaaggtgtatgttcactacttatctcccaatcttcgaagcttgaattggagaggctgtcagtagatgaagacagactaacacggaggcgaggatgatcctcgtatagaagttgaagtagatcttggtcgatatgatgttcgcttccccaaaactcacctaggttcatctacaaaaggtaggacccaagatgagcatttggctgggataacgaacgaaaataggtttgttatacagaccaagtccgattaagggatcaaaaatagaaattttgcatgataatgaggtttgcaatccagaatttcaaaatttctaattaagggttgattttcactaagccccgaatgggtaagtgaaattgaatatcatggaatcgaaattaaaatgtagttatgatcaagcaatgtgattaagaatagtcaagattttaaagtcctaaacctaaattttctatggttctcctagaacaagttcaagaactatcaagttttgtaatagaatccttgaaaattaaacattcaaagctgtaaaaggttgctcagatgatgctggcctgtgtttcctaaaaaatattcaaaggatttgaaagacaaagaatttcttgctctaattctttaaaagtgaaaatggctaaaagtggttgattaaggtttttagccatatttataagcagattagtgaggaaaagtaatcatttcaaattttaaatacctcaagttgccaccaaaagtgtacgttatgcacttaattatcagaagaataaccatcaaaatgtgctaattctaaggcgtggctcgaggttcatgttagttagcattaatgagttgaaaattgaagagagccttggtcaaagtcacattgggtcatcaaccgacacttcgaacacgtgccacccattcagacaaggatccagaccgagtgaagtccacgtgcgaccacaaaggtctcgcacaaacttgaggggcaaatgttatcccattttttgcataatgacgtggcagaatacacaagtgacacgtgtcctgggcagagatgaatgtcccgagcagacatcatattatacatctgcatgtataacttctaattacctgagcagggtgaagggcagatcatctgagcaggcatagatctggttttctgaactacttatcaggacttagctacttcagagtgatctcgtaaagtccaggcacgaagacaatccctacgatcgtgggattgagtcagaggaatatggcaacttgttccaatttcctattttgtgtatcataattatgtaatgaatattctttcctattttatacattgtaagaaaaaggaaaatctttcctcatgcatttaggccctataaatagtgaattagcttcacaatgaatgggatcgaaagaattgcttcagagagagatctaagagaattactcagagatttcattgtaagagctttgagagagaaaaacactttgttctttgtctcaggttaatacaatctaatgggagtaggctattaccacacttacagggccgaacctctttaaaatctggtatttttattacttatttgtttttgtatattttaattattttcttaattgcttaataattgacttattgtcattgcctaaaagcgaggtcaacaatatctatttaatttaaatatgaatttgagaaaattaatatcccataaaactctcttactttggttcaattattcaaaataataaaactattttattatttattaattaataattgggattgttattatttaaatttagaattcaaatgatagccatgatatttatttgaaattcaaattcaaataaatcccaaaataaacttaattatttactttaaataatttatagataatatatagtgtatataataaatatacgctatatattatatagatacattatatacatatatacatatatatataccgaatatatatacacatgtatagttgggtaacacaaacgataggaccagccatcaccatcagtctctgtggccagcggcttgacagtcacctgtccagcaatggccatggtggtcacgaggaggaggagcgtggggagatcgcatgatggtcggaccacccttgaacactatcaagttcatgccccattcgccgcccatgcacagtcgcatgagtccaatgggacttgactgtgcttgctccacattaaggcactcacgtccctattgcatgacatgcatgcatggttttcgcgtggccacggtacccaaaaccactcgggtggttgtgcatggcctgaataatattctcgagctcacttgcatgtgattttaacgtgcatggtcgagtttcaagattagaaactgagctcacatgttatgaacattacaatatgtaatttttacgtaaaatatgatttaaaaattacataaaaattttgaaatggcgggtttgcattatataatgtatttccagatgaattccggttagtcatacataaatgccccttaagtaatttaaagaatgaaactttgtaatt

SEQ ID NO: 114677 - DNA, 4796 bp, Cannabis sativa
aatcactgaaacagtaaaattgaatgaaattagacaaagtccttaaatttaacaatctcaatagttcggggggaatttttaacggccaaaaaaatttaaggagaatgatttactacatgtcaaagtttaagaataaaaattactaattagcctttattctaatacatttctctagtgatttattctaattctaaatattgtataacaaacgtgtcatcaatatagttaaaattatataacacaattttgttcacatgcagaatgatccaatgtaaaacaaaagaaaatgtaaattaatgtaatccgtacttttgcaattgaattaatttattttgaagtagaatatatattaaattagatctaaaatacaccataagtaaaataatcctgtaaaattggataaccctaattatgtcacaaaatatgtatattatgttacaaaatatgtataatttgagcatctctctatcattactttcttttttatcattatttaaattatatttattgccttattatgttgacattcatttttttttcttaataatatatgttatagttatttaaaatgatatataaatttttataaaattatgaatagcttattgccaaaaataaaagtttaaatattttattacatgtataactattttttttgtaactatatcaatttcttttttttagcactataactattcaaaaaatttaaaaaatttataaataattctaaataaatacaacgtacacaatcatgaccttacaaaaaaaaaatagacaatcatgaaaaaaattgactaaaaaactctcctagatacgaaaagagtaaagggtgtaccgaaatgctaattttaagatgtactatagacttaccctaaaataaaatatagaaaatgtatgttgcaccatctaaaaataggtgtctcgatgcacctcttcatattttctatagccagatagttttaatttttttttttgtatgataatgtacattgtagttaaagacatacccaattttttttttttaaaaaaatcagaataatttaatgtaccaaaaactaaattcaaacactttgttgcgcgcatatctttttttaaatttattttatacaagtgtgaaatagactatttttttttttttgcagtagtgaaatagactatttaaatcctattttttgtatagtaaattatttcaataattttcatattctgggatgtctcaaataattaaaaaaatacaccatcatataaaaaattgagattataaccattatcatatcaaaaatataaagggggtgcaacagtgcatcaattttggtagtgcaccataaaagcacccaataaaatatattttgaataagtatgaaaattcgataaaaacaccataaaatgattgttctgctacactctatttgttttggtattcaagagagtttttttagtcagttttttatattatttttgttttataataatgaacattgtagtgatttaagaatatcaataattttttttagaaaattctaaatagtttatagtgtcaaaaataaggttcaagcaactatttaccaagagtataaaaaaagtaattgtaacaaaatatttgtattttatttttagcactataaaatattcaatttttttattttttattttaaaatttttttacatgcacttctaaataattacaatatctacctaataattataaatagtgtgtgaaacaacttttttggaatttgtttcttttaataaaatgttttatacataggaaaaattagatctcaaggtcattatataggatgttctctagtattgaagacactaaaatcataccaattaagttttagataaaaactcacttaaccacattacaggcaacaaaatttttagaaatctttgaaaaattacaaaaattagaaaatatagttatcaagccatctagatgaacaaaattgatgacaatctccaaatatctctcccccaacacaaaatcgcaacccttttgctattgcggcttccaccgcaagcatgcaacttcttttccaatgaggggatccaagaaaggaaaccttttgataactgccttacaaccgtaccccaatggttatgagccaacaccgccacacacctccctcccaacttttacatcataattaaataaacttttttagttgttaaacataaacataccttagaatataaatatataatttattttaatttccattacatgtgtgagaaaattacaactagtgtacagaatcaaatcaattaattaaaaaataaataattagcaatgaccagattaacaaataacacacaacaaccggagattaaaacagggatgaactaagcatctaaactagaaatgataaaagcaataagacactcaccaagatatatactagttcaagtcctatagatcgatgtgatctatggctctactctaattttgaaacaccaccgaaatcctctttattgattgagaaagaataagatgcaatattgttgagatcaattctttgtggattctctcgaagtgtttatctctcacactcttacctaagattcttcttcatctacaaaagattttttatacaaaacccaaacctaatctctctcttttctctgtaccactctctctacctctcaatttctctctctcaaaatttacctctcgaaactcatatgatctctttctttctctcatgaaaatgctaaatgatggtggaatttacaggttcaagatatagatcctaaaggcggtggctataaatgaaacttgttatgttagttatgacttaacaaacttaacaagctcctcataataatatttccacgtcagcacaaggagaagagctcctggatgagacgtacgctaaagggacttcccagataggaaaggcaacagttggagttggctatccaaaactcccttccaggagagaacaactggccatccagaacacctttccggagggaggctagctttcttgatgactccttccaggtggacatgatagacatccgggaattgacatctatcattccatgagacttcttccggatggacaagttagacttctagaactcccatccaaatgtcatttaattttccataaccagaacaacttttaaagatcttttcatttagagaaactataccacaaccccatttggctaagcttctacttttgcttatagctagaagtgtaagataagaataagtttgtattgtttttaccgtttcaataactattacataaagatcttttttcaataaaaagtacttttaaagtgtttggatatcattaaaaaagatcttttgtgaattaattaggaattatgtaaattattttaattttgaaaataacttctcaaaaatccttttgagagaagctacaaatcttagcttcttcctggtatccaaatttttcctcaaggtgacacggcatccatctgggtgacacgtggaacacatttcataacctggacaggaaattctactcctagtgaaccgtataggaagatttaatgcttaaggtcacaaatagaacttgtgacatccgagcagagtacgcatagacatctgaccaacttccatcaaacaggcggctcacatgaatcaaccaggggatgcgaattagcaattttagagatatatcatatatatcttcatccttgtagaacacaacattatccctgaatttgtgggatagattcatatcattaaagaagaaaggcagcatgcctagtttcctattctacttattgtaattatagaaaataaaccagttttctattttatttcttactaattttggaaaattaatttaatgtaattaatccttataattaaatagtggactcatctcactattctgagggatgaattttatttagaaaaaatactcaagagagaaatctagatttaagagttaattactcagagatcactgtaacagctttagagagagatcaaggcttctttgcttttcccgtcacaagataatacaactaaatgggagtagactattaccactatcacggggccaaacatctataattttggtgttttctttactttacattatttatattcagttatttaattatttgtaatggcttaaatttgactcactatagttggctaaaagcgaggtcaacattttagtactttcattgagagcaaaaaacacaagtctttgtttcaagtctttttcaagacataagatggttgtacaaacacggaggggaaatcagattgaagtaactaatccaatggctacggatccaaacgtgcagaaacttacaaattctagagatccaaccaggatggaccgcgccttgactaatccttagccaccagcagatctttaacccttattcctttctctcatagagtattatcaagatctaagcccgattctccttcaagtgttggatttttcactgtcttacacactattattgagtacttgatttgctatgggtgggcatgtactctttcactattggtttgaaatttatgaagaacaataaagggagattcaaaaatagtagaggaaaggaggctcttaaagtttctagttatctgacagaatgtaaactaggttataaaagctggatgagaatgagaccatcttattccttttatacttttcacctagggtgaggacaaattagggtaaatactatattttggaccctgtgttttgcaaaagttactaattggaccctctgttttgttaaataacaaaatggaccctctgttttctaaaatagtacaaatagga

SEQ ID NO: 114678 - DNA, 1202 bp, Cannabis sativa
tttttttgtatttttacagaattccacatagaaaggaatatctatagtaactaatggagcaacttaaatcgcaaccaaaattcgtatagcaatccacataaaaaccactgaaaaaattaacgtaacaacttaaaccgtaaatttgaaaaaaagaaattaattttaataatttcttttttctgttatatatatatatatattttaagaatataagaaaaacatctaacaaaaaggttgttggttattaaaaaaagcaaaaaggttgttgggatatttattcttagagttgttggagaattattattattattattattattggtaaatggtaaaggttaaaataataatttttggaagaatgtcttctatccaataagaaaatttattatgtatttaaaggtatgctaaaagttgcaacataagaaagaaatatattggaaaactagacaagaaaagaaaatttctaatttgtgtttgtgtcccatcaataaaacatttataaaaaaaataatagaaataagtggattaatatcaaatatttaatacatgtgtagtatttttcatattagaaaaaaaatattccaataattttatgatggaaatggtagaatttatctataaaatcttctttgctgagagtgtcactatgatattcgatattttcttaaaccaatacgatacctcttgtggaattgaagttatttgaaaaatgttttatcataatcaaattcaaagcttaataaaatcataacgatattataaaataaaattagtcatactgatcttataaaactaaattgaacgtcttacacacattgacattacgaaccaaaataaaaaaaaaaaaaaacattaattgaaacttaaactaaaatgttttaaaatgatttaccatgatattactttaatgagattattttaatccttaaccttatatgaagttgatctttcaattaacatattgcttgcaaaaatgaacaaacaagcaaaatacaaataatatatgaaaggatggtatcttttattttatatatataaaaaaaaaactctttaaatatataaataaataaaactacaaataaaaagttagactaaaaaaacttttaaaaaaagagtgtagataattttagttgaactagctgagctatatgtatatttttttaaagatttttacacttggtgtccttttttttttttttttt

SEQ ID NO: 114679 - DNA, 1106 bp, Cannabis sativa
ttttaataaaatcaataaaaattaatataagttgaaatatttagcaaaaaaaaaaaaaaagacgggttacatacatataattacacttatgagtatgatgccacaatggatacatggcaacatttcttaataagaaatttgtggtgtgcttgttcgtacgtactttcacattcagtgggtttattattatttttattaattaactaataaatcttgattggtgatatgtctctatttatcgaagaaaaaactccaacatatagaaataaaagccttcaatttcaaaattaatgagcaatttattaattacaagtttttttttagtgaaaagcttttaattaaattgtggcttcaacatggttttggttaatacgagtcaattatacactcccaagtcaagatttcccacttgtttctaagtactccattgtccccattttatatcatagtgagatggtcccattatatactcatatatgagtacatacataccatatatatgcatataggaccatatcatttttatgataatactattctgttgactttttaaacccattatttggacttcctttgcttattaaacattacaaagtacgcatctatatatattttcgtactcttttgtttttttgtttgtttttcatgctttggttttcaaattatttggacatatatttcaaattcaaataaaggcatactttgaagtttgaagtatatagtggcatatttgggatttgattttgatgtatatatatattttgttaatatgtggaagaaatgtttataaaaaaaaatatatgtggaagtggaagaaattatttgggctatggaaaattgaaaaggatatatagtcgatcaagttaccaaattatttattacatataatttgattataataatgaagatgggcagttaattaacgcggctgcttctgcggccacactacgttacacacgagtttacacatcatcaattactttttttatttttcttattttttattaatgtattatatttaatctaacttgggaaattttatttacatcccaaaaagttttaaaggcaccccattttgatattttttttattttatataaaattta

SEQ ID NO: 114680 - DNA, 2130 bp, Cannabis sativa
attattattattattatttattgtgagagaagaagttaaattaactcaaattgttagagttaattaatttacaagtaattaacaacaaaatagtgtattaaactaagtagaattttacatattatttggatgcaaattgactttaaattgtagataattaaaaataacacatgagactaaagttaaaaacttccctccaacatttaataaatactaaaagttagtgggaaatttatatatttttatgctaattaatgtgaggaaataatttaaatatgtcccctttgttgtgcacattaaaaaattatggtaatgcccctccattaagcatagactatatatgtttttaataagaaactcattttgaccatattaataacttactatacactaaatttctacaattccttaatattaaaaaaaaaaaaaagctaatttgatgaaaaacaattcttgtattatataaataataataataatgttcttacaaaagccttccaacaatatatatattctactacattattaattatcatcatgtttcaaagaaaaaagaaaaaaacaaaaattaaatatatagaaattttacaaaaccatccatacgtacacaattaatcaagactcaattaatcaaagaggtacagttctagcacttgaaggagcagtggcctctccttgatctccttcttcattttcaccagtcaactcttcaagtgatattccttttgactctggcaccaaaaatgtaaatgccattccaagaaagttgataacaccaagcataatcaaagaattcttcactccaatgcctggtgggtaaccagcttcggtcttcgatggatccttactttgagcggaatacaagaacccaaaagctcccaccattgctccagctttcccagcagcagctgatattccatgacatgtggacctcagccgtgctgggaaaatttcagccgggacaacaaatgttgtcgcatttggtccaaagttagcaaagaagaaagtcaatgagtacataattacaaacccgatatgattatctttttgagtccagtggttgtaaggaatagctagggcaaacatgaacaccgtcatgaaaaagaatcccattagttgaatggcaaatcgtcccattttatcaataaaagcaactgtaaaccaatagccagggacagtactacacaaggcgattagggtttgagctctagcgattttataaacttcttcaatggcattcattgtgttggcagctgggatccaaccgatggcgctgaaaatatctttttggaaaagattttggctataaaatgcgatgtctaataaaaaccaagttgtggttgtgccaacaagatgaagaccgtgtcgtctggcgaattgcttagagaaaagcccaaatgagtttttaccttcagcaagtctctctaccttctcaacatcagcttcgagctcgacttgtaacaccttggacatgtcggaagcagcttgtttagcgtttttagcaaccaatgctgtgtaacgagcagtttcaggcattttcatacgccaatagtaagtcaccgccgctggaaaagctccaaacatgagaattatacgccaaacatagtcggcctgatgaaccaacgatccagctctgtcgactaagtacgacggagcatcatattttgcgttgaaagcagctgatcatgacgatgatgacaatgaaaaagtattagcacaaaatttaaaatcaaaaagttcaaaacaaaaaagagaatgtacaaatatatttacttacttgagacaatcaaggcaacaattccacccccaagaattccaaacccttgcatggcgaaaactgcagcgataaaagcgccacgtgtcttcttgttagcgtactcagacataatggtggcggagagagggtaatcgccaccaatgccaaaccctagccaaaatctaaagaagcaaagagttgccatgacagccttagcatcttggccaaaggacagtcccgaggcaaccgaacatataaccattacaagtagggttagtccgtacaccttcttcctccccatcttgtctccaagccacccaaaaaagagttgaccggtcaatgttccaacaaaagcaacaccgtttacggctgct

SEQ ID NO: 114681 - DNA, 1331 bp, Cannabis sativa
ggagtaattaatatagagtttaaccactataaaattaaataatatatatatatttatgaaaacaattatacaagtataatgatgtaatattgtgagaacttgtgtttgtgggtatatatataaatataaataataaataaattattgtacaattatccctttcatgaggttcccctggttattagttagaatctttgacaacgttacactgaagaactgaccaaataatgtcctaaggtagttagttacaatatcattatattaattactattcttttatagctaatcacacctacatttttgctaaaataccccttacttttactctaattcttcttttattaacccttactttactttaattaatataaatgctcaaattagcccactactttttgttaataacataaacaccttacataattttatatatatatcatttctctctataatttatagaccttaactcataaagtggtcatatagaaggtattgaatcctagttatgtaactcaagaaatgtgatattaagatgcttttatcaaaaagtataagagtatgagctggtttgcaaaattttagtcaaattattttattttttctaattttttttgttgcgccacataaacacacacaaagaaagacaatgaaataaggaaaaagactcattaatttttttttattttattttacaataaatctattttttatatataaaaaaaaaaaaatttataaaatagaaagaaagcaagcgtagtagcaacaagggatactaactccccaacactaaataaaagaaaaaaaaaagttaggttgcaaccctatgagaaataatattagaaaatttagggattcaacaaacaaaaaagaattggcatccaacaagctagagggagagggagaaatagaacaaacttcgcaatatgagatctttctctgcagtgcaaactgaaggatttggcgatttgtgaaaaagaaaacactcgaccaagtctttgactgacaaagagccatcgcatggaggagagcataggcatcaatctcaagaggagaggagacgtgaaacttcacagttaagtcttccattagataattatcagcacgaatctttgaacatgcggttgaatatttgaagctaatgctaacctgcaaccaatatttttagaaaaaaaaaaaaaaacaaaagaatggagatttacttttataaaaggttttgtttcttacaaaccaaaaagcaagaaggactacactaacaaactgggcttgattggtttgaaaaccataaatttaatgtttattttaagcggcataagtaccaaatgtttgtaaaa

SEQ ID NO: 114682 - DNA, 922 bp, Cannabis sativa
  modified_base (42)..(45): a, c, t, g, unknown or other
  modified_base (873)..(889): a, c, t, g, unknown or other
aaatgttatgtgttttaaaaaaaaatattaagtatatgtaannnnagaaaatcaaatttcccttattaaacaaagtgagagctaattttactaaaaaaatgtgcaaaactattagcaatcctgtgatgatattaaaaagaaaaaccattaaaattattacaatgaacaaaggtgtccctaacaatacaaaataagtaagactgataatcttattattattaagagcatgaataacaataagccaattagacaccaactccaccttcagatgaccaagacgaatagcaagcatgagaccagaataaatactcaaagtttgaacaacaatagaagagaaacaaccattccaagtccaagtactaaaaacaagaacagaacctcaatcatcacaaataatcacctcagcaccaattttatcaaagtcactatataaactcatgtcacaattgattttaaccaccccagaagatagtttttggaccatttaataattggcttgttgtcaacaatatttttctcatgagcattagaccccaacaattagcccaacttgaaaggttacaaatagcccatgctccaatcaaataggtggttatcatctaaacaaactttgtcactcacccatttattttgtctatacgagattctccaaagacaaacaataaacttttcaaataaaacatataatatattatccaaataaaaatagaagaatccataattgtcccacataaaaacataagaacctgcaagtaattggtaatagtgttacgaaccaaagtaagattgatgcatccccaaatagcatgaagtgatgtttcggccccaaagaacaaaaaacacaatataatagaacctctatttaagaatacnnnnnnnnnnnnnnnnntctaatttgttataaaaaaatcaagtcccgatt

SEQ ID NO: 114683 - DNA, 864 bp, Cannabis sativa
gtaaaatattcccaacagttatcacttgcttgactcttaaagcctatacctctcgcttcctaagactaattgttgactaatctcaaggataaaccctgttgattcttgaggttaagaacacccacgtatcgaaactgtgagtattcacccaaattggagaatactcaatatgaaaataatgattactataatataaacaacaacaatataaaaaacacatggattttagtggtttttttgtcaaagcttggtctgcttagtctacttttgaagatcttatgattaatcttattcagattagatcattcttttatataggaagtatgtgatcccttagtttacataatcggtcagacaagactgttacattattagttacatttaattcaaatgaaaaaatttcataaaataaatgaaaggacattttcttctattctcaatcaatatttgaacagttgtgactactgtaatcgcacattgtctgttcacattctgagtagcatatgaactcacaggttcagtggtgttactcacatattgggtgaccatttcagaaacgaataaacctcttaggactttattgatgcacaaacctatttaggtttatagaatagaacgcctacgactatatcggtcgtgtattgggcattcatgtactcataagatagaactttcgggttttgaatgagttgttgtgcacattagtcattcggaccagacgcttgtgaagatgcggtttagggcatgggggagaaacactttgaaatttcgtattttaatatttccagttttattatttaattaaatgttcaattaaatgcggaataataaaactagtattgaaaacagtttttctgtagttac

SEQ ID NO: 114684 - DNA, 1730 bp, Cannabis sativa
tgtacagtttttcttcaatatgtccactgcttctatatgttagtttaatgttattttgtctttactttgttcaattccatcaatcttacaatcatagctaaaccctgaaccagtaaaacccactttagaaaatagtgttggttctcggtctacttaagacattttgtatttgtccttacgcaaaaaaacagaaaactgatgtttaagataggccagttgctcctgcaataaaatgtgtcactcttgacagtattccggttttgtgtttggtttttcttctcccctgatccattccagaaaatactaaaataaatagaggttgtggtggagtattgttcaaaggctttatctctaggccctttgcatatctctgactctaaccccattttacgttcgatttgatcttattatgcagattgctcagaaggtagccaacaaggtacactttgaaagctctggaaaattcgatcactgtcaacaaatcacttgcaaagagaatcaagttatttattatgggaaagatgttagaagcagggaagatattcctctcaaagaaaaagacaaaattccagcattgcaggcaactggggtagacttcaatacattttgggagttgaatgaagttcttgatgtcaggtatgtatactccaacaacattcatgctatgctaaacacatatggagtagaagctgccagagaaaccatcattagagagattacaaatgttttcaagtcatacggaatctctgtcaatatccggcatttgacactcatcgctgacttcatgactcacaccggtggatatcggccaatgaacagactcgggggaatctcagattcggtatctcctttcagtaaaatgtctttcgagacagcttctaagtttattgttgaagcagcatatcatagggaggtggatgaattggacactccatctgccaggatttgtcttggattgccagttaagggaggaactggatgttttgatttgatgcacaaggtacaactttgatatttcctttgcctcttctcttagtggttgtttttattttcacttcacaattttgccttgtaaaatctcacgattttgtgtttagagaagtcatttatatcattgaggttatcatataacacattcattaatttagagtttataattggagacgttcctaatattaaaagttaggaaattactttgtatactcactttattttatctgttttaatttttattttcatttttatatttattaagatatatcaatttttatctattatacccattagattagtgtaaattatgtgccatatagaagacaatgatatattagacaacccaggtagattttaatgaaatatgattaatggatacaaaaaagtagtattcttattaaaaaaaaaagtagtattctttaacttattcccttttgtaggactataattggacattataacaaaataattgttgttattcttagtgaaagggaaaaaagagtatttgtttttttgttatgaatttgaagatgctctttatttaattaattattctttgttgtggacaaataaaatttattactaagacaaactacaaggtactaaaatggtataattctatatatgaataaaattttgcattatatgggttaactttattttgataaattcatgtcatcatataaaaagtttatagttaatttcatgtattattttggaggagatttatttcatgt

SEQ ID NO: 114685 - DNA, 1220 bp, Cannabis sativa
  modified_base (32)..(34): a, c, t, g, unknown or other
attcatttatcagaaaatcaattatttatttnnntccttaaatagaaaattatttccttaattagaaaataatttccatatataaaatattctaataatgtaatccatgatagttgggttaagagacttaattagagaagactagctacctaagattgaggtagccccacagattacccagaaacaacaggttccaagaccaagacgtacactactaaactatatatcaaatatttttgttacaaaaaaaaactatataatatcaaatatttaattaaatatgactttacttgaggaatcaatcacattatccgagctaatttcttcccaattaatattccatgtatttaattatgtaagtttttgcatgcatgacctacagattatatatgggctcatttcaatcccaaaggaatattagttaattaacacattttatatcatctaattagtgtataaaatattattattattttttttataagaacctgaaaaatataatgaaagaaaaagaaataatacaaagttctcaggtcaaaatagaaagtaaagaatcattcctgtaagtgtcattattttgtgtagcaaattatgtagatactttgtgcttagtttatctgacttagtatttgtcatttgtcatctatgctgtgataatttgcatttgatctcgttaaatctgttgtgttgccatgtcagctttttgctttttagttagcttgtgccagttgtcctgtgctggtctgttagttagtcgttttacttctttatcttgagaatatatattttgttgtgtttgttggctaactaactctcttctgttagaatcatcttcttgattcttgctctgctagggcaaaataatcttttgttctgtgttgttatatgcagatggaaattcttgaagttttcgagaggttgaagatggagattgaatctgcttgatgatctgaggggagttcagagtttactgctaaaggttcttcagctgtgtgaatgcaaggtgttcttgtgtaattagatctaaatatgtttagatctcaaaacttgaatgtgttcaagtgttaggtaacattgtgtaaaaattaattcagattacaatgtttgatttggataatcataactggtatttgtaattgaattgattttatagtggatgttactttacccggttcaagggaacccaagcactactcggttggaatgcgtttccaatgcag

SEQ ID NO: 114686 - DNA, 2521 bp, Cannabis sativa
  modified_base (2402)..(2430): a, c, t, g, unknown or other
  modified_base (2471)..(2473): a, c, t, g, unknown or other
taaaattaagtaaagaaaaattaattaacaaacacttattttataacaacccatcatgaaatatggaatacataagaaaagagatgtgtaagctacttctagtattttttggtggcccagctatcgatcttgtattcaaaattttattttggctaatgcagttatcaatgaatctgttatctctcgatccatttgagtgagtgatttgctcttgagtagtgtcccctaagactatttctcaaaaaaaaaaaaaaagctatatatatgagttcaaattgcattatggttgaaagttaaggttaaggttggtgcttgatataaacttggagttgggtacgtcaacctccaaggtttggggtctagaactgggtttaagtccgagatacagcggcaaggttggggctgggtatggtatcagggtcggtcctaaggggtcgtgaggcaaggtgttaggatttatgtcctgaaaagcctgtaaagacattactgattataaatattagttaaacattttgatatatgcttgaatgttgaattattaatatataatattgaatcatttacatataaatattaaaaaattctttattcatttatgagattttgacttgtattatatggagaattgagatcacttagccaagaacaaaatagttagcaacatattaaagttataaaatctttaatcaacgatacttgctagtactgttcactgattcccgttattcggtgcaagtaatcttgattcagattgttgattttgtatgacatctaataaaagtgttgtatacaatagagattatatatgacattgactgatgtgtaattaaattgtatttatcaaacatgtcatttactataaagacctaattcacatcacaatgatgatcaatagtagatcgacctaaattctaagtgatcatgaactccagtttatgttattagttttttttattcactcgttaaacactactacaaatataacatttatctttatttttttcattaaaaaattataaatccgaagataaaactattttaagacacgtttcataactttcatcgtttgcggaaaaacaaagacttttgtcttcgtttttaaataaggagacaaaggagctttcagtttctcttcttccttattcgcttatcaaagaccccaaactccaaatcctaaaaccacaatcctcgacgacaacgacatcctccttccatggcctagacggggacaacgaggagggcttcatcttctctctctccctcgacgactcactctctcaccccctcgacggtgtcaatggcgataccctctctctgtctcatctcttcattcatcattggacggtaattttttttttctattcttcatcttttcattcctctttctctctaaactcactattttctgggttttcttggtgtgatcattcctcttcatcttcagttcgtctctcactctgtcaatcactaatctcagctcaaaggaagaaaaccccaatcaaggtacatttttttaggtttttctatcaattattttctattagttgatttccatttgtgtgtgtgtatttacaatgtaatgtttggttgatggggaaattgatgatgtgaattaataaattagattttattttagcatcacatatagtaaaataggtttaaaagaatttttagtggatgaaaaatcatggaaatcaaaatttttatggttgttgtattgattctgagattggtgaagaagattagaaagtatctcatttcctgctcctaaaaaaggtgcttctatgtcattttatgattacatttttgttttgtttcgtttagttttttattttatgctaaatattttgaggtaagtaaaatttttataaaaaaacaataatacagactatgatataatattactcttttacgagttaaattataggaaactcgatatattacattatactaataacaatttaaatacttaagttggagttatcttaaaaaggttaatcaccaatgttgaatttaaatagtaataactcatatatatgtgtatatgtgttaatatatgtttgaaattatttaaccaagatcttagtttactattcatgtatgttgattataaactataatctaacatcctaaatatgaataaacctaaaacgataaattaaacacataaagttaaataaaccttacattgattttaacggaatataatatctccttttgctcagctctttaactattgttcctttctgtctcagagtattatcaggaactaaacctatatcttcatcaactttaattgtgctcatcactgtttctttggtatcactcatgactagtgtcggttgtttctcaactcactaaggacatgcatatggataattgatggaaattattttaccagnnnnnnnnnnnnnnnnnnnnnnnnnnnnnttaacaccctaaatatgaactacttatctttcgagattaannngtgcgaaattgctaatgaacgtttttccattagggaggattactcact

SEQ ID NO: 114687 - DNA, 1580 bp, Cannabis sativa
tatatagtgtatatatgtgtattgtaacatatatttaatcaatctcttattttagtccttgtattattttataatagaattgtaacatcttaattttcttccatcgttataaaatctctaacacaatctttgaaaggctacattttatgtatatataaatatcacttattctactttttgttcacttacattttatctttgacatttattatgctcctccaaaatttatgaggaagaaaaacttcaaagaatagaccgattagattcatttaataagattatccttgtctcaaaaaaaaaaaagattaaatagattggcatatctattgaaaaaacttgattttgataaatttgactataattatttattaaataattttacatttcaaaaggctagaaaaaaaaattattggtctatctatcttttttgtgatttgtaaaaattaggttgatttttagtgtataataaatattttagtaaacaaagaaaaaaaaaatagaaggcctttttttggagcccgcacaaggcctcaaaatggctagagatgaccctcaatcggtcatgtcagctatggtggcatgaaaatactaggcaagaaaggtgttctcagacatattcaagtaaaacctataaggctctgcgagcagtggttcttggcaaaacaaccaagctgaaatttggggtaggtaatcacaaatccaaatctgttatgggctacctacactcaaatttatgggggccatccaagacactttcaagaggtggagctaggtattttctcaccttctttgatgatttttctaggctggtgtggctttacattttaaagaataagaatgataccttcaataaagtcaaagaattaaaaaccatgcttgaaactcaaactgaaaaaaagattaaaaagatgagaacagataatggatctgagttttgtgtagaacaatttaatgatttccgtaggaaagttggaattggtaggcataaatttcttcctagaaatgctcagtaaaatggtttttttgaaaggttgaacatgacaatactagaaataataaggtgcatgctcatctactcagagctaccaaattaagctattttggacaaaagttgttgtggcagcttgctatctaattaatagatgcccttcaccagtcattgattttaaaacttcaatggaggcctgtacatgaaactaatctagctatgatcatttgaggatctttggttgtcttgcctatgcccacacaaggcaagacaagcttgaactaagggccaaaaactgtatctttctggggtaccccgagaaggttaaaggttacaagctgtagagcattgaagattagaaaaatgtcatcaataaagatgtgacttatgatgagatgacattgtaaagggatcttaatgctcgaggtggagttagacaaagaaaataaggaaaaatgcaagtactgatgctgaaccaaaaatggaatttgatcgaagaggagaatgaagttgatgaaattcaagctgaagatgatgacactcaagactatcttcttgttgggctttgcgccctaaataaaactctatttca

SEQ ID NO: 114688 - DNA, 2729 bp, Cannabis sativa
tttttttttttgaatttgtttttgaaagtgagctttacccaaagttggttttaaggttgcattaattcactgagatcactttttatttcttagtgcaaatgatgttaataaagacataaaccaaactaaagccaagtatgggtcgaaggcggtgcatgaagtgggaccatgcaccactaactgcgatcattaccgtcaaattcatcagcctatctatggtctccagtccacgtagataaatatataataaaaaggatggcgtgaaaaacttttggtgaccctttgattaagccaatccaatgaagccccctcaactgaaccctttaagaaaccgcccttaatctcccttgggcccacttgttgatgctttctaggttggattatcgtggcactggccccacttgcagccgtccgatgtgtgccatgctggaccacactcatcactctcatcttccttcacacctccataatcactaatactaatcgccttctacacacaatacacaccaaaatactacatttattattaatgtctaaatatatttgttgaggagtatttctattgatcaccactattcagtattttttataagcaacctcttgtgttaacgatatattttaatttttcttttaagttatatgagattttatatctattaattgtaatatgatattgaggagtatatattaagcattaataatattttttaacaatttttatttagaataatattattgagtagaaataatgctcaacactttttatagatagcgtcccacaattagttaataatattctttaaaatttattttttaagttgtaggtttccttttaataaaataaaattaacactctcgcaactaaaataactttaccagtaaaaaaaacttgatatgtactaaactacccattacgtgtttatggaatcatatatgcaattagtattctaagttcgtaagtctcatgttagtccagcctatatttattcgtgttttttgaaaaataagtcgtgtcatattgtgccacaaaaaaatacaagtcatgccatgtcgtactaacatttttaaagaataagtccggtacggcccgtaggtctgatattttcatgccatgttacgatttgtgtcatgctttgctcatgtcgacccatatttcttaaacaggtcaacctgtttttatatttgagctttaattcgtattttacttttttatatttttttttacaattactataacatatgtatattttatagctttagttatatttatataactttttaacaatattttatagataatcatataaaaaaattattagtatcattacaacttgaatatttaattataaatacttaaatttctatatcataccctatacataaattaatttacaatcttaatttttcatgttttaggagttttaatgatataattataatatttagtattatatttagattttattattattttaacttatataaatattgatgaaaattcacatcctattattattatttattaactataaggtttgttcttatgtcgtattgtatttttcggatttactgtgtgtcgtacttttcgggttagtttatttgtgcttacgtatcatgtctttaacttcttgtgtggtgttgtacataaggatatatttttcgtatcatgttataccaatctgtaatatagtgtcatacctaaatcctatttatttgtgctttccaaattcatgctgtttcgattcgtgtcaaaaaaatcaaaccatcactataaatggcttattagtcattttaggataattaattaaggatccaaaggatgagatattaattattcccattggtcattggcattttattcctttttagtttatttcggtgagacattggccattggctctaacaaatattagtacggtttacatttaaatctctcgacattatgttatgatatgctattttaaactcctgcctagatttgcgtgtcatcccatccgtttcataatcataattttgatatgattttcttttccaagttgtgctgtaaaatattcttacatatgattttgggtatacaagtttattaaaaggttatgtacaccctctctcttatatagaagagtgaattttctattacagtatatattttaattaattactatatatatatttataataaaatttaatatttatagacataatattaattttagtataatggttaagttaaattgcatatatatatataatagaggtcaaggcttaaaatctcaccaatagtacttttttttttcctttttaagtttatttttgcccgtgtcttaaaaaaaaatcacaccacctcactttaaatcatgaatcggccactacctgaaaacacatgtcaaagtattttttaaatttttttttatatcggtattcattattgttacaatatcattaatttctataatttttttaaagttaaatgtaaatagtactttatggtgccgaaaagatatttgaatttttttgaacacgtggtaaacttgaatatcaaaaattctaattttgatactataaactattcagttagttttaaaaatttatagagataatattataactataatgaatattgctatgaaaaaaatatttcggtttggcgtaaaaattaactaaaatgttgtaattagtgttatataaattaacaattaacccaagatctatttgtatataacatagaacac

SEQ ID NO: 114689 - DNA, 3085 bp, Cannabis sativa
ttttttttcgaaagtaaataacatgccatttcaaagaattcgaaagtttttatttgtatttagtaaggattttttttcccagttcttctttaacttttgtgcggtgaatcatgtaatctaccgatggaatctgtaaataaagatatagtaacttttgttgtgttaattaccttattggtcctagaacttttcagtccctatgttgtcattttggtccttaaactaagaagattggatttggtatagaattgtagagaacagagtgtaaatgttctaattagagaagaaaatcttcaaatgggctatttaaagaatggtatcatatttttcaaaaaagaccatcttaatatctttttttttttttttttaattattttttttcaatttcctttaatcaaatcttccatttataaatctatatttttttgaagaaaaaaatagtaattataacgtactatacagttaatgagtaacattctcattttggtaacaaaataattaattatcagatatctatttgagcaaaaatatatcactgcacaaatggaatttttctatctcaaatcatatatttttttcttcaagtattgatataaggtatcttaacgtgtcaaatattatatcagtgtatcgtattataaatagttagcttaacaatgttttatataatttattaagtaaattgtgtgaaatttaatattaaaatacatcaatagcggtcacctttatagtgtttgagtgtccttagcattttcttttcttctttgactatcccttagcattttcttttcttctttgtctcacatatagagcaaatatattggagggagtgtatgtttattcccttttggccttgggtatattatttcaaagctaattaggatttttatcttcttaatattgacatttactaaatcatacatcctgaatcttttaggtcgttaataattctcatgaactattgaaattgttagatttaaagacctgtctaattttattcaatttgtcaatgtggtgattatccatatactaagttgtgcccttaaacattgatatctaccaaatcacgacttataaattttaacacgtatcaaattgtgtttttaaaatttttattcacgtcagactttctttagtaaaattggacaaaaattcttaaatccaacaatctcaatagtttaagccgaatttttaatgatttaaaaagtttaagaaatataatttgacatatattaaaattcaggaatctaaattagggtgctaaagatgaagaagtaatccccttcaagagagagtaataaacactacctaaatagtgaagtttcctttttgggttgacagacagagtaataaacaccacccaaatggagaaatttcctttcaccaaaaattgggtatattttccatgatccactattgactaaagaaggaaaaaagaaacacagctcccatatctttatggtctaaacccaaaaatctctctatataaacactaatctttacaacattattccatcatattctcacgatagaagtgaaaaaattaaaacaaagatatttgcttttattttctggttctataatctaaaccaaaaaaaaaaaaaaaaaatgaacaccatttcgattttttgctttgtgacccttgtctccattggtctgagccaaatccctcatgttcaaggagacttgatctctaatgcatgtagcaaagctttgtacaaagatctttgtgagaagacactgcgagcagaccctagtagtggtagtgccactctcggtggtttagccaaaatcgccctccaagcagcggcttcaagtgccaaaaacacccaagcccagatcactagcctactcaaaaccgctaccgataagagtgtcatagcggccttgaaggattgcagcgataattatgatagcgccaatgaggaactcggtgactcgctcaaagctattgatgccaaacactatgacgacgttaagacttgggtctcggcttccatgaccgatggtgactcgtgtcagagtgggttcaaaggaagctctcctttgacacaagccaataccaaatttagtcaactttgcagcaatgttttggccttaaccaaccaacttggttgaatccaatattaatctagtgtttattttgatttgatttttctagccatttttttttttaaaaaaagaataagaaattaaaagactattataagaataagcaatgtagggaaaatgtaaacgatggagcttgtaattcgtggtgtgctctcaaataatataatattactacgttttgatttatatatattggttcataggtaatttatttatttgcttctctattatcaatatagtttatttgtaatttgacagctgcgagaccggctggaatcgtttttttcttttcatgttaaaatggaatttttattagccataatcaatgttacaagatgagcaatacaattatctattacaatcctgtagactaagttttgcaggcgactctattaccttcacggtaaacaaaataacatgagccaatttgacaaaaaatcataagatgttggatattccccaacaacaatatcctctacagaagtcacgatacctcttgatagctaaaattgaattcaagcaatcactctaaacataagctcggccgaagagggctttggcagggatgttacgtgatcaagaaataagcacacagcaccaccccactcatctcgaccgaatacttgtcgacatcaaccgcatcatggacattcattttcagcagatctctgtttccagacccttggcaccactgtgttcgtaccagtaccagccttcaaaggcacctgcaaagtggcgaggggaagtcacaactcggaactcgaatcgttttcatttgcttgttttgttaaatttctcttagcataatatatattaaacttttggatgtatctttctaatcttatggtttgtttgaatacgtatctttaatactagtgattgttacgtacgtgccaagccaagtagtattagttttatttagtattttagttttttattttaattaataattaaaatagtataattatttgaa

SEQ ID NO: 114690 - DNA, 2122 bp, Cannabis sativa
aatgttttattaaaaaaaaaatctaataactttataatcaattttattattattttaatatgtaagaataaaaaaaataatatacatatttcataatttaatgtaatagttaaatatactaataaaataatagaaatgatttaaatataaataaaaaaatagcacatttattgtggtataaattttacatcataacaaatattgtgctaaatttggtacaaaatttgctattacattattttttggcacaccattgaagcatactttctgttaaataaattatattttagtttttcaccacttatttacacttctattggagatgttctaaccgaaagtattatgtaccactaatacccaataacattaattaattacatctacacaacgatcaatcaatataatcaagatattaagttaattattaatttattagaaaaatgttaaaaggcactagtagtgtttatcattctcttatgtgtcaatatcgatattggtgcaattaagtattggttctatatagtttaatgtaataacttttagagagtatcgctagcccatcgcaaggtgacacgcctagaaagtgttaagcatcactaatgtccaatagcagtattcaatttattatcaattaaaatttaatgtgggtacaatagtattatcctaaaattatataatatattattattgatgtaatttaatatttctctacatttattaatttaaatcacttaaaaaacgttttagtataatatagttgcaacaaactaattcaattaaatttatttttttcataattctatgtataaatctgttgaatctgttaaaaattgaagtaaagggagagaatttattgaaaattaactataaactcttaagtacttaccattccattgagagattctaaggcagtgtccatctcagctttggtagcaaagcagacgaagccataacctcgagactttccggtgtcaccgtcgtacaaaactcgagctccgaccacatttccatactcttgaaatgcattggtcaagctctccgatgtcactgaccatgaaaggttccctacaaaaagcttgtactctgtttcgggatataaaggctctttcggtttcggtttgtctgaaaagttcactctcagcatcctacccatgtattgctgcatgttatatttaatttaaattttattacaaattaaataagattagatttttttttttaaaatgattaatagtgcattgaattttaattattaattaatcagttaaaagggaaatgagagatagattagctaatgatgcttacacttccatcaagattttggataactgcattacaatcttcaattgtgctcattgttacaaatgcaaagcctctgcttctccctgtgtctctatcatacaaaacctacaccaccatttttctaatttattattataatatataacaatattattaatttaataatattgatgtttcttttcaaaaaaaaaaaatcaaaattattaattattaaatattaatttatgagtattgttattgaacaccaacagtagtaccttttaattagttagtgattttctctaaaattaatattacattaaattatatgacactcaatacataattacactaatcatattatactagcattaggttttagcatttctcttaatttataaaggttacattgtaataaaagtgttagtgtttttttaaaaacgtaagatacaagagcatggtgtattgtttatattttagctcatttaaaataaaaatgaagctttaatgatagtgtaaaaggtttactaaatttagtacatattattaaatttggtacaaaagtcagatttattctacatattaaatagttaataatttatgttaattaaaacctttttaatattttatttattcatttaaataattattttatgtagttttaataaaaaaattgaagacaataatgactttggaatagggatgcacacagggtggggaattagcggcgagtgctcttcccgtccccatccccgttaaggattttaatccccatccccgcttattccccatcggggacggggcggggaatcccctaatggggcggggacggggcggggaa

SEQ ID NO: 114691 - DNA, 3607 bp, Cannabis sativa
  modified_base (3506)..(3509): a, c, t, g, unknown or other
ttgtgactaaaaatacatttattcacaacaatgtgtgatttttgtgactaatacctttagccctagactttttagtcacaacataggaattttgatttataattagtgacaactaaaggccccagcaatagtagatgccttagccctatccgtggcccaaattttctaagagtcttggagtgcctcctctaaaccttctcgacatccaagctaatctccaacaaagtttccttttacttccactcaccagattcgtctttcagatcctttatctcaatatctttggcattgatctcaatctacttagcattaatatcctgggtcataactagaacttgaccgtcaaagagctcgacatgagtcatggcctcatttgctttattatttgttgtggtcaagtaagcctcgagcttttgaatctgatctttaaaagaggcagtggccttaagtgctgaagcttttccttagccttctggtcaaccaagatatacatctcttcattcttaaagtttaagttcctattctcgatcctaagcttatacatctccaccaatgcagtatgggcagagtcacaagccttttcagcaagaacggtcatctagcgcaccaaaagaaaatgaaagaaagggttagaacatgttggtaaaaacttaaagtggcagtagaaattaactattttaaagcaagtttaatcccaggggcttgttatttggcggcatgtgccaacaaggcaaggcctgtgctggacgccacgatccatttcttgaaagtcaactcatagatgctgacagcagataagttaattatttcagcaataaaatgggcaatgtcacttctgacccttggcgcgagatatttggacaaggtttggcagtccacgactggatcaaaaaaatttcctttacccctgtcagcaatcttagccttcctctgggtgtgcaagacattggctttcttcttagcagcaacctactcctggtcgatgcacttctagatccagttggtgactcttttagctttccttttaacttcggctagaagtggagtgtagaagcaaatgggctaggtaaggttaatggtcagaagtgaaagaagaactatggaaagttgttgctatctttttccaaaaggtgagggtttcaagattacttgtaaagtttgaacctcacctctgacagccaaaagggcttcctacccatccccacctatgtactggtcattagtattttgaacttaggtaggcttagaagattctcctctctgtgccctcttcgcctccttttcctcaattagaagaggattagatggatttagtgatgcaagggccttctctgggaaaataatgccatcctcgttatcttcaagtgaaatggcgtccaccgagaccctcttggcaggtgtagacctagtaaggtgtatcgcttagagtagttgaatgaccaaagagcctgcagaagtagactctttctgtttatccagaagataaggggcattttctagaagaattaggctcttagatttggccttggctttccctttgcctttactttgggctaagaattgggatatgtcctggttccaactttcggacacacccttatccatttttcccaagatgttgtctagaagcgccatttggagtttttgtgcatattctacataataataataataataataaaaaaaacagagacaaatcaataaggagttagaaacatatacaagtagttgatcaagacaactttaagatactcaaagctagagacaaagttcaagtctataggaaacctgttatattttaggtttccctgtgcaaacattgttatgtcctctttgttcagaaaactaccgtattcctcaaaacttggacaatacataagtagaaaaggatctactctatgaaagtgaaatggatgcacaaaatgttctggactcctaacaatctcatctaccttattaaggtattcgtttgttggatacctacaagggtctacacttaggaagtaatcatcgaatcctccatggtcgaggtgaggaatctcattagaatgtgttgcataaaagaaaaaaaatggttttttacttctcctagatgtactggcacctagagtgccctggttcttggccacaaccacgaaaaactatgctatttcaatctctttgctgagtggtgtagggtagaattgttcccaactaggcatcaaggtactgtctaactagaccgccttcttcattacagaagtccagcgaattcctcatgaacagctcggggtttcatgaccatggtttcaattgctataaggcgtaatactttggttcttagcaataagttcaacactacagaggttctttgtgttaaccaaatcctccaccttttggaatgtcttaagcaatcttcttgtacagcatttcctttaatatgaacaatagagaaatttttttctcagtgttgactccaaaaccagtgtcatcccattagaaaaaccaagttggtacacaagaaattgagtgaaaaagacttgaagtctagaattcttaccaggagtggagaagtccagagacaatgttgggacactccccaacgggaatccagaagtaaaaatccagtagtcccaaaagtcatggacgttagtgaaactgatcagataagatgactgggctaaatgtttttctagtttctataacccaatcctagttttgtttttccttatttgctacgatctaactagaaatagagaatttcttttcagcttggaatctccagcttccataatttacagaggatgtaccattcgacaagaagtttatatgagtgagggttgagttggaagggcgccaatcctatatacgcgcacaaattagtaaagtagctccgcgaaggtaggtgggctccacaaataatatgcgcccaactccatgctccaaatccatctatgcacttaattgcagattcgcccactagggagagcctgttccaacatagccctggaacgttggttatgcctcaaaacttgtcataattttggcgcatctccatgttttggaaatttttttaatttggtccatctgccaagggtgatgaattgtacatcatgggaatgaatatcttcttgcttttcctccttttggaatctccaaaagttgttgactctacgcctagaggagcttctagatctttcacctcttcttcaagaggagcttcgaaagctctagtttttcctcctacaacaggttctcagagttcagcctgagcatcttcttaatatgatctatagccttgaggtcaaagtcactgcctgacatctttacaacttaaggaaaagttaagtctaagtagtcaataccctaaactcaaaaaaaatggcatgggtattgggaaggcatcccctttgaatttcttggagaggtccccatcacccttgatacctagagacacagcttggtcctcacagaagttgcatctttggacaactagtcgagcacaaagtgtaaagaccgcttagttnnnnttggaaattagcagttaattaagaatttattatgaaaattatttatagatatttaaataattatttatgttgttatatttgaattctaaatgcatttt

SEQ ID NO: 114692 - DNA, 5400 bp, Cannabis sativa
aaaattaaaaaacaaaagtattattaaacggcaccaaagtcaaacaacctcgaggcttcattgttctttgtatgctcctatcaaaatatttgtaaaaaatggaaaaagatagtaggaaaaaaaaaattgttgtagaagccccttaaatttcctattttattatattgcacacaacccttcgaccaaattatttattccgaagaaagtatttgttttatagatattcccttaaattaacaaaatgattggctacataccaaccataaaatcaataaacacgttattgaaaattgtatattcaacaagtatttgattaaaattggatattttcaattatttttttttaattaaaataaaaataacacatgttaaacctcagctcttaaaagcttcgaatattaaatagattgcgtgctatgataacaagaatcaagaatcagaagttagaaaatacaatcaagtttgagagaatcaaatgaataggaatagtagtgactaaggtaaaatattcctttggctcataaacacatgcataatcagtgccgcggagggttataagaaccctccctagaaaaaattataataataataatagaacattatttcatctaactatattatatatagaagaaactagagctaaagctaattacatcaactgagaaatcgatcaaaaaaaaaaaacatgttaaaagagttgcaactcaacaaagatggctcagcctcaccatcctccatattcagagtgccatatagaaatagatatatatattaagaagggtatatattattaacataaaaatgtgcacgaaaacagccaggtgcatcagcaggtagtttcaggcaacacctttccctgaatagctttgtagcactggaggctgcaaagaggaagctttgacttggaatccctgtacttgtatggatttttacacgaaggaccggcacagttttcccgcggaggagggtagctgaataatcatcatcataaaaaataaaggttaaaataaataataacaagatatagaggccagaaaactacagcaaggaactcaaacttcatactttgaccatttgaactacacagccaaactagatatataaataatagagaaaagaacttgagtttacaagataggtgatattttacccgcaaggcttggggtcgaaaatactagggagtcccatgtccttcgaaaaggttaccacagtcccagtaggactcatcacccatctgatggtgtgtgatgcattcaacaaagcattagcattcttctcctgtcagagagagacagtatactatgcgttagaattagaacaataatataagtattaactaatgctagttttgttaacccacaagagctacagaaagggtttcagtacctgtgccaattcctcccgacgcttctttattttatcttccttctttttcctgctagaatcttgtccaaggattttcttgattgctacagcctgaaagattcgattgaaataagcagaatgccatagccacttgacatctacaaagcaagtcaaaataaatatgaatgagatatgcgaacctcagattctcgagcagctttctctacttgcatcttccgtctctgagcagcctcggctttcttcagctgctgctccacctctgtaagcttctctttttgctctaaagccaccaaaagcaatcaacatattgaaatttatagctgacaaatcctacaaaagaattataggtcacagttcaaatcatgtaattaaaaacttacttcttgatggagcaggtggtaaaccatttggaaactcgataaagctagcaccaggtgttgctgatgaatctttgctggactgcagggctcgttgacgcgttgtcaaggtcatttccctcctgccgtccaacaatgaatctacggattccttccttggcttcttcctcttcttactaccatcaccttcaccatcagaagctgaatctgcttcatcctcgtaatcagtgtccccagttactccatctattctagacttcttcttcccatctttaccacctggccttgatgcaccaacattttcaatatttgaaaccatggaaagttttctatgtttcctactgaattcctcatcgtcttctttgtaaactacagctatcttcgacgtcttaagtttctccaggtacctaatttcatcatccacatcatcaccaaactcctcatcaagtagtcgccttttaggaacccgcttgctcttgcgcactgacttctcctcttcctttccagaggtgttcttacgagaaacctttcccatcatagaatcctccctaccaagactaaaagtaaaaccagctcttgagttccaaggtattccttgcaagccactctttttatccgtacaggaaatgtcaccgttatttgcctgcaaaaataaataaataataaaaaaagatcaccctggactctgagagtttacaaaaggcttttaacaagaaaatttgtgcaaatattattacgacaggtattattacttaaaacataaaatttgagatttcggttaccaaatagttaaattgttagctaatctaataaacgcgtcatttttataaggcaagtacgaatccctatacaaggaattattcaatgataaaacaaaaaaacataaaatttgagatttcagttaccaaatagtgaaattgttagctatactaacaaaatcgccattttgtatatggtaagtatggatccatgtccatctatgaggaattgttcaatgatgaaacaaaaatgggattttgtaacccatttatacttaataagacgatttctttctatcgaaaggaaagttttttacaaagaaagcaaccaatactcttttttgcagcaatgatttcattgataaaattcaaaaaatgatttctttctataaaaaggaaaattctttacaaatgcaaccaatactctacactcaagcaaataagaaaaccctttaatacctgcttatgccgcagtttagatgcatctgcatgccgagaactctttaaagaggattcaacaacccctgaaacaccattagaggcagagttggcttgaattgtacgtgtcacaccattaacctttagcttaaccattttaaccttattatcatttccaaatccatctcctgactgcttagaagtggagctttcaccattccaaccactacttacatcacaatttcttaattctgattcaacgccatctttaattgcatttgagcttttccaatttgctggtgcaaggacaccttcacttgaacgcttgttattaaacccatttcgtccgggctcattactgtaatatgaattaaacccaccatcatttatatccattttatggaggttatcatcttcatcaccattagaatgagaaactgtagaaccataatgattaagactaaattctttcccatttgaattcgaatcacaaccaacaatttcatcgctagatgccttatttgcatcatcaaaaggtggtgttgaagacatgggtgaatcatcattaatttccgcattaggctgtgaatcaggccgagggcggcgacaagcttggctcctcttcttcctcacagcaacattgataccctcaaaccgagaagcaacaccaaactcttccatcagaagaatacaattctatatacttggttcttgtaacaatactacttctctgcacattacataaaaagaaaagaccctccataaatcaagtattcaagcaagatcaaagtatacgttaaaaaactagggaatcacaaacaagtgtacccatttaagagttgaaacagattgtgaattttttcatgagattaaaagagactaatgcaaatcattgctttcctaacaaggacaaatcatgctagttccaatcatgccttcaagctggataaaatcgtagttaacaaagccaacgcaaaactacaatataaaaatcgagacagattaaaattcttaacgccataaaaggaaccgagcagcaaaagagaggtattgaattaaatcgtgtaagaatgcatcatctaaccaagaaagaaccacttttcccaaaattaagagagcaattggttcgacatcgatcctacattcactaaaggaacaaaatttttacttaataaatcaattgcacagcaaaaaacacaaaaataaataaataagagcaaacccaaacaaaaacaaaaacacctagactacaaaaatcaaaccctaaaggaaaaacaaaaattcatccaaaatcaaccaaaacataaacacaacacaatgacaccaaccataaacgaaagcaaacccagaaacaattcaagacgccgacacaagaagatccccattaaatcaaaatcaaacaaaataccttctgggtcgaagagaatccgagcaccaggcgtcaccgccggaggcgcaaagggaaatcgtgaaccttcttcggacaatatggaaaaagggccaaaacccagaaagcaaaacaagagaaagagaaagaatcgcaggagagaacaaagaaaggaaggaaaggaaaaggagtaaggtttggtttcaatggtggaacagtgggttataagagaagaatgagcagacgattcttcttctagggttagagaagtttgggtaaggtgaggaagagatgaagaaagagggtgaaggtggtaaagaagagaagggctaatactaataatcttctccttctcgttcaccatcttttggttaattccactcccacgcaccaaagcccaagtcctccccacacccacacaccacacccctcctgtggtttttttctttttttttcctaattttcttaattttttttatttattttctttttttgggttttagataatctttgtttttcttcagtgttcaactcggttgacgcgactcagtaactccaactcgcttctctctctttctttctatatctaatattccctctctcttttttgttttggttttcactacctctttacatttttcttctgcaagtttatgcgcacgttaagagtatctacacccttcggcttacgttagttagcgtctgtctttctgccccaattaaattatgacatgtgtcaaatacatttattaattttataatgtcaattagtttgtctcttttctttgactcggcaaataggccctcttcccactattttaattttttttaggataataatagaaaaaaaataatttattaatacagtagaacctctattcaagaatacgaccaagtaaattatattaattgagaggttataactaaatagagttatactagaaaaaaaaatgaaaaaactaaaaaatatcaacgtaacaataataacaataaataatcattaatactataccataatagaaatattttagagtaaatataatattcatacatg

SEQ ID NO: 114693 - DNA, 2717 bp, Cannabis sativa
taaaataatttccaacatcatcctctgagataagcttgactcatggttcggtaagtttttgcatgctttatcagatttattagttatgcatgattagggaaatatgatcgaaagcatattagtaattgatagctgaatatgagcatattaatttcccatgtaagcggtagttatattctagtcgattgccacctaacctagctgactcatgaatgtgcagggtggtcctatagaatggacatctggcaagactcatgtagtagggctaaggtggacgatactggaggcggttggagagattgggatcccccttatactcaggaccatgaaaagatttatggaggtgaatatgaaaatccacagtaggctccgtcagattttggagtaaatgttcgttgaaatggaagctaggattcaacgacaagatgaggagactaagatattgaaacaacaagggtcttctagtgtacctttgtctcaatttcccattgcttttattccggtgttctcagcagcacagagagtggctggtaaccaaatagaattatctgatgggagttttttgttgcaaggaccttcagttattctgaaaaatctagatgagatgaatattccttcagtcgcgtacactacagagtttgctcatgattctcgagggactctagctattggtgaggtcactgttcctcctacctctcgtttaggaagagatgggagtgagttattaattaatcaaagtaacaaggctccatcaatttcagggggctcgagacagagaaagaagttctaaagaaagcaaacactggggtggccatttgagcatccctgagagttgttatacttatccaaagtgtgtccattgcaggaagcatcatctgggagagtgtaggcgtggaaaatgcttttgttgtggccaggtagaacactacaagaaagactacccatggctatagaagaagggaccaaattaggggaagaatcccgtccttgtttgggtggtagttattacccaaaccaaagttgaagatagcttttctatggtgttaggtcagtttcttatcaactgttttattagaccttatgttaattaactttgagactgcacgttagtatgtggtagacaaggtgattaataaattggataaatcttgaaatagttgtgaaatagggtttggaactcaattacctagtggggaattagttgtctccaaagggatagctcaggtctatgctgattagttggaaataggaagttaatactgacctcgtagtttttggtgtagtagagtatgagatgttactcgaaatggaattattatttaaaccagatgctggtaacaattgaaaatgaagactcgtttgtattatggtattaaggatggggttgttaagctccagttttcacaataataaaagataatatccatcatgggatggatgtgtagggtctttagtaatggtgatagatactttcaggcagagataattcaacctctagacattaaaatagtataagagtatttgtatgtattttcggccgagcttcttaaattattattacaacaagaatagactttgttgatgttttggtagttagagcagaaattgttttaaggcattttattgaatggccccaacagaaatttaggagagtaaagtgatgatttcagggagcgattaatttaagagttacttaacctaggacaccaccatggaaagtcctgaggttggttattatgaaggaagataaatcaattatatgaatgtaactatcaaatattatgcaagttgctaatcatgataaataccccctgatagggagtttgagtgattcatttattttggaaaaggtagatatctttaagaatgatccttgctcgggttatcattgattgagaatcagagaagaagcatttctggtagtgtatgttaaatatatctttgagcaccctttatcaagaatgatggaagggtaacatctatggatggttctacaagataatgggatcataattaacatggggtaaggttgaattgatcaagctttgaccaagattagacatcgatgtcagaattgaagttttctgtgataggttagttatggtattatgatttgaaagggttattttaagatttcaaacttacaatagagcagattaaggggaagtagtgagctacgtggacaggcaattgataaattggtttccaagagctgaagttatagttgaattcaaccttaatgttaacatgactattatatcaagagaagttcttggtcttttgtaaggcagacagaaaggatgtggagggtgatttaaagtaaattttagcgttactatctattcaccttgtcaattgacggagtataagcagtgatacccaaatcactatctggaatttgtgaatagagattatgtaattttgtgtttttaagtaggaattagggcttattgtcaaaaataagtctaggaaaatattttttcaatttcagagatatatttgaatactagatggattaattatgttatatgtgaatttttatgaatttcatgttttatgctcggtaacagtggaatgcaatgtgcggcctatagagtaacttgggtgttgtttagaagttttgattttattgggtatgtagtggacatttagaaggtcgagagtgttcggggttatggttttggaccataatacccctaggtcttaaggttatcttt

SEQ ID NO: 114694 - DNA, 6295 bp, Cannabis sativa
tatatatatatatatttcttaaattgccgataaacttagtctataatattataatacaattctatttttattttttaaaaaattattcttattctcacttctcttttttttttatttttattttatacacacatataaataaaataaattaattaaaaaattgatatttcaattatatatatactaggcatgaagggcatgtcaaggacacataatccccatcaaaacctgtagattaatcaatatcttatttttatcaattacattaaaaaaaatgattaaaaaaagacatagtgtgatatatgtttgtttcttgaagttaaggtcatcatttgttatgttttaattgtaagcccatttgattttcttcattatctactcttaagcaaagtttagaagaaaaataaaataataacttgcaaaaatttatgaaaaaaaaaagaataacaacacaaacaacacaatataacacaatatatatatatatatcatatatatatatatgctcgtataattttatacactattaagaaagacttaaaaaatattggcaaataaaattgaaaacaaaaaacatgagaaaaaaattgtaaaaaaatacacaaaagacctaagaaaacgatattttaaagaggaaatggagtgaaaaaaatagaagaattttttaaagaaaatggaaaaaaaggtgagagatttaaaaaaaaaaaaaaaagaaacaacaaaaacattaataattagtactatttactgggattttcagaaacttaataagtgagagctttaagaatttaaataaagattaagtaaaaaatatggtagatttttatgtggttcgggtgttaattttgagcatttgccttcaaatttgaacaaaagctttttactagagaacgattcccgaaaaaatcctgaaaaacccaagcttcatcctttggtgaatgaacgatctcgttgacgttcttatccacctcctactatgaattagagtgagggagtttccaggagcactgcccctaatcttgttctgagccacccctaatcgtctaaaacaatcgatgttcaaataggctgtgactagattcttcgttgggctttcaatttccaggccaaccaccctcaccttcctctattcccgcatcacattacaagtaagtttctctaagtctttgaactttttaattctgtacatttatattcgattattgatttaagatcaccatttccctgcgaatactaggaggattgaatggtagtgtttgggttatctaataactataggcttgttaaactgtgaatgcatgctcttttttttaggtaggttagctcaagaatccctgtctgtgtaagtaggttttgagctggactgggccctgggtctcctcatccgaacccattagggctttggatgggtctttttagattttttcctagttttctttaagttcccaatctactacacggtagcgtggttctgcattggttgtacttctgtgtaacaggtctagaggggacctctctaagaagtttcaggggaggccttccccggtagccttgttgtctttgtggtttagggtatttaacttcttgggtcttttcttttgttccagtgactactcctaatgacaagttccacctcgaggtcatggatctcaaggaagttgaggtatggacccaaccaaagatccagagaaagatgcaatccatgaagaggccccaaaacagaagcgtaaaagaaaaacgttctaattgtatacaattcgtccatttgggaaataaaccttattaagaataaggtctagggctatgatatgctccagcgactctcagataagggtggagtttaaaacattccaggtttgtgctggaatagactctcccttccggacgagtctccttccaagagtgtagatgagtttagtgcttggatcggggcccacatctccgacggagctcatttgtagttgtaaacttactttgccaatatttctgcagcaattgggattgagccttccaacttatcctgcagtcatataagctcctggcgagatggtatgtgatgtgtaagatataagatattgaggttttgggaccagttgtggtgttgtattattacattgtgaagcctccactgatgcagaccaatacaagcaagattgggttttactaacttgaaaagtatccaaagacacatttttcgttcaatgtcaacaaacatgtccctaactttcgggactattggttcttcaccatcgacttccagttgaagagggtcccgacacttcctcttgactttataatgccaagttagtacttcagccttttactttttagttttcccttctgtgtgtcttatgcttatgattgatggaagtaccactattatgtagcacctgttgcctgaacccctaggtccaaagtcttggttatcaaacaagcacaataaaacaaggtcaccgacgacgtattggaagtagagaaatttgtcaccactgaactactccaacagtatggcctgatcaagaagtcccaaagcatcgaccatattagcaaccgagacctctaccgtgatctttcggaggttaaggaggaaatttccatcatggtggcagggaaaataaaggaggccattaaggaggacatgttcttgatggaagattggacaaggcatcatctgcatcacatcaataaggagatggaaatgacagaaagattcgctgttataacatcggatgagggcgctccgggagctagtacctccaaaagaggtaaagtaccctttcgcttagtttacgtcccacgtctggataaaatagctcagctagaccaagggggcttgaccgaatacttatgagcatagatcccaataggtatctgatagatgaatactataataggatagacgaaataataaggagcctgaaacactttgagccatcaccccagaccactaggaaatatcctttccttctaatgctcttcccgaactttgaagagcatggtagcttccttggcaaggaggatatagctttgtttactcagggaaacccaaattataaaataattaatgatttcctttacacctaagccttgtttatgtttccaactaactatgagtcatatgaattcttaatttgtacttgtttttgacaattttctttattttgcagagaacttgaaaacacctaagatggggttgttgaaagtgctcgttggaaaattgacatgaatataagccaaatcaaggccaatgctggagccaagttgctttctagagcagctaagggcaaaagcaagagtaaggaaaataggtcctctaaacgaaaagcttaaatttccacccttgcgactgccactccaactcctccacatactgatacaagtttcactggggccatggagacctctacagaagcagagaagacttccacaaactaggggctcgggttattgaagagagattaagcctctcgagcagcttctttctacacctagcagagtttcctccaaaaaccctattcttgaagcatcctaaggtggtgtgcaagccaccgttcctttggatgagagtggggaaggcttcttcttcccgaagaaggctacttaattgtttaaacgctttgaccccttgtctgacactgggagagaggccaaaaaggtcaagttggtggaagcaagacaaaggtccctcagaggtgagggggacttcaatagggttggaactctagtcagggaggtctaaacgaggccccaagtgtctataacccttagccagctgcaacaacaacaacaacaaccgcaacaacaataacaatagcaacgataactgcaacaacatattctgtgatagccaagtatatgcctaattcttcattgtccagaggttttgataagacaagaggttgagctaattgtttctttagctcttggaatgctctttcacagtcctttgtccattcaatttttttgtttcctctaagtatgttaaagaaagggacacacttgttcgtggattttgacactaatctacttaacgctgcaatgcgtccagtcaggctttgtacttcttttatttttgtgggtgacttcatgtccaaaagggcttggatttgtttgactttgtttctattcccctaacattgactgtgatgccaaggaagtacttttatttttgtgggtgacttcatgtccaaaagggcttggatttgtttgactttgcttctattcccctatcattgactatgaagccaaggaatttacctgagactactctgaatgaacatttgaggggggttgagcttcatgttgtactcttggaggatcttgaagcattcatttagatcctccacgtgcaaccaaacttttttgggcttgaccaacatgtcgtccacatagagctccatattacggccaatgagatctttgatcatcttattcataagtctctgataggtggctcttatgttttttagtcctaacagcatgaccttatagtagtataggcctaggtctgtcatgaaacttgtatgttcttgatctaatgggtgctttttgatttggttgtaacctaaatatgcatctatgaagcttaggatctcatgacaagttgtagcatctactagctggtcgatccttggaaggggaagcagtcttttagacatgccctattcaagtcagtgaaatctatgcataccctccacttattgtttggtttgggtaccaatatgggattcgatacccaaagtgggtagaatgattcattgatgaagtcattggcgcttagccttttgacttcatccattagagtgtgcatgtgctttttattcagtaacctccttttctattgtacaggttggaagtttggatttatattcagtgcatgggtcatcacagatgggtctattcccaccatgtcttcacgtgaccatgcaaagaggtcaaggtttgtcgttaatttgtttttttttttttttatcaaaactgattctatttttggtactaaaccctttcccatcttcaatttcctagttggaagagtggggtcgatctccacctcttctgattattccacagatccaaagctttctgaaggatccccaaaacgaggatcaatgtctacctcccctctttgggttggacttcattgccttttgtcggggtcttcgtcaaagctcttggcgggcatcttctctttcttggctttagactaagccaggttgtaatagtgtcgggaaagctgttgatctccccttagacatcaggccccatgccttgttggaaactttaggcataagtggtaaatcgatgttaccgccttcaggtcatataaggatagccgacctatcattgcattgaatgtcaatggcacgtccattacgacaaattgtgccatcagcgttcttgttgtgggactttctccaactgtcagaggtaatttgatgtatcccaaagctggaaggccttggccaaaaaagtcgtacatcagttgtgtacatagtgctaggtcttttaactataagccccatcttttcataagttgacttgacaaggatgttggaggacgctccattatcaaccatgcagctagcacctgtcatgttccctatttgtgcagttatttccaaagggtcattttgaaggaacctgacgtaggcaacatctccctctgtaaaggagatggcagctcttcaagcttgtgttgagcatagtgctctctagcttagcttgtttgaccaatgtggggtccacctattatgacccccaggtgacctgccattggtggttgcattgggtccccattctaggcagcttgtgcctaagcttagtcattttgcacataacgacacaagtgggcattattttttcttattaggaattcaatgtcccttttcaaatgtagacactcgtttgtgtcatggctgaactcattatgaaatcgactgaacttgaacatatctctcttactagtgtccttctttattggaagaggcttcttcttgtgtgggacaacaacttgatgagtggccatgtagatggtcttaggagtcttggttaggagactgaagcttttgtacttttccttcttctccttttggttctgtaatgtagaggaagtattgtactttcttgttttgccactatttcggccagaattgctgttgtggctaaatttgtgcacaatttttcaattccagaattaatacttaatgggaactgttgaccgaggttttcggcaaccaataaaataataataatttagagagctgtaagaaattaagaaggagattttttacgtggt

SEQ ID NO: 114695 - DNA, 2796 bp, Cannabis sativa
  modified_base (52)..(60): a, c, t, g, unknown or other
attttttcatttaacaaaacacagggtctaatcagtaacttttgcaaaacannnnnnnnnaaatggtatttaccctaaataaaattcaattttttttttttaattattgataatttttattatttcttttgacgtagtgattagaatcactcatgaatttacgatattgtagatatctccagaatagcgcgggaaccttctcaaacaaagatagctcatcgtctaaccgaaaggcatgcttcgtcaaactatgaactgctaaagtaagcgagtaacatgggacaaaactgctctcagaactttagacaataaagctataacattctcaaacagcacattagacgagctagaactttagcttgcaacactaaaaaactacttgaaagatctcaaaacaaaaccaaaaaaatgaattgtattagctgagccaaagcaaggggatcttgtcttcatctattgaaggtgacatagatctttgtacttgattgtaaatcaagagtattggtaacttttatatgaattcattttagtttacttatttcgatttgtaatcagaactagagattatattctgattgatttcatagtgaaagttactttacccggtttaagggaacccaagcactacccgatcaaaatgtattttcaatgcaggggaagcttgtaaattttgtgttcttgatttacattcagttttaatacttaagtttcaaacctagaatctatcaattaacttttggattaataagactttttatttggtatcaaagctaacttttcatgtaaagaaattgtgatcctatagccatttgattgttgattaggtcttaattttgttttttgtttatatccgatcataattcacttcttcttcttatttcgtgttattcctggaaaactgatccactccaagattcatctcgcagtgcaacatagttgttgtttatgttgtgcttaggttgacagaaaatggagatgttcatagaaggaggatccacgtctcgaccacctatgttagaaggatctaattacccctattggaagataaaaatgagagctttcttgaaagttgtggataaacgagtgtggatagctgtagtcgaagggtggtcaccacctacattcattgatgatgatggggtaaagcataaaagatctagtgaatggactactgaggagatagaaagagcaaatttcaatttcaaagccttacatgctctttgcaatgttgtctccacaaatcagttgaaggttattcaaattgtgagattgctaaggatgcctgggagaagttaaaataaagaataagggaactgaggctgttaaaaaggctagcctaagggctttagccaagcctttcgagaatttttccatggaggaaaatgagttagtttctatgttttatgccaaactatgtgatatttctaatgaatcttatgtccttggaaaagtctattccaccaaaaaactggtcagaaaatttcttggtgtattgccaaaaagatttatgtctaaggtgacatcctttgatcaggaaagtcgagacattgaagctcttaactttgatgaactaattggatctttgcagaattatgagttaactctacaaagatgggacaagggccaaaaaactaaagattcagaaaaggccaaagctagataggagtatcttttgtttataaggaggacaatttcaaagtttcagatttgtctgaatgttttacagttgctaacttttcttttctagctaagaattatgctcggtttcttaagaatttttttttaaaaagaataactttgggagcaaataaaattcttctagtaaaaatttctctaattccaacaagcattctcagaaattacaatggtgggttacaaagtcaattctcaatccacggattcatcatctttttcatatttgatccaatgtattagatgctctttatcttttttccccaatgtatctcttgtgtttgttagtaaggaagccaataccttgacatatcatattgcaaaaaaaagcattataaatgtaatattcaattcatttcaatattaattacaccaaacaaaaacgtgctcaaaagacttgtgcaaataaagatgtgaacccacataaacttggccaaaattaaataattaaagaaagacttgctttttgttggaattaataaaacaagacttgctttttggtgatgacttagtcaattgtattaggaacttgttatctccttgctttaacctcaaagtggttcatgttcataggagctttaatgtaaccgcacataatacagttaaatggggtcttgggcttgatagtgagttcatttggaatggctctttgccttccttgtagtcttgtggtgttggtttgttttccacaagattttatttcaaaaaaaaaaaacttgcttgggcatcatactagtgaccatgttaaattcctttctcattattattttatttgtgagtgtggatattttattagtatttaggaaaaaaagagacataacataatgatgcaggcgcctaaaatttcttgaatgaatattaaaatgaaaaacaactcatcatttcagtttcataataatttgttgaggaccacagtcttttctttttcctttccaatgagttctttcttttctcgtataaagattcttttatctattcaaaaatactatctttttttcattttatttttttaataatgtgtgtgtgagcattattctattaacaatgaatttaaaaacaattaaagacaaaaatattagaatttggattaacttttacaaaaat

SEQ ID NO: 114696 - DNA, 3089 bp, Cannabis sativa
gcatatgtgcttgtttgaaggccataatagtaatgtcatggctactaagtgtgtaaagagacgaaggagagattctacttctgtttcacaaacctacatagatcaacaaggtcatcagcatgttgatcaatatgtaccaataacagcagcaactacctctactactactactactgtcaaacgaagctccagatttcgcggtgtcagcaggtttggcaaacagacataactccatgtactttttttttaagtatggaaatgtggaacgttattagttgatttggattgagtaaatgaattaaagaaacattataatgcaggcatagatggacaggtaggtatgaggctcatttatgggacaaagggttctggaatccaactcaaaggaagaagggaaagcaaggtatattagtacttgtctatttctaaattatgctgacacttttactcgtatctatcaattatctttactgattctaatcaatgtttctttgttgctaactgtaaacgcattggatggtaatggagcagtttatttgggtaagtaatttgtagcttatcaaggccatttttacttgcaaaagatgataaatcataattattggggaaactaacaacttaatggatcggtaaactaaacaggagcttatgatgtagaagaatctgctgccagagcttatgatttagcagcagttaagtactggggaccaacaacttttaccaattttccagtaagttgagataatagagcatgaaaatgggggagctcttgaagcactttttgaacaaaaaagtagccatatcaactttgatttctttatgttaagtcttttttgatgaatgtttctctgcaggtgtcagagtacgagacagaaatagagataatgcaaaacgttacaaaagaagagtacttggcctctttaagaaggtatcagctgcacatttatggactttaaattctcctaatgagttctaaatttatagttcttttcttccatgtataaagaagaagtagtggcttttcaagaggtgtatccaagtacagaggagttgcaaggtacttaaattttattaccttcaaagttgttatttattgtagactatttagtaatgaaatttcatttaaggttgaattcttgaatgaattgtaggcaccatcataatggaagatgggaagcaaggataggaagagtgtttggaaacaaatatctttatctgggcacttatagtgagtttaattagtcccatgtatcattgaagaagtccaagtagataagaagactaatctcttttattacaataatcgttacaggcactcaagaggaggctgcccatgcttatgacattgcagcaatagaatatagaggcattaatgcagtgacaaactttgacttgagcacttacataagatggcttagaccagtatcaaattctgctggagctgaagaacaaaatcctctaactgcaaactccaagtctcagccttacctcattgaaagaaatgaaagagcagagagttcatcattattccatttcaacaacccatttgtagtaaatgacatagaaacctcgaaacgacaagcagccataagtccttgcagcagcagcactgcttctccaacagctcttggactcctattcaagtcatcaatattcagggagctggttgagaagaatttgtgtgttgagaacaaagaaagagtggaggatgatgagaagaagcttgggcaggataagaacgatagctttgatatgatttcctttgatggtagtattggccctagtttggagtccaatggagagagcacattgtcgttttgtaatggaaggggacaatccttttggaattttccaataaacatgtcttctcttcatttcaactaacattttaactgtaaactctacctctagttccctcttaactgtaaactacaataatatgtcatgaaggtgtttggcaccctaaggtattttataataatcctctttctattttctaaattttcgtcatagtaactaagtttagtcactatatttacgtagcgtttggttagatgtaataaaataaaatgggaaaaaaacaattttattttatttcttcgtttggttggattgtatattagaaaatcaatttaatggaatgatttttctatcattttgattaaatgactattaaattttgaaaaaaaaaaaaatcattccattataaaatgagaaaaaaaattaattatttttttgtcaatatttttttatgaattttaaatttgattctattcaattcttaatctcattcccattatgttgattatggttacaagttttgtcgtccgggattggaagctgtgaatctggagagcagataccggaagctagtatggatccggaaagccctgtgcaaaaggtcttgttgaatctagaaggtacttccaaataagcttgtatcgtgtatgaaatgtctctcccggatggcttgtcgctaatccggaggtgtactcccagacagctctgtcagtcttgaaggttaatccgggaatgaagtcatgtacgcattcggaagacttgtgtgttacaaagcttctagatttttcatactgaaagtatgtgtttcaagatgatgtaagattcttgtaaccttgtaaacattgatatcaataaagataggaaaattatagtaaatggccccaaattataggactatgttagtaaatgtcctcatttcaaaacttgtaaaaacttgtagcaaaatggcccttttaaattatttattatttatattatattttgccacataaaaaaatcaataattttttttatatattttttaaaaaaattagaagcaaattacttaaagattatggtatatctatattagtttcgttaattaaaatcttttttatttgaaagttatgtcgatttttttaatttttttatgacttgttgtgagttattggtatatcgattgagttgttgaggattattggtatatcgattttgttgtacagtatatttctgtattgttgtatagtatattattattcttacatgatatttattttctattttgttatgtataatagtattatataatt

SEQ ID NO: 114697 - DNA, 1962 bp, Cannabis sativa
ggtcttagggtttgtgtttggaaaacgagagatgagttcatgcaaatacctcaatttgatcttttgggtagctttcaaatgtggctggttgtggtggaatggcccaaatgaaaatgcatttggtgcataagcttttggattatgtctggacaaaacgtttgggactctaaagatgcaagggctgtttttgggtaacattgacacagtatgagacatcatattttctagctcatctgccaatggatcaacatcaatcttgatataatctcttctagcttcctcttctatatctgtggctacttcatcatcaattttaaccattttattatcattttcttcagcttgttttcccattttcgctgatggataactgggaaaatattaacgttaaataaattaaattaatagcgtcatattaattaaagtataatgataatattgtaattaatataataaattgattttattaataatttttaacaaattttttttgtgcaacatatcatgatttcaagtcattatatataagattttaaaaactacaaaacaactattattggtatgaaactaagatgagtactaaaatgttccaacaaaatttgattaattattattagctatatatatatatgcatactaaagcctctatgctaatcacctatatatgcatactaatatataattacatatatatatatatttatatatatatacgtacgtactgcgcgcagcttggacggtgtacgtgctgctatgtattcgtcacccttggtgtgtgtggtgaaggatcggcaaaaatggtaaactcaatttcaaaaccaattaattatgatctcagttgataatcaatgtatatttatatatatatatatatatatttatatatatgaaggtgactatatacgtgataattaaaaccattagtttatgtagccacaaggtcagtacaaagcgaactattctttggccttttactaaagaataccgtgtggttgccacttatagtagcatctgttaccataaaaaacaattgtttactaatcactaaagcacgaataataagctctttcctattatatattcaaatttcacatacgtttgcatattgttcaattataatatcattttcttccctgctgctaattgttaattatattgaaattatattcctgcctaacttaattttattataacaaaattaaagatcaaagattttagagaatttatacttttcttcactatgtaggtaaccatggatcttaagacgtacaggtttgcaaagcaacgtatatatatttatttactatgcttgcaaaaaaaaagaagctattaaaagaaaaattattttataaatgtttcaactaattaatatggattatgcatgcttacatatacataatagagaccgaataacacaaaaaaaatatagtctaagaaaatagcaatggagttgtaccccaaacagcgacacggtagcaaccttttaaaagaactgctaccttcgccacatgagaatataaaaggaggccgtcactgaaacactcgaagaacacaaataaactaccttgtcacggtctatcaccaccaccccggccgagacccatatacaatagtggtcctcatttgataccaccatccacaaatagattaaaatcatttaacctcaaagtctcagtcgagccattagagagcccaaccacactcggcttcacatgaacaatcagagttaaattaaattgagcttcttgaaaattatatcatatatgtttaaatttgtttgcatttaaattttttttggcaataccattttattaacttcactttatttgcaaatctgatatgacggttaaaatatacgacttgttaagaatttttcttgaacgtacatatgcaaaaatttagtctttctgttaggttccgtccaattattccgtttaaatgctgacgtgtctttgtaaatta

SEQ ID NO: 114698 - DNA, 2284 bp, Cannabis sativa
  modified_base (2253)..(2259): a, c, t, g, unknown or other
ctcttcaagagacttgagcttcacggagagtttgtggatttcctcttgagcgtcccagaggtccttcttcccctgaggtaatgacatctttggccttcagtgcctcatggtcccgcaacctgagagccttctttgctagaacatcatcgctaagagtctccatccaatcctctgattccctgagcttcctcatcacaccatccatgccacctaactccgagaggggaaacccttggtcaattaatgtcttggtaagttgaccgacctctacagcaatctgacaagtgaaataaggttaggtcttcaaaaaataagatcgaaacaaaagaagtatgggaagtaaatactcaatgaggttagtgcaacgctcatatcctggatttgatagacgggattggaggaagcacaggctgtgtatctcttcgttggaagttgggtcaggttggcagcaaagtgacttaccagctcaaaggcgaatgatgccaggtttgggcccaggaagcgcttaaaccattcaatcatggggtctcggttcaggtcccatatcttcctagtgtactcccctcgaaagggtccgtcgtgggcctcccttaaccatttcttcaaagcctcagcctcagcattgcctttggatagctcgtccaccgcgtagttgtgcttagcattacagagttgtatcctctcttcgtcaggatgtggggggttcaagagaatggttggggagcggcgaagtctttggcctcagtcagaatcctagagtcagtgctaggaccggggaaggctgcttgcttaagttttaaagaaggctctggcaaagaaacaacacccttccatttccaatcgagtgcgggaacctcttcctcctcttcttcttcaataagaaccacctcctgattcccaggtacttcctcggttggtccccccggagtcacacttgctcgaggaagctctagcatctctggctcaggactgtgggtgcgggcaaacaaggctagcaggtcctccatgggttttgttgttcaaaataaacaaagagttaaaaaagcactaaaaaattacaagttcaagaataatacagcaaggctaattataatatcctagaaaatattatggtatttaattgtgcatattttattaaatatgcaaattattctggtaatgaagtaagattatgatcttacttaggttaattaatgtgaatttaataaatgattaaatagagcgtaatgtattaattacaaagattttattggattatgggagtatcgtagataccatttccagaataaaatgttttcgggcctagtgaccgtggaaactcgatggagcggttgaaaatgtcacgataataaaatatggatcggaataaaggttatactagactagtttacagtgttaggttgtcggtttggcagattggttagaattaccaaaatatccctagattttacatagtttaagttttgtcaagaagggtaaaatagtcatttcttgggctagtttattttttctttcagtgtttaataagtctaaaatttttgatttaatattagtatatagctgaataatgttgggtattatctataaacctcaaaattaagaaatacaaccaaaaagggatgttttattcctctccccttcgagcaactaggagctgaccaagaccaggaaattcttcatcaattctctgtggtttctagcagatttttccattcaagttcaacctagaagcattaacgtaagtccttgccatgtgaattaagaatttttaagttttaagctagttttggggttagggtttaaaatttcagggttgtgttgttaaataaagtttagatattgttttctatcttgatttaaggttttttagagtttagtttcattgaattaggtggttgtggtgttagaattggagaattgggttttagaacttaatttcttggttttagcttggtgatttgtataatttgttgaattgttgtgaattgatggattgaataccttacttttgtgttattatactattctggagctgttgggcaagtttggagagggtttgaatttggggaagaaaacccatggtgttttggtctgccagaaccgatcgaccgattggttctggtgcaccaaagccggtcgaccggttgtcctacagggggaattcttggggttttcttcaagttctattttggctcgaggtggtacctagtatttgatttgggttatttatgttcaatttgacctgtgtgagcnnnnnnntttgcttttgggcttagatgcatat

SEQ ID NO: 114699 - DNA, 3635 bp, Cannabis sativa
  modified_base (3545)..(3578): a, c, t, g, unknown or other
cacattgtattatatataccctttgtatacactaaaagagatcatcagaaaataaaaatcatttctctcatttttctcatttttctacaacaagtttcttttctacattagtgatatatgcacaaacatacatttatatgaatttaagaataaaagcataaattccacagcaaaaattataataatagagattgttcacgagctcaccctcagatttgatagagacaccaaattcgtatccagatcgctttgcagatactgtaatcaatcccgatgatttttgctccaggacatcacagcttcgctcaaaaggtttcatatgacaaaacctgccattatttattttcaaggaaaaaagcagtgatataatcagtgtacaaatgtagtgacagaatactaaaaaatgccagaagttgaaataaccaacaaatgatttctagtaaagcttcaacagttataaataaatcaaatctttcattattttctacactcgaatggttattaaatgcaatgagtaaagatatgtgcaccaaaaatatgcacccaaacattacaaacagagacatatggttaatcttagggtgcacatatcatcactctaaatgcaacagcttgtgctaactcaaggtatgtgtatatttgttacatggctctagagtatcatacatggaaaatccaagttcaatttccctatttacatggaaaatacaagttcaatttccctatttacatggaaaatccaagttcaaacatttattgcatatctgagtaacatactttgcgctatgcaagatacaattgaaaaaaaaaacatggtagcctaagactaataccgtgtccatccaacacctgaaaggaactagtactctacatttatttatgtatcttttattattttggttcaagtgaaagtcggattatgtacatatagctaagatctcttgaacttgctcattgggctttatgctttgaattaaaacctttcaatatactaaaagctttggagtacgaaactcatggttgctccctagatggaattgtaacttctaagaggagtaaaccacaaagcctgatcactagttattctttatgacagtttttttttttttttttttgacatctttagttgagtgaattgtttgaacctgacagacatgaacactccaaagtatactaatgaaatgcaagtaaactgtatatagagtacataaaagtaaagatagcataaaaagtacatgtaccattctggaggtaagttattggagtcaaactcaaagtccaacattctccactttctgcatttatcacactgcacccattcttgatcaggcttgtaaagaatgccgttcttgctctagacacaagtggaaaaaaacaccaactaaggcacatggttgaactcaaaaaaaaaaaaaatcctcagaacacttccatttcaaaattagagggagttgaaaaataaagttcccagtccatttatatagggaatgcttatcccctggagcatatgcctttccacagtaaattgaacatggatcacagacattgtaatcagcaagctacaagtatgatgaagaagacaaaagagacagatacttggttgttattttttcatgtcattacttctgaatatcctatttggaaactacaacaatgtaaacatttacaaacattaatagttttggtaaatggacaatgcaacaccaaatattataggttaagagccaccgcagatgcttgacacgaaaagtgatactggtgtggtaaccacatggataaattaatattgtaaaaccaccaaattagtgtgtagagctcaacaccacaggctccatagtccatagcaatactctaaattataaatttaaagtttttatcatgatttaagtaaactctgttagacatttcatatattataatattaaaactagatccaaagtgaaaggcaaaaagggaaggaaaaaaaaagcataaaatattagcatggtacacaatattaataggaaaatcagtcccctagcaacaaaatatacttgactacagaaaaattgacaaggagcccctaagaaatgaaaataatccccacagtgaacaggatttcaattattttaattctttttaagaagaggatcagatagtgaaaagaaaattttcttctgtttcaaaaatgtgaaaccaagcaattataccagcttcttatcaaaaaaaaaaaaaaagcaattataccagctgcagtgcatcatagttatcatcccaatattcatctgctttttgacctaaccatttttccaaaattgcataaggctcacagtcctgaaatccttgcttgttgttaagcacccacacacgcccttttccatcattctgttaggagatggggaagtttcgttccacacatgcatcaaatggcaaaaaaccacaatattagaagcccaaacattaatcttgaaaaagcttcacaagattatagttaaattgtagttgaatgaaaaatcaaaattagattctgttagctgtatattaagagttaattctagtgtcccaattgtataagttatctaacatagattcctatatttgtatatatatgtgtatactatttcaatgaaatacagcttgattttttcttcacaaaacacatgatatcagagcatatattagaattcaaaatttgaattagggtttatcacaaaattggtatttgaaactaggatttgaaatttaccttttttagggttccacttttcggaagcgctatttgtagagggttagaatattaattgtagattagccagaaaatagggtcaattgtaattatttcttttcttattttctctcctttcctagtttagtttctctaagtttgtataaatatatgttatttacatgaataaacacacaattcaattcaccattttctacacagagcacttggactctcacagccgataatgacggacaagcactaacagattgtccggtcgtcgatctacaaaaccacaaaattttgtggccagaaacccagggcgtgatccccacgtgccaccataagttcaggcaacgttccccatgcgccgccatagagtatgagaaagcatgttgtattagtttccatatgtttattggtagtttataacttaggagaccatgtttatgactctgattagagtttttgttttattttcaagttttttgttaggactcaaatattagcgggtctatcattttcccttgttctcatgttacaaggttttcctctgctaaagcctataactgaagactatttaataaactcgggaggaggtcagtcctagacatttgacctttgtctctttattaaatttaaaataacatagttaatgatacaatttatattatttcatggaaattgtcaaaacaaaagaaatgttaccactacatcggtaacatcaatgacgcctatgacaccacggcccatatctgcattatgaatcgccccaccaactctcttgtaagcctgcaagaatttccagtgtgtgtgtatttatatatatagatatatatannnnnnnnnnnnnnnnnnnnnnnnnnnnnnnnnngagagagagagagagaaataaaatggcagaagaaaataaacaagcatgaaagaacag

SEQ ID NO: 114700 - DNA, 2655 bp, Cannabis sativa
attttgaggtctatttggattggatcggatgatgattttccaaatccaattactaattggattggatcagatgaggaaaaaatggttggattggatcggatgcccacccctagttctaatgaaataataaatatatagccaaaacttactgaaatccataaaattaactttaaaatggtataattttccaattttacattaaaaatttctttgaaaacgtaatctcctcctgacagatcaattcaagagtaaatgataaggtgtaaaaatagagacccatgcgtatttattaataactgaaaaataataattaattatttttaaccatttctaatttagtcccttatcaaatcaaaagttatctttgctatcacacattaaaattacgataatcatattattaactcataaactttattctaaaatagaccacatacatttgattcatttatataatgacttaacacacattttatatatataattgtgagctcaaataattatataactatatcaaattttttcttattaaatttttatatttaaataatatatttataataattaaaatttttgtatatatattatttgtgtttatttataatttaataaaataatataataataaagaaaaatattattttagtgtaacttttaattttacaataaaaaaaatatttagtgttaaaattttatcatttttatgttaatttaataacaaatttaacattttccttacctttgataactcctggttgaatcaagatctcgtggtttgatacatttggtttaaattatagacaatcatcaaatcatcatgtatttttccaaagtacaaaactcttcatcaattaaatgttatatattaattaaatgataaattaaaaaaataccattcaaaacataatttaattatctggatcattttgaaaatgctattctataaaggggtacattatattaattttatgatatgagtaaacacatatcgagtaaaagtggaattctatggtaggcagtcccaggttcaatattgtagaattggtaattgtaattgtcgggaattggagacaaatactggttactcatgtgaaagtgacaagtacaagttgctcaaagaaaaaagaaaaaaaaacccaatagtcaaaccattaacatcatttctgcacattattacattattcattttcatgtccttacaacaaaggtcatcttcttccataatccaaaaaaaattctgaaaactgttcaacatttttggccacagattttctttttttaattttttaatgggctgtcgtcagtataagcagtgcacacagttctatagagagacagagaagggtggcccagccccacaaggccaccactactacttttcttgacaaaaacccaacatgaaatttgtgctttggactcaatttcttttctaatatgaatcagctatattacattatgattggggagttgggacttaaattctgcggccctatcacctaaaatagaatccaaaacttaattttcaaacaaatgttctttgtctccacgatatatatacatataatatggtgatttaattccggtatgaattattataagagcattactttttagggttagatatgactaaaaaaagaagtatgaaattggctaatgtagaatttttctttctcttgtatttatgacctataatgtggatgtatgtgttataatgtcagtgagagctagtgagatatcaaagtttgaaatagtgtagtcggcaaagatggttaggtagagaatagaatagagagagttacactgttacagtgtaaaggcactgtcaagtgtgtcaatcaataataataccctaaagtagggtctccagaaaaagataatgttgtgtgacagaataatggtgacccattattcaaacagaaaaaaaaaaagaagaaaataagacccttcaattttcaaaccacaacaaaacaaaccccttcaatgcacttgtcaaatattattttaacacgttggaaaatgaacgactattaggctctttcaagagctttgggcctacgcactaatgggcctttcacggttcagtttgattggtatgtaggagtgaacatttaaccaattctaataaatgcaagtcattatttttaaagaattttttattttttattttataaaaaatacagttttgtattttttttttaacccaaggtacgtagcaaatgaaatgacatggcaaataaaaaaaaaatggaattagacgccatatatgtgatctccatgcaaataatagcatgggatcgtcatatttaaagtgacatgcaaattacgtgtatttttatgtttattccttaattccagtaatttagccagggctgacttcgaccctatcttagggctccagttacataggggtcccaaaaatttcaaaaatattatgtttatatttaatttagaaaaatatcactttctatatgtcaaactgaaaagtatgtttttcatattcacagaagtctcctttttgtaattttatattgggccttcattttttttatattgttctcttttatttttaccctcttttttaaagtttattatttttacctctttttttaaacattgtaccaattttacccatgtcacctcaagatactctccatg

SEQ ID NO: 114701 - DNA, 1975 bp, Cannabis sativa
  modified_base (1941)..(1950): a, c, t, g, unknown or other
cttctgagatcttttacttgttttctgcagggaccttagtaacaacacatttgaggcaacagaacctccagtatggttctcatcattgccagccctcacaactatgtaagttattcagaggttacacagatttttcattgcatcattcattaaaaattcctataattataaattctgaaactttttcttggtctccaggattattgaaaacggaccactgcaagggcgaattccagccaagctatttagctcttcacagttgcagcaagtgtaagtacatatatgaggactgaagactcgacgcattttaataaatttatggaaatattttcactcacacttttgctcaactctttgcaggaaactgaaaaataataaattcaatgacacattgaacatgggtgacagcattagctcacaactgcagcttgttgacttggaaaacaatgatattcaatccgtaacagttggattttacaaggaaacattaatgtgagatcatttattgccattcatctttggtttttggatgatattaaccagctcttatgataatcattcctaaatataaattttatgtttatagacttctaggaaatccagtgtgtgagactagtggtattgcaaattctaattactgtcggcttcagcagcaaccttcaaagccatattcaacgagcttagccacttgtggaactaaatcttgctctatggataaaaagctcaatcctcagagttgtgaatgtcaatttccttacgaggggacattatattttagaggaccttccttcaggcaattgactgatgacaataagttccatgaactcgaaatgagcctttggacaaaacttggccttaatcctggttcagtgtctcttcaaaatcccttcttcaatgttgatgactatcttcaaattcagctggatctctttccatccactggggagttttttaatagatctgagattcagagaattgggtttcagttgagtaaccaaacttacaagccaccacatgaatttggaccatattatttcattgcagctccctatacctttcaaggtaattgagattacatattttggaggaatttaagatttttgtttgtatattagtttgacttacaagaacaaaaacattaacttatttcaggttcacataaaggaaattcaataagcatcggagcaattgctgggatagcagctggttgtgcagttttggtgcttggccttgtagccgtagcagtatatgccattcgacagaaaaaacgcgctgagaaggccattggattaagtagaccttttggtaataaaaatatcctatgtagccattgtttgtctttgtaatttgaacatacataactaatctcactatgttccagcttcctgggcaccaagtgggaaagatagtggaggtgcaccacaactcaagggagcaagatggttttcgtatgatgaacttaagaagtgcactggtaattttacttcaagtaatgagattggatctggcggctatggcaaggtaaaagttcaagattcatgccttttatcaacacgtttgatcttttcttcaagtttctgctcttcaacttcttttgtttctcttaacaggtttataggggacaacttcctgatggacaaatagtggctatcaaaagagctcagcagggatcaatgcaaggtggacttgaattcaagactgaaatcgagctgctttctcgagttcatcacaaaaatcttgttggccttcttggtttctgttttgaacaaggagaacaaatgttggtctacgagcatatgccaaatggaacgttaagggaaagtttgtcaggtaagttttctatctttcaactttgaaatgatcaattaaaattttagagtaaattgaataatctgaaatccaaatacattcttttaaggaggcatttggttgggaggaatnnnnnnnnnngaataggaatgggaatgggaatagg

SEQ ID NO: 114702 - DNA, 2952 bp, Cannabis sativa
  modified_base (128)..(129): a, c, t, g, unknown or other
  modified_base (2912)..(2925): a, c, t, g, unknown or other
ttttttaaaaaaaataatttttagaaacttgccataaaaaggttattagattattatcttattaatttttttttagttcccattgatgtattacccattaaaaagtgttcgatatatatatatatatnnatatatatatatatatttataacagacgtagcctttaagattaagagaaactaacaactcaaccttttattatagtcgtcccatatatagccacaatccctttctctggagctgcgtgggaagaagaatcacagtcattatagctaaggggggaccattgtaaatatcattggtttaggggggcctataatcactttcaacgtgaggtccccatactttagtttggggaatgaatgttacttaatctgaatgttttgttactttttcattaaacattgattatgataaagagtatttcactaggcaggacactttccaagttctaacttccatgattccttaatgaaaaggcaatgctaagttaaatgccatttttattaagctattaattaatccacccatggataattaatcacatgtcaactcaaccagacggcagatggagtccgtacgtttcaacacttttcttttaatattatttcttttcttgttgataagactcctacctttttttttcctttgtctaatgactaaggattacttcaacgattaattcatatcgagatcagccactaccaactgaccaagacataaaagtaaccgtgacaattaaattgtgaattcccaacccaaactttgagcatttcaccaatatttttttgtttttaattgaaataagttaaactatcataaataaattcacagcagtgtaccattgagagttattactatgacaaccttgacaagtatggaaatattaaataaactgtcttgttacatggtgacattctcatagaatttaactctatatttattcttttgtctgaccacgcaaacatagaagtttaataagattttaattggaaaggtcgacctcggccaggttggactccacatacatacatacatgtgtcgtgtgtcctttaagaaaagctcatcaagacatagtcaagtcacattccctggcctattttcttatttcccaatttggacataggttaaatcaaatcccttaaacttgtgtgttttcccatattactaataattgataatagtttaaaataaccataaaactaatattatgtgatatatgctatcccatatttattccttacagcgtgtacatttgataaacccaagtggaatcaccttccttaagtgacatctatggtctaccaccacatctatactaaaaggtaaaagaacatgtactctagtctagttaacaaaagttatagaaagaaagaaaaagtaaacggttgatgcttttatcgcaaaactgtaaattaaaattctcattgttgtcaactaaactagttctaaattatgaatttatcaaacccctaggcgtaagtagtacgtacattgattaatagtatttagtctttaatgcttagttgtaaatggcgttagtaccatcctaaaaactgaattgatgacacaagaatatgatggaaattgtgaaaatgacaaaagtttcaagtgccgtgagtatggaaaaaatagagaagcgggtcccataagactccacctcatacgtacatatcacagaaatagagtctgaaagatagagaaggcctggaacaaaggaaagcagatgacggatcatcctagaaaaattataatttttttattgataattacataaaatattattattacattcaattttaccttttattttttatattattataatattttataaaaatataaaaaaaaattacataaaaataatatgaaaaaaatccgaacattataaaaaaaataatatacaaataacaacaaaataataagagtacaacatatgttgtctaaaaattctcccaaaatacgcgacagttcaagagaaagccaggtagcaacagggtccacgctacaggacacgtcgccttaattactcccggggtccattgtttaaaaggagtaatcacagattggtcatctccgggaggatcaatatggaccgcgagcatctctcggttgttcctctataggagtgaactataatcggaggatggtatggaaggactaatgaaagatgacatgtcactcaaggaccaagacaatatatatacatttaatgcggcatgggaagaacatcagatgccttactccgataagcgtgtttaagggtttaagcctattattcccagatttcacgagctcccatacatcaattgaaggctgcataaataagctatcaagtcataaataagtgataaatcacatctcaccaaatacccatagacaacctaaaacccatcataaaattggcaattatgtcctaaattagatttgaaaaattatgccaagtatggtgaaaacaaacacgacaatagtggccttttaccaccattatgagcctataaataccccaataacaaataaaaatggggatcagtcagaaaagctctgtaataaatactctcacaaacacagtgacttgtggactaagacttattaatgccccaactacgtaaaaatctttgcttcgaacttccattaaatacttcatataactttaattatttgttgctaaaaatctcattcaatattttggtgctttcattgagagttgtagtatgtttgccaaaaaaggaagtcttctaaggtgaaacccatactgagtagggcttgctagaactagatgtttgatgatgctcctttgtcgatcattatcatgcctaccatcatattagctacttaaacctcaacaactggatgattgttgtgagtgttggaaatattttaccaagatatagatttactaacaagtatgnnnnnnnnnnnnnntaatatgaatttctaaaacaatgatat

SEQ ID NO: 114703 - DNA, 1029 bp, Cannabis sativa
  modified_base (1000)..(1000): a, c, t, g, unknown or other
aaatttcccttaagaaattcataacaaacacaagcaaattaaaactagcaagtagaacattcatcacagtatggctaatgtcttcatcaccttatttttccatctcatgtacttcaagcatgaatattaattaatataagcagtgggaaacaaatgcagaacatttttccttttgagtgttgcaccaagtgactcaatcatgtcaagatcttcatgtttcattccattagggagtttccaattgaaatggtatagtaacaatgcaagggtaaactcgacatttacgagaccgagcgatatccctgcacatattctcctcccagcaccaaatggaagatactcaaaatggttaccctttgaatcaatagagctattaaaccatctttctggaataaaactttcgggttcagtccaatacttaggatctcttgcgattgcccatacattaaccatggctcgggttttcgcaggtataacaaagccattgatttcgcaatcatgttgactttctcttggaattaagaaaggaagagaagggtgtaatctcatggtttctttgacaattgagatcaagtatgtcatttcactaagcattgtttcatcaatatttgaagacccttttctgttgaaaacttctctaacctcttcttgtgcttttttcattatgattggattctttatcaattcagacattgcccattcgattgttgtggttgatgtctcaattccagcactgtagaggtcctgaaaaaaagatataatttgattaaaaccttaattaatctatacatgtagtcattaaattattataatatataggtacgaaacttatattgttttttaactatgaaaatgtaactaaaaatatttccatttgctgcaaattatctaaaatagttctacataagtacttaatttaaaatagctttattttaatattttagtttaatttctaagacttacatatatatatttatatatattaattataatttttttntttttttttttttgcattttaacggaatt

SEQ ID NO: 114704 - DNA, 3503 bp, Cannabis sativa
  modified_base (26)..(42): a, c, t, g, unknown or other
tatattaataagtaaatctaattatnnnnnnnnnnnnnnnnnttagggcattaaacccaacaaattgtgccagtgaggtatcttaatattcgcttggcatcatgctaatgagattccaaggggttagccatgaattggcaaaccttgtttacactaaacgatatttcaggtatggtaataaccaggtaccgcagggcaccaacaatggacctgtacaagtgacgattggcaacaggtgggctgccataagcagataacttgagaccactgaccattggtgtattggagggcttggctgcatccatttcagccctgtgtagaagatccctgatgtattttgcttgagataggtgaaggccacctgatgtagaagtcacttcgatgccaagaaaaaaattcaaatctcccaaatctttaagaggaaacttagcatcaagagctcctctgtaatgagctattagcttctgcctgtgatgattatgtcatcaacatatacaagaatgactgtcattgatagaggtgtatgtcttataaagagactgtgatcagacttggaagaagcaaatcccagggacaacatgcagtgatggagtttctcaaacaagggtcgaggagcctgtttgagtcaatataaagctttttgaagtttgcacacaagatctggagaggaagggtcttcaaaaccagggggttgcaccatatacaccttttcttgcgaatcatcatttagaaaaaaattattgacatctagttgctttgttgtccattctttggtgagagcaagggtaagaacaagtctaattgttactggttcgacaacaggactaaaagtttctgtgtagtcaaaaccaggttgttgatgaaaccctttggcaacaagtcttgctttcagcttgtggacactcccatcaggattttcctttttcctatacacccatttgcaaccaattgcagtccttctaggtggaagcttgacaagggtgtaagtcttgtttcttttcaatgcaagaacctcatttgccatggctttattccaatgtagttgttgtagggcctgcttgagagtagtgggaatttcagtgacaatgtaggcttcaggctttttaattccattcttggcacgactttgcatcctgtgagaattgacagtggcagtgacagatgaagattctggtgcagatgtcggcacaacaaaggtttgaggtactgagacaacatcaatattggaagcaatctgtccttgattgatagtagaaactgttgaaggctcaggatcaagaactgaggttggtaatggatcaattgcaggagcaggtgaacaaggaagatatctgacttcttgtgaattgtgctcctcaccacttgcagtcatagataagtcataaaaaccagcagcattagtgtgagtttatgtcatatcatcatcactgggaaacaatgactcagcagtataggaaataggagcaataggaattgtgctagatgtagcagatgtgaactcaggagatggaatatttggtgatttgaagagataagaggggaaggaatgttcatcaaatataacatctcttgagatatataattggccagactgatccaaacatttatagcctttatgattaaggctataacctataaacacagggagaggatctaaactcaagtttgtgtttattgtaaggcctaatgttgggaaaacaactacaaccaaacacttttagcttggagtaatctggggtgatatgaaataacacttctatgggggacttgaaggatagaagaggtgttggaagtctgttgtggatatatacagctgttcaaaatgcttcatcccagtattttagtggtaaattggcttgagctagaagtgtgagaccattttctacaatatgtctatgttttctctctgctatgccattttgttcatgtgtggtgggacatggttttctatgcaatataccagcagcatgtaaagtgtctgtaaacgatctatattccccccaatcagattgaaacatcttaattttagtgcctagatgcaactcaacttcaactttaaaaacatgaaatgttttgatggcatctgatttgtttttaagcaaatagagccatgcaaaccgagagtacgcatctacaaaatgaatgtagtatttgtacccattatgagatggtatgaaagatggaccccatatgtctgaatgaataagttgtaaaggagctgtataacttgtttcagaaaatttggggaaggggagtttatggatttcgcctaaacagcaagcagtacacacaaattgagtcattttattgatattggaaatattacaaagagagatgacagatttaacaaccccttcagaagggtgaacgagcctattatgctatagctcatactcattgaaagacttattgcaactgacaaaaacagaggagttagaagactgtgactgtgttgacacaagggtgcttggtgacactggaagaagttcttggggatggggaggcagacagctgaatttggctagagtcaaaagtatataggccattgtgatgtctcagcagtgtgtaatttctcacctaatccttgacataacagacattaggatagaaaacaaagtacacatgattatctgcagcaaactttgaaacactaaggagattcatagtgatttcagggacatgaagtaaattgttcagaattaaaggtttttgacatgtattagaatgcagataagtgttaccggtttgagagataggcaaggcagctccatttccaacatatagcttatcaggcccttcctgttcagtttgtgtcatgatgttatggctgttggaattgcagtggtttgtggctccagaatcgggataccagttgtcatcttaatcctgagtcgtattgcctgcggttgtggtgagtcagtagctggaaacacaccagtgaaacttttatcgaatctatagaaacaatcaatgacagtgtgtccaagttgatgacaaagttgacattggactttgtttggtgcagcacagaatcatgctcctcttcctcgtgccatcgtagtgacctaagtgttgttgttacttcctcgagaagagtttccacgaaagcttcctctagtattggaaaaatttggagaattaaagctattaggccagtattgacctctgggataggcaggggatcagtaattgcaatttgtttgagcaaagaaagcttccatagtcggatcttgatctagagtagccatattcacactaggttcaacttcttgatcctccttctcgattcaagatttagaggtaagaagtaaagcttcgatttccccaactgtatagccttcaatccgagtgtttgtcgaaatgataaatgtatcatattcgcttggtaagcccttgaaaatagtagctatgtgatcacgatcaaacataatctctccaacagaagctaaaagatcgacatgttgcttgactttgagaaggtaatcattgaggttcaatgctcc

SEQ ID NO: 114705 - DNA, 4548 bp, Cannabis sativa
  modified_base (542)..(553): a, c, t, g, unknown or other
  modified_base (4488)..(4504): a, c, t, g, unknown or other
ttttttaaaaaataatacgaaaacaacataaaatcaacaagaaaactacataaaaataacatcaaaataacaacaaaatataacacatataacataaaataaacaacaaattaacaagattataacataaaaagaccgtattttttgtaaataaaataaaaaaaatcggaaaaatatttaaaattccgtaaaattatatttttataattttttgttatttttatatttttgtgaaattaataatccctatcacatatgtacatgagcctagctattgggctgctcaagctatatattataaacagtattatacatatatattttatcaataactaaccattacattaaatattcaaagagaaaatgagtaacttaaatatattatagaggtgcacaatgcacatcatgattgtttaatgtcttttagtaggaatgtaggatatgctgcattttgagttgaaaactatgagcaatacgcctgtcaagtcttgaaatgaattaatgaggtgctttcaagtttcataatattattattattattnnnnnnnnnnnnattattattattattattacatgtatgaactcttttcatttacgggttgattgggttttgggttggcgagttttaagttatcgggttttgggttgaaaatattgtattcggagccggtctattcacgtgttgcgggttggtgggttggcaagtttagtttggacggattaatcgggtcaatcctaattcaaagtggtaaatatctcttttaaaataaggaaaataacaatctttttatattatatttaaattacaaaaaagaataattaaatccctaaggtattggactaatatcttagaggaacattcctatctttataggttgttggaacagccccgtaattgtagtttagcttatgaatcttctagaaagttcgttgtggatcccacaatccattcagcctttctttgaggctgccggcacgtgttggccggccagcactatttttggggcctggctggcatgtgaggctctactggttggctaggtattgtgtggcagggccggtcctagaaaaaaatgggtctaagactactttaataaaattttaattttaaataaaaaaaaagagtacaatcttgagtactcgcgtgtaggaatgataattttagtgtttttttttttccatactttttgctttgctttcacctgaaattttaagtttggtaaataaataagctattgggccacttgggttgggcctaagttgttataacttacatgggtcaaatatatgtgtggggttttttgggccttggatttggttgagctctaaaaacaggtctagtccgtcttagtccaagatcggacatgtggtctgcaagggttcccctagcttgccattttcctctcgtttgatcctgcttgacaatttacaaaccgtgcaagttaatcttgtcctgacaaattgtatttcacgtaattttaattttaattatgtgaacatgccacatgaagtagataaaaattaaactaacagtataattgatgtaattttcccaccaatgttcttttattatatattggacacaacttaatccttaaaaattctggatgacatcattgatatgctggcttgcaattttgactatgtagtggtaattattataattagcataattaggcacacactctttgactttattttgcatcaattaataaattaagggaaattttatgctagtttcggtaaactttctttcagactagttagtttagtatttaggagagttttgtcaatttttttttgtttaatcatgattgagtacaatgtatttagttaccacatctaatttttttttttttaaaaaatgaaatagttttgggtactaaaattaagatttatatatttttgttgtatctataattattttttttatgtgcttagtggctatttaaattttattttcaacactgtaaattattctgaattttttaaaaaatttataggtagttctaaacaatataacgtacacaattataaaaaaaaactaaaatttcttattaaagtcgaaaaagatagggctgacactacaaaaatcttatttttagtcacagtaaaatttgtgactaattataaattattgttcctatgttgtaatctaaaatgtccttaaataaaagtattagtcacaaaaattacaatgtattgtgattaaatgtagttttagtcacaatacttgttgtataaaactaaattcgtgacaatttgtatctaaatattatattttagtcacaattatctttttattatgactaaaaatcacatctaatcgcataacatttatgctataactaaattattagtaacatatttgtttttgtggtgcgaaacacctctataaagatcgtgtatagattttttcatttaatatggccatataaataaatgtttaatattcgctaatatactttaaaacattatattgagtgatgtaatactgttttttttttaaattataaatattaatgtaaataaatgtgagtagttagaaagattaatttctacacatcaattattggtgtagaaaatgtgaaagaaaatctgctgtccgaaattagtttactcttcttctctcactaattattttagtaaacatcgtttatacctaatttaacatatatataataatataaataatatgaagtgtgacaagtattatatgtataaaataaattaaaaaaaacaacaaaactttgacccgtcatccatataattataaagtaatcctacttattagttctccattattatttaagatgtttcaaacttttcagtcattaataatgatagaattttgcattaatacatataatcatggattttggttcgcttcttccaactgctacagccatttttgcgtcgtcggtttttgtgtatcttcttctatggaaatggaaacagcaaagacgggaggtggtagagctagttaatcattgtccagaagccggcggcgcatggcccataatcggccaccttcacctattagcgggctcagaaccacctttcaaaacgttgggggagatggcagacaagtacggcccattgttcagtataaaaatgggagtgtacaaaactctggttgtaagcagctcagaaatggctaaagagtttctcaccaaaaatgacagagtcttcgcaaaccgtcctaaaagcatagcctcagagatactgacttacaactatgctatgattgggtttagcccatatggttcatactggcgccatgctcgtaagattgctaccctccaattactctccaaccaacgcttggagaaactaagccacgtaagagaatccgaggtcaaaactgccattaaacaactgtacgagctttgtgtacagaacaagaacaataacaatgatcatgatgatgaggtagtggaggtggagatgaaagaatggtttggagatataactcaaaacgtagtgtttagaatggttgttgggaagcggtatgttgaagccacaagctcatttggtgaacgctaccgaaaagctttacgagacttctttgtgtttactggaacttttatggtgtctgatgctattccgtatgtgaggtggttggacttgggaggttatgagaaagccatgaaaaaaactgccaaagagcttgatgaattggctcaactttggatcgaggagcataagaaaaaaaggcagcaacaggtcgatcatgatgatgatgatttcatggacgtcatgctttccactcttgatcatgatgactccgaattcggagactccaattccacctacgatgccgatacaatcaacaaagctttgtgtctggtacacatattactttttttcaataatttaatgttaattatcatgttggtatagatatataataattttttttaaccctcccaactattattttactttcacttaatcttttaagctcaaattttaacagtaaaactattcaaactctatcactctacttacaaatttaaagtatcattcactttctaattaagtgtcaactttcatacacataataggtttatgtaagtatacataatattattatttaaaaaatataaaaaatattttaaattttataatattttttattttttaaatattttttttattttatagtattatttaattttaaataaattttgaaaataatttttaaataataatattcagtatattaatataaacgtgcgtataagagtatgcacataaacagtctatggtgacaattaaccagatgacactttaaatttgctctagtccagtaatttagagggttttacggtcaaaatttaaatttagagagttaaatgcaagtgaaacaatagttaatagaattttgccaaaaaaaaaaaaaactctataataaaaactaggctaattagaaaattttcctcctaaactttgtcatgtactaaattgtgccccctgaactttttnnnnnnnnnnnnnnnnnccctgaactattgagattgtttaatttaaggacttttgtctaat

SEQ ID NO: 114706 - DNA, 2646 bp, Cannabis sativa
aaaaataaaaagtcacccatgaatgaatttcagttatataggcacactttatatagaatagatatataatttctttaaatttagtgtaatatatttataattaaaaaagtaatatattaaataataatatgtgagatcataataattataatatttttgaagatagctatattattggagtgtttttagaagtaagagtgcaaaaaatgatgtggaagagagataaaataaaatattatatttttggataatgtggatatttttagggatgctattattggagatgctctaatacccctaaaaattactcctaaaaaagtgtgttaaaaatcaatttttacttttagaggcgacaatgacattgtcgttcttaatacttctaaaagtcactcctaaaaaaacgtgttacaaaccaattttttaccttttagggccatacattaacacatatatatacatacactttatatataaacacataaataaacatatattcttatacaaactcacacacataaatataaatacacatacatttaaatattcacacatatatacccctgtaaaaaaatacacgtatacatatatacctactcatacacataaataaatatagggacacgattttgtcccgtgatatactttcacggaatatattccgtgatacattagatggtctcagggtacgttactatttttttaaccctaattacccctagataaaccccagccctcagatcaaataactccttcatctgacggctgccctacatcacggaatacattctgtgaaaatacatcacagaataaaattatgtccctataaatatataaacttataaaaaataacatatacaaagataaaaaatatcactgtaaatacatatatcaaattctaatataattaaaaatttattatctattttccttttaaataatttttttataaattaattttatcttttaagtgatgtataaatataaattaatcaaattattttataaaaataaaaaaccaataagattaataataaatttgtttgaaaatgtaataaaaaattatttattaattatattaatctcaacacaataatacaattagtcaattgtaataatacaattatcataaaaaaaaagtgaaagagaatgaaagagatagtacttaactgaaattgagtggaggccaacgttgggtgaatactgaagttgggtggtgtgaacgtcggttagggagatgattttttttctcctttgtattttcaaaaagaatgaaatggagaaaaaaataagaagatgaaattgaaaaaaaatctaaaaataataacaaaccttgttctcggagtcgttaatgactactctctcttcttcctctttttcttatttgtggtctcgaggtcgggatcgttaatggatgctccctcctcttcctcttctatttgttcgtggtcatggggtcaggatcgttaatggagatttttcagatgaaaaaataagaaagggaagagaatgggtcgagggaagaaaataatttaagctttaaatgcaaaactattaggggcgaccacttggggcaacaaagtcgtccctaatactttgactgtgtcaaaagtcgctcttaatagtataagcgaatttttttttacctttgggcaattaataattatcaatttattaggagcaacaaagtcgctcctaatagtaatttattgcatttaatacttttaggagccacatttgttacttctaatgttgtaccgattaaaaaattaaattttcttagaggatactcttttgtcacccctaacacctatattattaaggacgattttttgttgctcttaaatttatcgtcccaaatatctcaaattgtttataccaccaattaatttgtccttgcctcaactattttaattctttggatatttcagttcgagctgtaatattaagggttttcaattcaaatcacaataataacttagtggcataccacaattcaatctcacactcacacttttattttatttttatttttttgtcactttcatttttcctcccaatcccatctttttcaccaactttttaactccacaccaaacactcacaattctatctttctattacctacaacctacattattttttctcctaacccttttctctcgatcaaacatatcttgtgatcatttcaccattcaatggtcaaattcaaatgttagaatgtatggtgacaagacataaataatttaattagttgacattgaactacatattaacttattccatattagggtcaaaaaattatattagactggattttctcactttagctagacaaaattaataatggattgaggtcacagagatagttagaaagttaaatgttacaaatattgacaagtactttttaagttttagctttagagcatctttggtttaatggaactagcattacaatgtcattatatcatatatatatatatatattgtaattcacattgtattataaaattaatgcaatgataattagtttgttagaaattgatcttttagtttttttttttatttatttttatttaaatgtggtttggtaacatttttgttttttaattttttaatcacaagataaaataaaatttttatttttga

SEQ ID NO: 114707 - DNA, 2718 bp, Cannabis sativa
tatatataccatctcaatactccaattacaattactcatataccctttttatttatcctaaagcctaacaatactggtcgcccgaaattcaccttgtcctcaaggtgaagagaaacaagcttccacatgagtcgttgctcgtcctctgtcaaagaaccaagtcaactggtgcacattgttcatactgcgaaagagaagacaccattcagtaagccgacctcgctcaaaaaaccagctgagcaaagtcacgttcttgccaatggtaagacgaacaagcgacaatgaaattggggcagcaagtagagcgatcgtcaaattgaatcccgaaacccaaacaagaaaacaatagacatctgagtttgccaaattagacattgctccacttctcctagctgctgtcctttcgttgtgaacaaaattcaaatacatcatttgggtagctattttcattgcaccatgccgaagacaagaagttatgtctggtgccaaagcagcttcttcatgtttcgaccagcaagaaaatccccacagagttattgttctgcccctgtcgataatcttgcttcctcccagatggaattcatcaagttcaactccactttgctccctcactaaacgaactaaaccttcttctgttttgttgaagaagttttctgcaataggaaatgtctccctgcactttttgataaaatcttcataagccaaattaagcttatcccattgctgaagataatattcagcagccttgatgtctctccaattgagaactacaaaagtaccacgcatatatgcaattatgcctggttctacaggataattcttgtggccaaaccagtaatacttgccataaattcccaacagtgaagaaagagcacccaagattgagattagttgcttaatttctatgactggtaaaccaaattgatgttgtgaagttaggccatgcttgaaacttccaaaagtgatactccgtcctctgtcaaaaacccataaaccgccaatcccgatgggtaaacgcgagaaacaagaattactcacccaattgtcaccgttgtgcttcacatgtaatactttagcacatatttctttttgttggtgctcttgcccaaaaccagtaggaaggaaatagggataagacaaaaaatttccagaaatggaaattaaaatctcattcttccatctttgtctatcacttggtaccaaaatggtgttatgcaagtttggccatggagggaatttttgaaaaataatttttcttcccctgtcgaaaatccagcaaacaaatagtgcattcacatttttgacgtaccccatatctgaacgtgaaggttgtctttcggccaccctcctcttctttttcgtgttcggagctgtggtgccgtacatccatcgcatctccttcttgcaatacccagagggctttaggccaaccccaaagatgggtacaagtcggagttccttcttccaaggtgtcgattgccctagagatatttcattcgctggattcatggctatcggatcctccctcactagtactgtcgtcgtctccaactccggcgaacccaacgctatcaccggtgttgtgagattcttcatgacctgccatccatggtggttgtcgtcgatttggtactgataacgattgactttctgcctttctctaggccaaaacaacgtgacccgatggatttttccaggatcccaaagggctggcccataaacctgattaattaattttgggcttttggttaagtgggcctgatctatgaagtgactcaatggtttgggcccctcctggtcaggttgcaagagcaaatgaaataataacataatattgtgacttctctgatccacaatcttcttcccatacacgacttgctgttcgtacagggaaggcagcggctgctctctttccacgatgggcaacacccgctccttcgacgtctcctcacgctggtggtcattcgacgtcggtatcgcttcccttgtgttggtgttttgtcgatcaaccccagatgagattttccttgtaactggaaagatcgactcctccctgtccagcgctggcaccgtctcaagcatcggtagatcgatctttatctccgatgttgcgtggcttaaactattctccacttctttttcagacagcaactccgattgaaaatcatgctttgatgctttgatttccaccattttcgttggaggaataagatgatcaacggaatgttcattgcctcgccgtacaatatcgtcttcatctccatcttcaccatcaaccccaagcatttcttcagaaattattgatggttgttcgacaattagatcgttcccactcttcaactccttcagtgtgctactctgatattgaaacctcagttgtccttcaacgaagaatgctctggctatgacttcatggagtgttctcaacttatattcacgcaccttcctcttcaccaccaccggcagattcccaataaatatatcacagaggaaagtttcggggatatccgacaattttgctgccaccggaatgaatcgtatccaaaactccaacaccgaactgtcatatcggagagccatcaattcgtcgaacggatcgttatccattttcgagcaacaattgaataacgtgatgcggaattccaaccaatttttgattggatcttgctcctccactgcttgaaaccatctccaagcaacatcctctaaacatgcttg

SEQ ID NO: 114708 - DNA, 1049 bp, Cannabis sativa
  modified_base (53)..(76): a, c, t, g, unknown or other
cttatttataactggcccaaatcgggacttgatttttttataacaaattagannnnnnnnnnnnnnnnnnnnnnnntaaatagaggttctactgtactactactttttttcacactttagtaatgtaagactctctaacaaataatataaatcgtagttatttcagacatcttataaatgtttaaaaaaaatttaaaaaattagtacattaaaaataaagttaaaacaatctatttatgttagtggtatatgtttgaaccttaatttttatattggtgcaccttttggagaatgcacttaaaaagaacaaaaaaaaaaaaatacaatatctttataataatttagttgccattttgaaaataaataaataaataatatagttgctattatgtaatattgtgtcacaagatctttatgaataacaataaaataaaagagttcctccccatatatttaagcaaaaatatttaggttttatttgatataaattataatatatagaaatgattctataggaataataattaaaattctaaaaaatctttttaccaagttgtgataaatagggaatagaattccaacatcttttttagtagcatgaatggacattatataatgggtaccacgtccgtactatcatcctcgtgtccctttcctttccccaatctttgtcccccactttcaattttattcccaactataattattaattaattacatggtctaataattataatacaaattatatatataaattaatataattatatatcttggattctctctcaactaaattaatatattatctcttaaccacatgcattatgaataatgttggggaccctctcaaatctattaatacgtgttatattttaaatgggaattttgattttatatgcttaaaaaattaaaaaaaatttataattaaaccaaaaatttaaatggttccaggtccgcagaaaaaaaaaaatggtcccaggtccgatggtcggaccatgggcccgatgggtccgatgtgggaccattcggacccatcggacccatggtcc

SEQ ID NO: 114709 - DNA, 1704 bp, Cannabis sativa
ttaaaagttgcattccctcctcaagacgaaacagatagtaagattttactcactactcgagttaaaaatgttgctttgcgtgtggatcaaaatggtttgatccatgtacctcggtgtctcaatgatgatgaaagttggaagctatttcagaagaaatgctcatgcattggaaaggatccaacaagtaagatatacacttcactctcattttattttatattttttgatttgataatgttttctagtcttacaatatcaatttttgtgtgtatgtgatcagcctctagagatattgaaaaaatggaagtactaggacgagagatgcttaggaattgttctggtttgccattagccattactgtgcttagtggccttctatcaaagaaaccaacactaaatgagtgggaggagatgaaaggaaatgtactgagatacataagtaatggcaaagagaatagtgactctgaatatgatggtgtttcatgggtgttaagtttgagttacaatgacttgccatattacttaaagccttgttttctgtacttggctcgttatcctgaagacgccacgatacaagtaaaagagttatgtcttatgctcatagcagaaggtttcgtatcgccaagaagacgctcaacagaaactattgaagatgtggcatatgattacttaagccagttggtggaaaggagcatggttcaggtagataattggagtttgagaggaagaatgaaaacatttcatattcatgatcttatgcgagatttgtgtgtgtctaaagccgaagatgagaactttctacaattcattgatttgaggaataaggttgaggatgagccactaagatctatatctactgttgtaaggagagttgctatttattttgatcccgttgatgatttttctagttttgttgatagtaaaaatagctctcttaggtgtgttactatagatttaagaagtagtaagaaacaagtaatgagacgtgtgttcaatagttttttcatgctaagagttttaaatctaagtttttcttggcataaggaagtgaaattgcctaaagagatcggaaagtttattcacctaaggttgcttagtattagaggcgttagtattacaaagattccatcttctattggcaatttgagatgcttgcagacattaaagttggcattgggtaggtctaaagtagtaccaagtgtaatttggaagttagaacaacttagacatttacactttgtctatgttggcataggagaatttgaatggttgaaaacgagcttgaggtcacctaacattagaaatttacaaacattgacgggtgtttcgactgagtgctttgattataatgatcttctacagttgaaaaaactcaagaaattagcaattcatctgggtgaagatttaaagagaatttaccacgattccccaagtgtcacatttgattgtcttcgacatttaaaactatattactataaggatgatgggatagatattgttcctttgatattaagctaccctcgaatctataagcttaaaatgcagggtcggattgtaaaattaccagaagacagccaattctctccaaaccttatcaagttgcgattgcgagagaccataacggatcagttttgtgggtggcagcaaaaaggttacacttctctgacccactcgctggaaaagccgcggcctgtcttttagcca

SEQ ID NO: 114710 - DNA, 4455 bp, Cannabis sativa
atataaaattttattagaaaaaaagttatacatgattttgaaaattatgaaaataaaattaaaataagtattgaaattttttattaattattttaagcttatttttttaaaaaaatattgaaatatacttatcattttgtgggattcaaatagagctcccctataaatttatatatataaatatgattataataaatctgattccctaagtattataacttaaaatggataaaaaatgatagtcctatcattcatgaaactcaatatatggtattttctatacattgtgactaaatttgaaatatgtcgatcttaaaatacaaagtacctataacgatggttctctgtaacattgtatttaatagtggttctcggtaactcctctaactttattttgtactgttattatggattctgttacaagtaaggaaactatggtggaggaaaatattaaatgtaacaggtctgttgtctgttgaagatgaggatgattgggagtgcaacgattcattgaccgaagacttggaagccatgtctatagttgggaggatcatcatctataaacgtaaatgtaaaaggaattttattcaaatagtgtttgatactatatgggaagtgactaagggatgggatgttcgtgttttagcctttgaggaatgtaatacttatgttggatttaccttttatgatgagtttcttcgtaagagagttataggaagagtgccttggacttttaatgaaagtctttttcttggagaatagtggcttgagtctggcaattggcgggatgcgaagttggatagtattattttttgggtaagaataacgaatttttaccctaaattgctaaccaagaatagtactatgaaatgacagggaatgtcctggatatcaaatgggagaacatctttttttttacctcgtttttagccaacgacgttgagtctttaaagcgattgaattgaataatcaattaataataagacaaagcaaataagagcataagaaatttatagaggttcgaccccgtgataatggtaatagcctactctcccttttattgaattacttagagaagcactactaaaaacccagaatccctaacaactttacactgtcgggtaaagaattcctgatggtctatgaagtcgtcgcctatacgactatcacaaaaattgggtagtttaggcaataacaaaaaaatgtcggggaaaagaatttgtaacagcaaaatctatcggctatagtcgatactataggccataatttaaaactgtcaacctatagtatagctgacggcattaaattgccgcatataatggatgcccacataaactatcatcttcatcctcttcgaaactacttctcgcatatgtcgcagtagctccaaattctttaaaagcttcatcctcctccaccgtcgctgtgctcgtcctcatcctcctcgaaactttcttctacaagtttcaaattgctttcacttgacgatcctcaaaactttcttcagattgcaaactttggatttcttttgcacacaaaaagatcaagatcaagaaacctaatcgtggctaatataaatttaaataataaataagaaaatattgtgcttacctttgtgctgccacaaaagagcagaggagaaggacgaagcaagagaaagtggaggagagggacagcgcaactcgtgattgtggaggagtaagagttgggaaatgaaatgagatttacaaatgactttgaaaaaatgagatatgatttttttttggggcgcttaattatatcttaagatgagggaaatgaatttaagatgggggagtgaaattttgaaattcaagatgcggaaaataaaatttaagatctaaaatgcgttaaatttaagtatgggaattgtcgactgtttaaaaccgctgcctatacctcccggtcgtttaaagaattcaaaaatactctattttttcctaatagttttaaacactcgcttaatttttttagactgttctcccaaaaaggcattttaggaccgtcgttaacacccctttatgtagtagtgaattattaagatcacaaggtttaactatgtgagtttcttaataatctcaagaaagcttacatgtatttttgcagagtaattgctcttccaagtataaaaaatttgtcccttcctcagatgacctcactatttatagaagaaaggtaatacatttaattcttagaaaataggagaagtaagttaaaattcctattttggtgagattggttgaagattggctccaagctagcaatcccatgaatctcgaattggcaagtgaatcctgaatgattataggaattctacttgttattttcgtggaaataatttaggaaagaatctggagaagatctacttctcatcatatttagctgtgtagacagttcattttgcccaacatgatcaacttcgcgacatatctagtcagcctatttgggggacatgctccgaccaactcttgacatacctgccatgtgttaccttgtgaagtgtctcgccatcttgtgcaaatttgggataacatttgccccctaaatctgcatgggaactatcgatcgcaagggaacttccaaggtctattcattgctctgattggtaacatgtgctagggttcacgtgtaattaaagaggtgacatttttattgctcgaggtgagtgtatcttctatagtctcttcaaatcctatcatttagtgctattttcaaaaactgagaaatggggaaacatgttttaatggtgacacacctccactcttttaatgattggacttttggcatttttggggggaaaacccattttcaagtgtagactgagattgccctttggtgggtctataagaggaatttcaaaattcattcaaaactttcaccatttcttcaatcttcagaacttacaaaaaaggaaaaacccattgttcaagctttgcaaattgtgatttttgtccaggcctctttcaccgaggaaactaattttcgacgcaatagtgagtaagatacttcttttttgaactttcttcaattttatttttgcatgctttaagttattagattgtatatatattttgttgctgcttgctagattctaagtttctttgaagttattttaagaaaaaataaacccgagaatcacctgattcaatttaaaaatgtttggtgaagaaattctatgttaaaaacatccattttcctctgtttctattctttgaagcttccaaattttaaaaaacccaaaattgactttttgtttaggatctttgtcattaggatagatttccctcattttgattcattttttttccttctggtaagagtatttaaattgttcttcctttggaagggcattctagacctgtttggatactcacctccctattctcttctttgtagatgaacctaggtgactttgggggagtaatttttgaatagacgactacttgctccaagttctttaagagaataaacctagactttgagcagatgaacatcctcatctccaagcaactcttcctatacttcaagtttctctgagttggaattcagtaatgattaccaaaatctagagatacaacactatcactactccgaccaaatcgctggagaagtgtatggatgctttgtgtggaagctaaatagaggttagaggccatttcatccagccttgtggatgtacagagtttgggagaacctataagatacactgcttgttggttagctagaatctttgaagagaagctttgtgcaggctaaagtggcagtaacggttgctcgtcatactcaaagactagtttttgaggtcaagtcaaaactaggccgtaaaagcaaactgcctatgctatatcaaccaataatccccacattgggatgtttatgacctcttataggcgagtcgcagaacccatggagcctaaggagcaggagcatggaaatcttaaggcctctgatggggaggtagaacttgatgctgacgaacaatttccttaaggaagattcaacgaggtgggtcaacctatttcctcatccaaccagttacttgtccttggtgatgattatactgatgtggaattagtggaggcactaccaatgccacccaaatctaagccataactgcattgagaattgccttcgtccaagcttactataatgaggttgaacaacctccgcaccaaagcccttgtcgaagatgttgcagcatttatcccaagggaggactagttggctcataaccctagtgaggggctttgtgttagaatagattgttaccatgatttagatttactaacatgtatgtttgattatattctataatctaaaattctaaacataaatttcctaaaacaatgaattaaacacacaagagattaagaaatccttaaattgatggcagcagaatataatgactcattccattcagatttctagcccttgatt

SEQ ID NO: 114711 - DNA, 2837 bp, Cannabis sativa
  modified_base (2768)..(2768): a, c, t, g, unknown or other
tgttaatgaaacatacttgttattaaatctagatcttggtaaaatattcccaacaatttcatcatctgctcattgtcctatttttttaaagcctgaaccaaaccagagttttccttataatcctaaatttaagttttaaaatgcttggctcaaggagccaatgtgttttgagattgtaagggactgttatgagaatgggaatgatgaaaatttgtttagtaaattcgctcggtgtgcgaataagttgagtgtttgggggaacaaggtgactggaaacttcaaggtgcatattagccgttgtaagaaggagctccaaaggctggccaacagaagagatacagcttctattcaaagacataaagaagtaaatgaggagttgtttcatgttcttgaccaaagagaagctttttggaagcagcgatctaaacagctttggttaaaacaaggagatcacaatagcagctattttcataaggctgccacaactaggaaaagacacaacaaaattgtaagtttgaagaatgaaaatggagttcgggttggttgggataatggactttctcaagtgatgattgattatttcacaacattattccaagcttcaaatttgtcttgtcccgaagtgattaattgtgtaaatagctcagtccttagttttcttcatgacgagttgcgaatggctgtctctgaagaagaggttaaaagggcgatctttcaaatgcatccagataaaagtcttggatcggatggaatgacacctggtttttaccagaaatgttggagcattgttggtcgtgatgtagtagctgctgtccagagtttctttctgacagggaagttcgaactgggttgtagcaaagcaaatatagttttggtagaagaaacatccagaggatatgacttagcttaggccaatcgtgttgtgtaatgttgtctataaaacaatcacgaaggtaacggtgaatcgtatgaagccgtatatgaatgccattgttggtgatactcaaagtgctttcattctgggacgtcttatttcggacaacatcctgatttcttttgaggtgcttcattatttgaagagaaaaaggaaaggtaaagatggctttatggctctaaagttagacatgagcaaagcctatgataggattaaatggccttttttggaaattatgttaaggaagttaagctttgaccaatggtggatttttttgttgatgaagtgtgtaacctcggctcaatatatggtggttcatgagaataaggagatggggccaattatcccttcccggggtattagacaaagggatccactatcctcgtacctgtttatcctatgtgctgagggcctctcggctttgttgtacaagtatgaaagagctggtcttattcatgggtgcaaggtggctaatggagcaccttgtatttctcacatgctctttgcagaccatagctatctgtactgcaaagctaccattttagaagctaccaggataaaagatatccttctaaagtttgaagcggcttctagccaaaagttgaatgtttcaaagtcttctattttctgtagcaccaatactacccagcaacttgtgatactattaatagtatgttaggcatgtctattgcgagtgaaggtagtttgtatcttggcttaccaagtatcttaagcaggaataaatttgcggtgctgggatatctcaaggaaagggttcggaaaaggattgaaggttgggagacaaagttcttgtcacgggctggcaaagaagttctgatcaaaacggttgctcaatcacttccaagctatgtaatgagcatttccctgttgcctttggacattacgcgtgatatgcatgaacaaattctggtggcaaggtgtgaataatgcttaaaatggtatacattggttctcttgggataggctttgcttacataaatctaagggtgttatcggatttcatcatctgtgggatttcaacttatctatgcttgcaaaacaagggtggaggctgctatctcgtccaaatttgcttgtagctaaaattttcaaagctaggtactattcaaatggctcctttctcacgccacagctggggtctaatccgagttatgtgtggtggagtgtattggaagctcaggacctagttaggaaaggtacttgttggtgtgttgttgatggtgaagacattaatgttctccaagaaccttggctgtcaagtgatgaagatccatttgtcaactcaaactatccttgttagtttgaatccaaagtttgtaatctaatgtctatagaaggtgggagttgagatattgagatcttgaatgacttgtttaatgagagggataagaagcttattttggatatccccttgtatgttggccacggtagtggtaagctaacttggatctacgaaacgtcaggcctttattctgtcaaaagtgcatacaatttactccaaaagctatatggcaggtggaactctagtgaagatgatcacaccaagttttggactaaatcctggaagctgaaaaatccccccaaaagtgaagaacttggtctagcatgtggtagggaatgtctgcctactttgcagcagctgaaagtaaaacgagtggatgtacaaacaatctgtccaatctgccatggtgaagatgaatccattgttcatgctctcatgacttgtacaatggcgaagcaagtgtgggatcgtgttggcattggaactcattttgtagcagctgaaccaatatgtaacgccctaaataattangcacgctacccaaaatacttatgaagccctaatcccctaaccgggattactaattaaaatagcgcagaa

SEQ ID NO: 114712 - DNA, 2201 bp, Cannabis sativa
  modified_base (28)..(52): a, c, t, g, unknown or other
ttaattaatcacgatttccataaacctnnnnnnnnnnnnnnnnnnnnnnnnntacgtttaaaaatcacgtaacacgcctagtctagttagggtgttacacaaaaagaacaagcaatgtaaacttaaatacacagattagggccctaattactctagaccaatgaatagacatgcatttcaaatagagagcacccgtatctaaacattttagaggaaaacacactattagcaaaaatgcccacaatcttatatatgcatacaccaaagcaaccctaatatctctaggtttaccaggattgacgcgcctaatccctaaatacgttatcccctgaattccaacacagggttatgcagaaacatgcaagccaaaaacataaaataaaataaaagaaacatactagtaatatgaagtgggggtagtcaaaaatctcattggccggtgcaataggtgaatgacaagtcaaggatcacgtcttagtttggctgaatgtataaagtctctggaggctgggggtttgatacaatcgtgtccaataggggtgctctcgtactctaatacgtagaaggtggtgaatggtaatattgaagggatcaaacattcacgaatagcaacgatggggttttcttattttctctttggtttctttcttaaagtatgaatttgaaatgacaaaaagtaaaattgatgaaagggcttccccctcctatattcataatatgggtttgggatccacatgcttttggatcaagggcccaaatcttgtttaaagaaacataatgctaattcaacagatggggaaccagaaaggctgtattaaatgtactttgcagtatttgaggcattttctcattatttatattccctttgatacttgtgtctgcattaaatagtcgtcattgcgacatcctaggccattcgcactttctaaaggcgcatgaagtttccaagccaatagaatgacaacacgtgtaaaatgcaaggtgtgatctaccaaaggtctttactcttttaagtcccaaaatatagagaatatgaatagattattttttcaaacaaatccacgtgtcttaagtacacatagaaatctgaaaggaagattgcaagcttttgccacttcgaagtcccggaagcttgggggtaaattttatccacgtttccagaaggaggacacggcacaaagttgaaggtaatcattgtattaatgtaggctcaagcttccccagtcacggaaggccaaaccaaatctagaatgtgcctaagcccagtgagtgattggggccttgtttggacacgacatgatctttaaaggcctggaaacctacccaaccttctagaaagataagagacgagtacgtagaagtctatttgagaatgggagctagatggtaccctgacgtgtctgctcctctgacacaaggtcaaatcttgttccctatgtaaaattatgctagtgtccgcacctactctaggtgtgttgtttttcccgacggctcctttgatgactttgtctgccatgcatgatttccgctcgaaacgtaccctgcgccaaaagtggtcctagctatacaaaactgacaacacatgagggaaaaacttctaatgggtcctaaggttgagtatattgtgtatttttgccccaatagttggcctgcttttacataaaactcaaacgggccacgggttatacccatacccgaactctagcctatataagcccctttaccccttcacccaaaggggatgaaaaaaaaaacttagtaaaagctaggcgaatactctctaagctttcttctttgtcaagaaaaaattagaaagttggtagccagaattatggtctttactatgaaacataccctgtaacaaattttaaaagcctaaaaggccatacacactcatggactaggaataattaacgtctaaaccacgtaaaaatttccattttctttacttaatcactaggcaacataaccgcgcttcgcgcagtcattatactaattaataaatatttttttgatttatttttataatttacagttattatattatgttatgcaaatatcttattattgtattataaaaaaaaagtattaacttttgtgttaattttaaagtagtaacaaacaatggttagtttggtaggatttaataattttattagtaattttaaatttcatacttttatcataaatttattacatga

SEQ ID NO: 114713 - DNA, 2507 bp, Cannabis sativa
aaaaattaaaaaaaataataattgctaataatacttttccaaatataatttttagagtaatataattctttcatcacattatatttaattttatggttgaaggagtaaaaaatagtttataaataaatgtaaattatatatctttcattatttttacgttaataaataatagaaaaaagatttttgttataataatttatatatttatttatagttttttaatcattaaataaaaaaaatgaaatgtatttaacttacattattatctattttgcattattataaccatatattttactgtgtataaaagttatattttaagagatattattaaggaacattatgaaacaaaaatactaattatttaaaaaaacaataaagaaaatacttatatatatagatatatatttacatctgcagttatttccacagttaataacataaaaggctgaaaacagaaacaaaaacaaaacaaagaatgtacattaatccaaggcaacaaggcaatacaagaaaaagtagaacaaattttgaagatatgaaaaataaaataaaagaacaaagaaaaaagaaaagcaaagcatcatcatcctcttgttgattcaaagtcaatcaatagtcttggtagagagtcttttgagaaactcataagtagtgatcatagttgtagctgacatagccattgaagcccatcttggccctaatcctctataacaagcaccgaaaccgccttccttaaccaaattcctcacagtttgagcaattgtaagtggccttctttgcccattttcctctccatccaacacttgcagccttgttttaattgtgtcaagtggcatagtaatcaaagccgaaacaccactcgccattgcagcacttaaaccctgcaccgccaatgttgctcgggaatcaggcctaaaacaaccattctcattctcatcatatttcttcttgttcttcgccatataacaaccgaaaccaccccaaattagcctgtgtgcaacagaatatgaagcccaccaaacagcattagatggtgcatatgtcaatatagatatcccaaaacctctatacaatcctctaaacccatctgagtacataattttcctaaaagcatctaaaccattagtgtaactataactactcacactaggaatagagttcttaacattactaacattgctgcaactttgaaccattaatctttgacttacaacatcaattggggtccaaaccaattgagcagccatagctgaacttaaccctgctgcagcattagctatagcaagtgctgttgtatctgaataacctaatctaacagtgattgtcccaacattactcttggttacttcaagtgctgtcatgtaaagtgctctagctgggattgttcccattaatgaagtaccaaaacctctgtagaaacctctaaaaccttcatggcgcatgatagcaaatgacatgttgaaacatgagattggtgttgttgagatttgttgccttgtttttaacacaactattggatataaagctgctgaaacacctgaaaataaagctgctcctaagaagaaaaatctagacttgtcaagcatatgccaatctatatcagatgggatatgaatctcagaagctgaatcatcctcagctgtgcttaaactcatcttagccacttttcaaaataacaaaatctactgaggaatattatcaaacaccttataatcaaaaaaagattaggattttgatatggggttttttttttggagtaattaacaaaatgggatttttcttgttgttcttttttttctttttctcaaccagattaacgaccgaacttgaatcagaatcaccatttcttgattgaaaaatctgtactaataatgatgattattattgttcttaccagaagatcatcataatcacagccgttcatcatgatcttcaaaacttcatctcagcaagtaaagtaaaaaaaagaaaagaagagatcttgaagctgaaaacttagttgggatagagaaagattgggtttttgattatgcccagaaaagaaagatcgaaactttgagatgaaaatggaggcgcagagggaaaatacataaagggtatcagagaaaaccaagtggattggccataactcaaggtcaaggatgggactgagagagagagagagagaaagtgtgaagagagagaaagaggtttacaaggagaaagatgggtatggatttttgtgagggttttagggaaacagaggatattggacacgtgtcggtttgtttatgcaaaccgtgggctagttcttatctacaatttaccggcggtggccggttgatttttatttatttattgagaattgctaaaatggattaagggtgtctagtacttttctcgttgttatactataagggagtatttggaatgagttaatgttaacaagagaatgttaatgtgaaacattaccttgtttgttttgagtgtttagtcttggaatgttattcccttagtattataac

SEQ ID NO: 114714 - DNA, 1122 bp, Cannabis sativa
  modified_base (1082)..(1096): a, c, t, g, unknown or other
tttttttttttaaatatatatatcaaactagttacttgacattattagcaaaaaatgataaaactaaactttgttgtaaataattatcaagactacacaatgattggactactaatactaacaatctattttttgaatgaattggttgaattagtaaataataatgagattaattgcagcacactaattgaaatgcactaccagctatgtccaggtttatcagcaataaaaataataagtaacaactcattactgttttacattgaactaagaaagaagcagaatggagtagcagctctccactaatttgcatcacaataattcaacaacatacatgcaattaattccacaacaattagctgacaatagagcaagcatacaaaacatagatattcaaaaactggttttacaaattacaaaccagccatcgtatcaagacatagcatatgaagatcacgaggcttgagaaataaataaccagtttctatcaatgtcaaacatattttaagtagctaacaatgttgttgattttataattaagaaaatagaaaaaaaaaacacaagaagaaaagggaggaagaaaagaaagagataataacagatcataggatttttaaaattgaagaatgagagatttacaaagacaaaaagatattgaaatgtgcactatgcttttatgttatattgcacaacttccaattcaaaataaaaagatatgaaccaagggagtacttagttacatatattgatgataattgtaactggttactaagagcatcaaaatataagaatgcaacaacattcaaagtgaggaagtatgtccaggatcacaaatgctcattagatgtaatgggagaccagatgcaaccaaatatcaatatcattgaagaaatagtaagaaaaaaattgcatagaccagaagatatcgtaatggacatgctattgtgtcgatgggatatcaaaatggttggataacaaaaaaaaaaatattagaattggcgagagggagactcaagattattcttatcaataactaccaatgtacctatacatgctgaaagtaggggtgttcgcggtgcggnnnnnnnnnnnnnnnactattttttcaaactaacccgcaca

SEQ ID NO: 114715 - DNA, 3985 bp, Cannabis sativa
  modified_base (44)..(44): a, c, t, g, unknown or other
ttcttatattgataactaatcatattgtaaagagttttatttanggcataaaacccaacatgaaattcatcaggtaaacttgcaacgtatctttcattatctaaattatcccttcggactgacaatctgtctaagggtagaaaattgtgctaaatttcagttttgtacttatgaccctttgtaaattctatcaaaacctagaggtaaatttcgatttcctatccgaaataataaattttagagtcacataaagtcatactatttcccttaaataattcccttactaacccttatactgaaatagtaccttaattcatattcaatcatacgaaaacaaacatgcttgctattctaagtactccaattatagaacttctagtaacatcttcctatttctgatggtttaccccaattcactgtcaaattaagctcctgaatacataatctaccacatcattttgcattctacctcatcagtaagtaaaatttcaagtctttgtacatcctaatagtactaaccttataacgatttaagaagtggtataaaccttcctaaagtacaaactcgagcttattagcgtaacattctgtgatttgacattgaaaattttctgacatagccagcttaaaacttatttttgagttttcactaacattgtatccacaacttgagtacttctattttaatctaataaatttggttgaagtgttaacttattgagttttcccatgtaaactccaaacttaccctaaccatgacaatcgttaacttagaaaaaatcatggttgtaatgaaaacctgcccgggacatttcttattcaaggttccttccactagattggccttccagggtaataaagagtttcacagccgtaatttttgagtaactccaaccattgtttttatctcatttcagtctcttatgataataaaatatttcacatttccctccatagagatagatttgtcaaaacctaaaattgaaatcactaccacaagtaataaattggttaacgttacttatgctccttcaattgacgagaaggataagcaataaccctacatctaacaccaaaatgcactccaaatcttatttggatgcctcgcaatggaccacaaattttcttgatctgatgcctaagctaatacttaaattgtaatcaatcatcgctttggctcttgaatcaaatttcacatttgtttggccatacaaacagtcgtttcttcttgattaaccctgtaaagggcgtaaaaatcttgaaaacccttacacgaagcgatggtagtaattatttgaatcttgaaaacttccaaccttggtgactatttttggccttagctagtcttcattagattaaaaataaattgtgatcccatcttagctaataaaatgccctagaagggcacttggaataactaaaattcataattcttaatttgatatatacagtttatgctgccatagccactataaaactatttgtagatgttgttcataccctgcttcttattaagagtacaccataacattatggatatttactataacacatctatcgagaaaaatccttgagtaccctgaacaccaaatccataagagctatcaaagcattggttaattctcaaagacataaccagaaatttataatgactatatgcagtattataggcagtccttaagatgtcctccactcaaattctcaactaatgatagcccgagcgaagatcagtcttgaagaagagtatctttctttgaatttgatcaaaccaaccatcgatcctaagcaaagggtacttatgctttcttatcaacttgattagttcttaataacaaatgcacatacgaaatgaacaatacttcttcttaacgaacaacaccgacactttctagggcgatacacagggttgggtaaaccctaaatcaagcatcctctgaactcataactttaattccttaaattctgttggagttattctggagggtgccctagaacccacctctactccaattgctaaagtaataacaaagtctatctttgttgtagtggtaatcctgaaagttcttttagaaatacgttcaagaacacttgtaccacttaatatccataggccaaactacctcggctaagtggtatctaataccatcgttagaaagtctatgcatccataccgcaataggtccctaacttttatcatcatgatacttggagtttaagtacctcaatctagtacggtaacacgaacgatctttcttctttaattgaaaggttacaatcttctgcttgcaatcaacaatagtagtgcactcacactaaaaaatccattccaagtaatatctcaaactctgctatacccaaagttgtgagattagtattcaactcctatcctcaactctaactggcatagatctaaaccaccttttggagatgactaactctccgccaggtaacagggttccaaaccctatttcatatctgtctcaaggcctacccaatttattagttatccagactaccacatattaatttgtagctgcagaatcaattaacatagagtaattcgagtagttgactagaaactgacctgacaccactgaaggactatcttcagtattgatttgggaagtgacaaacacacaaacttttcctcttgttctggttctatcttctgtagttgtgggaaattctcttatagtgccctacataaccgcattggaaacatgtcttagaattacactctcctggatgatgcttcttttatcgggggcactctggataagtatagtgacctccaaggccaccctaaccaggttttctacgaaacctcttcttctgactcaagcccactaatgtagatggagctttccctcttttgacaattcaaggaactagtaccacctctgacgagatttgatgcaaggggagtagtatccctatcaacaacaaaagttcttcagaattcatgagcaagctcgatagtgcgcgctactcaaggggtattcatcatatcttgatgtccaaaagtgaccaaaggttcttgcatccaataatttccatgcaatggtcctattgggtaccaaccctaaactattctactggtaactttgaaactaaagtgatcggtacttatggtaaagacacagcatgagatccatcttgcctcaatctcttaatctcctcctctaacggttgaatcttagcttccatctctacgaatctttgcttcaattttaacgaagcttgcggtggattttcatatctacttccataagtcctttcttggcctgaacctcggccttggaaactagggggatcccattctctccattcgccatcagttccagctaaatcatcccaactcctcgtattttgctaggcatcgatctaaaggaaaagcatgcaaaattatgagtcggctagatcaagcagcagtcgaaattgtaatctacttaccactaacatggaaatttagtattcacctattcaactattaatctgctaacatgctccatatcaagccatttttttatcaagcatatcaattaaaattactaaaacatatagaagcttaccgaactaagagtcaagcttatccttgatgatgattgtacatatcttgacaatctttggaaaataacctgaaaattctgataccaaattgaaacaccctactacattaggtgtgttaccatgatttcataatttttgtgcacacctttgctaattatagagtttaatgaaaaatgtgaataattaattttttttaaataacttaaactttaaagataaacataatatatataagtctgggaacccattaaaatttatataagtctacaaaatacttgcgttacaaaagttttccttatatgactattaaaaaggtgagcctaaactgtcctgaagaacctgaacgctccaggtctaactgatgggttttatgccctaaataaaactcatttccatataatcagatttacttatt

SEQ ID NO: 114716 - DNA, 808 bp, Cannabis sativa
agttgggggagatggaagacgtgaagagcttttggtggaagagtctggtggttatcggagatcatggtagtataggcgaagaagacgaagaacaggggagaaaacggttaagaaacagagtaactgctgcagagcacaataaccccactcgggcacttataagaagtgttacctttacatgttgttcttatgatacggcttgttgcattcaatttttcttatttcaacaataaatacacgtgttattatttaaataatattcataggaggttttttaagagagattctttattttagtatgcccacgttcaaattttcattttcattataaaaaaaatatctaaaattaccatcatcttctacaataaaaataaatccaaattatcatatatatatatatatatatttatcatttttcatttatctcacctatttatgatttcaatgttattacaagaggatttttctattgtctttttttaagtgtcaacctaaataatacattaaaaaaattgtttttactattaattttttttaatattttttatttcaaataagaaaatgagcaaaacaaagtttatgcaatattactataataaagatcaaaatattaatttaaatatatatttgtgtataacaagtaaactcaaaattgctgagaatttgctcttcttttcttagattggtttaatttgatttctcttttaattattttctttttcctatggctgtatatatgcggtgggttttttttagggttttttcatttttacccttcaaaacagtttttttttttttttttctgcat

SEQ ID NO: 114717 - DNA, 1795 bp, Cannabis sativa
  modified_base (1744)..(1756): a, c, t, g, unknown or other
agggcataaaacccaacaagtacaccttactccacctacctttaggatttttattccccttttctttcatcaatttttttttctcaatctccatctctcttactattaaacatagtatcaattttgttatataaactgttattattggaatataaagaatataaagcctacgagtcttcaactatgttcaacaaatttttttttaaaaaaaatacaaattaattacagagttacagtaacataaaattaaaagaattagttttttttaaggaagtttacagtaacataaaccacatcaaggagagataaatctccattaacataagaggaagtcattggggaacccatccccaaaatcgaaactcttatacaactaaattaatatcatacatatcgttctaaaaaaaaaatatcatacatatcattatattaatgtttcataatccatataaaatctttgtaattgtaatgttgaattgatgatttgtttaaggttgaataaaataattgaatttttataggttggggtgtatttattaagaataaattttatcagaaacttaattttagaattgtctatttttgtcattttatgaaaggataaaaatgtatttaatttattgaggtgtacttataattatttggggtgtaaatataactcccctaaaaataaatagttataaagatatttgatgaaaatacccatatataaatacaaattggttcccaaaaaattaattaaatatataatatggtgtttaaaactaagcaccaccaaaatatgacaaattacttcctatataaaaggtaaattaaaaaaaaataccattaaaacatattaaatgaaaaaccaccatatttgtataatttaaaaaaatacaccatagacacctaatttccacattcttatagggttggggtttttcaggcttgtggtgagtggctaaggatcagtccaaggctgaccacatatccggaagcccacattattgggtttgggtttgggcttctgcctccacatttaattgtaggagttttacaaaaatattagatttttggtaaaaatttttaattttactaccacatgaaaatttttacaaaaatactgtatttttataaaacaacagtaaaataatataacagaacaattaaaaacaacagtaaaacaactaaaaaataactatggaacaacagtgaaaacttaacacagtacaccgtataaataatacatagtatttttgaaaaaaattccgccctacagtacaaaaaaaaaaggtaaaaaattccaatggtgtaaaaactcattaattaaaccctattttgtatgccatgacaacaagtgtgatatggatgaaccataattcgatactattgatattataaataaaataaggaaatgaacttttacatgagaaattataataaatgatcataaattatagtactatgtaagtaaatgttatcatttaaaaatttgtagaaaaataacccctttacactatttattatttatattgtcttttgccatataaaaaaaaaatcaataatttttttttcatatttattttttagaattagaaacaaattacttaaagattatgatatatctatattatttttgttaaaatcctttttattttaaagttatgtggatttttttaattttttatgggttgtttgtattaagattttgttgtacagtatatttctgttatgttgtatatattattattcttagatgatnnnnnnnnnnnnntttgctatgtataatagtgatatataattttattaacat

SEQ ID NO: 114718 - DNA, 2962 bp, Cannabis sativa
  modified_base (2788)..(2790): a, c, t, g, unknown or other
gcagacgtgcaatcagtggctaaaaacgttataagagcccttgctacatatggaacttcaactttgaccgagatgataaagaattgcatggctcaagatctatcatggaaggtaagaagagtattttctagagaagataaacaaatgatgagaacatttggacttatattatatatgaattatggcatgtcacagggtcccgctaagaagtgggaggcaatgctactgagccttggcgttgatggaagcgaagatgggatcgatggcgaggaaatagctccaatggctaaggaaaacgtagcaaccccatgagaatcaaagcttttccattccacttgtttgttgacttaaactagattgactccataatcaataacacaatcagccttgtttatcacttccaaacattgttaaggggctttgccttttgtctaatgtgaacacagattccgacactaaccaataaataaaatactacttagaaataaggacttggcaattgattcattctatagaaattagaaactattactgcaacaaatttggaatattattgaatagttcatgaacaaatcctctaattattaataaataacgcaagagactcgtcattaataaacagtcacaatattaagcattatcacactaatctgggcaagatgaagaagctggttctgctataaataccagtgaatttggattcttaatccccattgcaaaaaaatatacagttagcctactagtcttagtatagttagtagagatatttagaatcaattagagaaaatgtgcaaaatataaataataggaagccaaaactgactccaaagacatagtataccaagaagctcgatgggaaaattttaagaactaaagatgttcaaattaacaagaccctgaacaattcgctcaacacgaacacatatatttgttacgaataaaagataaactcctaaaacaaaagataataaggtaataacccaaaaaagtaactaaaaatagcaaagtactgcatcacacactgaaaggagctcctaatcaaacagactgaaacccatgtcatcgtcactctcttcctttggttcttcctgtaaaaatacaaacaaacaatacatgagcaaaattaatgttaccaaaatagacaattgatattataaatggaaaagattaattaaaaaacattagtttgattgaattcatgtgagggactgggttaccttcttctcctcagcagcgggagcggcggcggctgcagcgtcgccaccagctgacctgggaacagcatcaactgcaacaccaccacctccggcaccgccactcacaataaggtcatcaatgttgcgcttctcggcaagcttagcgaacaggccaaaccagtaagattcaaccttcaagttagcagcttccaccaaggaggcaatcttctcagcctgttgatagaaaatcgatgttgaaaaccataaatcctatctatcttctccaatcaaaaatagtaatctaaagtaataaaaatgaatcaaagaccaaaaaactaaagacagtgaaaacgaagagcaaatgctagcctttaattaaaacaattgcaatttttattagaagagaacacaacaagacacatagattatttaacaacccgaataattattttaaggcaaattatctactttttaaacacataaaaacaatcctaaagatcaaattaagcaagagacacacacatatatatatatatatgtatacagaaacacataacacaattggaaaggtttgaagaattagagaaaattacagtgacagggactccatcgtcatggagggccatgacggcgtagctgcaagctagctctccgatcgacatggttatttaatgttctgaaacaccaggaaaaaaaaacctattttagtacagaattgcagttcaatttcatacaaagaaaacaaagaaagaaatgttcgcatttgaattgaattgaaaaagagacctgaaggagatgagatgtatctttgtgttgcctcgccgcaatctcctctgcgtatcgtctctccaagaccacaacaactgctagggtttcgagggttttctgtaggcaagggctttttaaacgacagagtaaatggactgtgtctaaccttctaaacacactattgggctcccactcttgtcgaaagacttggcccataatcagcccggaacctagacaaatagatggttttttaaaaaatatttaatttttaaaatatatatttaattatatatttttttttctttgaactcatatttttttaaaaaaatattcttatcaaataaaaataatttatattttaaattaaatattataataaaaaattaaaaatattatataaaattttattaaaaaatattatacatgatttaaaaaaattataaaaataaatattaaaattagcataaaataatatatatataaaaaaaaaagaaacaatcctggaaggttgatattatttgtcttattagtatgtgtagctgcgcaatctggaaggctaaaaacaaggttgtttggaaaaagaaacaatcctctgttaatgacgtgtttatttctgcataagtagctcttgagcactggaataaagttcaggataaaagttcgttgtcatcaatctgtctgaaaaacatcggtgatggcgctgagtcatagactaaacccgcagaaaacactatcaagattaatgtagatgcagtactctttgatagcgacgataagtatggcttcgaaattgttgcccgaaaccatcttggtcaccttgttgnnncacgggccggttgccatggtggaagatatgcagttgaagtcgtcgaagccatggggattaaagaagacctcagttgggtaaagaccaataattggcaacatgttcagatcgagatggacagtcttgtttcagtacaagctattcgaagcaaccaagcaatgaagtccacttt

SEQ ID NO: 114719 - DNA, 2214 bp, Cannabis sativa
ggcagtgaggagggtctgttttgtgaatttgttgggttagtattggtgtctaaagtttgtagtgcaggtcgtggaggagcagtctgaggagggggaacaaggttcgtagatgactctcccccaagcaggacctgaggttgtggttgagtaatattgtgtaaacgaggtatagttgaatgaagagtggttagtgtaagacatgtcaaaagaagtcaagcatttcctatagagaaatcagttctatatttgtcgtaacacgtagtaggaagtttggctcctttcatccaaggtccataaagaaagtcgtcatcattacccatatccatacgctccatgaatttaatttaaaggtgtgataaagtaaaccacattcaaaataaaatttcggaagacgctcataacggaagcctatccaaaattcgtttctaatctttgggagacttatcattcgacccgaggaagtggcttgacaataaaaagttcaactctaatatgaaggaaaggacctcatccttcattaaacgaatcttcttgtatctctatgaattcaccgataagttcactcaaagcttttgccagagccttggacttacttagaaaatgcaagcaataaatctgaacctaaaatggagtagagattaaactgttgattgaaacattttgcaaaacatctggtgtgtgcattacaataagatgattttggaagtgctaatgttctttattcatcaccttgaatttgtcccctacacaactgaaagagactttgaacaaatcatcaccatagtcagaaattacagcagggtaatgatccttccaatgtccgctcatctgatcaatgaatgccgacttatggaaatagttgtccgtgagtactctgactagaaaaacatgattggaatgtggagtcggagttggcgcgacatcttctggaagagcaaagaccatgctctcttcctcagttagagatagtgttgtgctcaaaaaaattaatgagaggatccataatcaaaagacagcagttaagggggtgtaatacggaaaaaataaggaaaactaaaaaaaattgggtatgaatcgaagaacagagaaccaaaggaagatgaaccgtaaagaaaaaagagaaggagatgaggaaattcgaaaaagaattagttaccaagagaaagtttgttaaaaaatcgtaactgctatatacccattaaggcacttttggtgtgggatttagactataaaaggagatttatgatgattattagcttggattaaggagtatccttcttttctatatattaaactctaattgctactaataaaagcttactttcaaagagaaagaaaaaatgtgacattaattacatggaatttcaaaattctatatttatatattttgtgttatttaagaggcacaacaagttcatttgtctcctttaaaccaaccttttttttctttcttgaaacttccttttaaccaacctttataatttaactagtatgaccagttcccaatttatttattaataatatattattataaatgttaccatgttagctaacacaccctccaaacataattaatgaaagacaaccataaacaaattgaatcaaataagacaatccaatttatttagtttattaggcggtgggataagaaattaaaatagtagaccgacaacatataatttgactatgcatatcgacaggctttcatagctttgtttccatgtgatgtgttgcgagtatatcttcatttagattttttctcagataattgaacttgagagaaaggtatctccagtgagcactaccaagagcttctttattctataatttaaaattcatgctctgctgcaactcctttgaaggtaccctcaggtagctaaagttgctgctgttcttcaatggatgctcacaagggaaaatcaacctctttcccttgctctgtactgttggtgtttggcaataaaattacctctcttcctcattgcaacagataagattgcctccaacttgttcaaaaaataaagcacaagccgacccagccttattcagtttaatctcaaacatttgttgatgtcttatcttcatatcctaatgtatttctctattttgtcccaaggaatggaaatgttagataaattaacaattaacccaagatctatttgtatataacatagaacacaatagtagtatataataattaggtatgtgtacctg

SEQ ID NO: 114720 - DNA, 1384 bp, Cannabis sativa
aaaaataaaattaaagacataggtctatatggactcgtttcatcaatttttgctcgactctcaataaaattttagttttatctttggttccaaagataaaaggaaggagggtgattttcgaggctggtacgtggagatgagaagccccaaataatcaaagacctacgtcattgtttatcagtgaataaccaaagagataggtgctttataatatcttctgccacctttcctctgcactttctctcttctctgtttcactctttcaactaaaaattttaagaaccctaaaggaaaccaccaattgatcggaccaattttcacgactctggattgttttccaccattttttatatctttaattcttcgagccataatccaatctagagtaccaaaaataatttattttaggattttaatgttaaaacttgaaggtttacgtgaaagtaacttgaaggtttacgtgaaagttttaagtggatgatggtgtgattgaaaatcgctattccaagctatttggtgatttttattagcttgtatttaggtaaaactctatttcatacttatatttgaaagtttcattgtattattttaatgtttcaatattttttgttttgggtttttgatatagggttatttttttgggcagtggtgaccgttggtggcgatttcaaaataaggtatgtattattatttatactttttatttttttggtgttttatatagtttaatccgaaaatatttgattctaagaaattatgtttatactattagaaagttatttatataattttattgtatgtggaatgtagagaaatatattattattatttatttttgtttagtgtaggattatgtatttaaagttaggaaaattaatatcgataatgtatatatgtatatattgtatatgtgtagtgtatatgaatgtattgtataataatgtgtttagtgtactgacagtggtggtgaattattaatattctgttttgggattgttgtgttggtggtagagagaacatgtggagtgtaatttgttgtatatcattttttctttgatgatttaaattctacaatatggtatactattaatttttttagggataagcaacctacttgtattcgcacacatttcttgaaaattatttgtaatgtttgttattttttatattattatagtcgttatcctattgaaatttctattataggttttaatattttagctaatatagttttaagagaatgggagaattatattctaaattattcattaaagtaatgaaatcttgcaccctttcgaagttatcaatcgatcagaggcaaactcatcgtatttttatatattaaaagtgcctatctaatgacatttcttggtttaacagaata

SEQ ID NO: 114721 - DNA, 2676 bp, Cannabis sativa
aataataataataatataattgtatcacacttaatataccaaataccaatatatttagataaactggatattacaaaggcggcagcaaaaacaaaagtaacaggtgatattaaacttgtggccttgcaatcgagacttgcagttgtcactaaaagtaacagttttttctaatattgctacatacatatgagtggggatttgctttatttaaacttataaaacactacttttaagtaagtaaatctacgatggcttttgtaaaaaataaaaaataatataaatgattgctattgtgaatctgaaaatcaagtgaatattctttctaatatatgaaaaaaaacgtgacaattataattatttggaagccgtcggattttacattacccctacccttgacctgtaaaacatgtctcctttaatttatgtaatgtcatctcaattgtcacttgtctttataataagtcaattaggctgtttggaaatggtcaaaggaatagaatagggtataggacttgacttgtacaatattcttaatcctagatcaattacatcattaaatatttaaatccatggcggctgctgcatatcttacttgactgggacttgattgtattgtattagttctatgcacttcatttcagaatcttatttcttaatcctataaatactttcatatatattgtcatagaatatagtttcatttattcaccttaacactaaacatcaaaatctcattttcaaaacgttaaattctcagaggacaagacttaatatttatggctactggaattatggaggtcatgctagtgaacgcaaagggtcttggagacaccgattttattggtataaatatatagatctcatcatgaagatcacatcttaattatcatttcattttacttttaaaggattattagtttgatcgatgttataattaattgtgtgtctttgttatgtttgataggtgacatggatccttatgtgctgattcaatacaaaggccaagaacgaaagagcaccgtagcccgaggttagtttttcatgtcatctatgaccaagtcaattaatacatgtatgtttatattggttttgtaatgaattaatacagtaattaattaattaattaaaaactctaaaatgtggggatgcaggacaaggcagcagcccatcatggaatgaaaaattcagcttcagagcagattatccaggttctggagataacttcaagatcaccttcaaaatcctagacaaggacacattttccactgatgatttcataggccaaactacgtaagatataactgtcctatataccttgcttgtagttttttcagttcataaatatatgttcgattaattttggtcacaatttgttaaattaaatgattatatatttatgtatatgtatatgtatttgaatgaatgaatattattaattattgcaggatctatgttaaggatttattggcatttggagctgagaaaggaacagctcaactacatgctaccaaataccgagtggtcgacgctaaccaaaaatatcgtggagagattcaagttggtgtaacttttactcgcaaggtactattttcaactacattatattatatatattatataatatatataaatatgaggtcacattttgtttacacaaaaataatgtacaagttttgtaattttaattgttatgaattttgcaggaagaacgtgacaatggagagaggtacggaggatggaaagaaagcaatttctagattcccttcaattattacctacttatatatatatattcaaaacttcaatcagaaagattaatttgagtttattttcttctgtattattcttttatttatttgtgaatttgtcttattaggttctctttgtaattagtttcaagaaatgatccttctaattgtaatgaaatagatttcgttatcattcaactataatttaaaagcgtatagttaataattaactaatgttgtaaaaattaattgtgcttcaatgatcttaagggaacttaaaagtgctaggcactacaagagttgacaaatggttattgatccaatttaaaattaggttttacacttttttattcattaaataatataaaaaattgctaaccatttatcacatatcacatttagaggatattaatagcaatgctcaaactctatttctgttatatgattttatttgcattctaataaagtaatgtgttttatcttctcctttgtctatcgaaagagaaaatagttccgttaagaaatttgtgttataaatataatcataaattaaatataaagaataaattatcttactcactcaaataagtgtaaaacaataacaataaaaagtgtaaagttttacaaaaatatgtatggaaatatttgaaattttgtgttccacatttttttattaatataattttaaattgataagttatctaaatatgttggaagtagtttgtgaaactttcaagtgatttagtttaggtatgcaatagaggacaaaatttagtgaaatgtgtgaatgtaaaaaataatatgatttttatgagtggtgacataatattggtggttattttttattgtaagtgtactcaaagtgtgatatctcatgagtattatttttatttagggataatttcacaaatacacaaaaacaacaaaa

SEQ ID NO: 114722 - DNA, 1688 bp, Cannabis sativa
attattatattttctttcttcacatttttttttaaaaaaaagatgaagtttggattggatccacttcacatctcgcatctacattgtttttgtcggatgtttgtttttgaaagaatcttattgtttgtgcctacccccatgactagtttccaattatacccttttatttgtcattaccattttgttactattgaattaaggaaagaataacatgatttgatgtttttaggtcaatgtttcttgaaactgtgaaccgattaatttctaaagagtactagctagctattttcagcaatcttttaactcaaaagtggagaaatggtaatggcaaaatgtagtttcaaagcaacttaattagtgccactttaccattctaaaagactatacataagggtagaagatccaattgcttttgaagacggactaaaagcataacaccttaaatttcacacccttttcataacacttccatcaaaggtattacaaaagtttccaaaagcaatacccactactaatttgcagagtctacatatatatataataaataaaatgtgacaattattggaaattatttgtatatatatacatatatgtttctggctgcatgactaaattggttgtagcatatcaaaatctttaggagcttatgtaatatattgtatctaaaagatttcatttcagtacatatgccatagaaacatcaatttccattaattaaatatttattaacaaagtacattgcagttttcattaattaatgttttctttagtactactacaaaggatgaaaactcagagcttttatttataaccggatgaaacagtggaaatgagatacataaaggggtgttttggtcagctacgtctaattaataatatgaaactgtaatatattaattagtggttgagttttatataatatcctttatgatgatgggtcaaaaagggtttatagattctcttaattctctgcttctaatgaaagcaatgatgataattttttatttatcaatttgtaatggaaacaaatttccaggtcacggggcttatgaatcacgaagagtattatttcacaacaaaaaagtttggtcaattcatgaaaacatctattaataaaaggtggaatcgtggaatttaccctttaatataatctatatcttttatatgggcaggttacaaataggtaaaaaaaaattagaattaaattaatcataattaaaaaaattaaaataattaattttaatttaaatatttaaaaagactcttttttcgcaaataatatttataaataattttatttttatatttaagtccttattttaatatttttaacatttaaaccatttaactataatatttacattaaaattttattttttttacaaaatttagacttccacccattctaaaataaatatttgaatacttaattaatttttaaaaattacatctaattaccattttgcaacaaccgcttgacacatcttcctcctttataaaaaaaaaaattaaaaattaagatttcagtttgtcccaacctaacattatgtgaattttccacttcgatacaatctcctacatctatgccacaaacacatttctctattcaaacagctacagttaaatttctcattgatttttaataattttcttgttacttttctactattatgcttatttgtgaaaaa

SEQ ID NO: 114723 - DNA, 2640 bp, Cannabis sativa
ctcatttctaaaaataatttttttaaaacaaaaaataaaaaatattaccaaacatgctctaactcaccaccatttgttcattatgctagacccatggtttctctgctatatcaacttaaggtattctactcaaatcaaaacccaactggcaacatgaattgcaatactacaaattgcaacccaaaccacaactctaatccaaccttcttgtttttaaaccagtaactaagacaatagttgtcaaaaaatttagcagagtcaaatagaatcgtattttacaaaaataattaaccatatttttgcaaaagaaaatagaatcgtattttacaaaaaataattaaccataaaccgttaatatctataaaaaaaaaaatccaaattatgtattatgttttattttggaaaacactaaatacagtccaattaattttttttctttttattagggaatatcgttttgtgtttggtgtaaacacacacacaaaatcgaatagaaagttttagacaatctaagttttttatatatatatatattatattatttgtacacctatgaaaaaaaaaaccgtgcaaaaagaaaaaaattatctttttaaaaaaaatattacaatattatattattgggaataatttcagtaattatttttggtatacggcgattttgaaaaaattaattaagtagaaaacgattccagatgtacaaccctaactagcatatatgtcactatatatactatctgactgggttaagtcatcgaccacagaccactgtctctttccaacataaagatttcgagcaaaacggtgttcttcctgcataggtacccataatctctcttctgtctttttttcttctttaattttccatagtatgagctgattcattatcatatgttgtctttaatcttgtttttattattttctcaaggaatattgtatagtcttgaatctttcaatcgatatacacccatatatatgtacaaagagataatttagatttgtatgactggaatcggttcttcaaaaacatttatctctttacataatctagttatatataaatcaatatatagttgtaatatgtacatctttggtgattgattagcaaaatcaagaatgatggtgaattttggggtattcactactgaacaagagagaaattttcgtcttcaagttgttagaagaatcataagagaatcaatggtgcccatagatgagtcgattgagaaaatacatgtgaagctgaatcccaacaacgatcttgatgttaaagcacagtcttggaaaatggaggaaaaaataaacatatacacgtaagcatatatatatacatatatatatataataattttactctatacatattattttcacagtatttttttaacataaatcttttccattttatgttatacagaacggtgtacgacattttctgctcggcagccatggaagggttttggccttacgcagtgagtcagtattatgaaaaatatgagcacactgtgacagaaaggatttcaaactatgtaagctttgtgactatatatatagtgataattaattagattttatttttataaattattattattatttgtttgtttttgtgtaggtgattccatcattggaagataagattggggaagatttcattattgaagttgctaagcaatggacacagctagatgaatacaaaagaaatctccatattatatttggacatgtggagaaagttgcggtcaatttaagcctttcaaaacctttattcgttgatatttgtaaaaccaaattctgtaacatggtatgtaattattatcttatatatcataacaaaattataaattaattattgattttgctttacatttaaatgtaatttcccttttttttttttttcttttctatcaatttcaggtctgggacaagtttcactgtgaaatcgacttttcagtaactaagatggtacacattatactaaatcctcacgcaccttaattatttttaattaaattcatttatgtatactttataattattatatattgcagaaggagtcaagctcagggatgtttagcaatgaaagtactccactgaaggaggagctggtcaaattctttgatgacatggaaaaagtgtccaataaaggattgaagcagactctccacattatcgaagaggattgctagaaacttgtgatcattgttgctgatttcattattattcctttgttgttctgggaatttgtttggttatttttggattttgttggtttattattccatccaataaatatttcgtagtagagtattacgaacacatggaacattatttggtttttcaacgaggatattagttcttcagttttatggtttatgatcatatagtttttgttataatgcattttaatttttcatatttttcttctgaataaactcgagttttataaagggtgaaataccaatgtttcagcctaccatattattggaacacatgaaataaaatagcacttggtgtgcgtttatatatatactaagaaacaaactgtaaaattattttatttaatgataattaaattataaaattatattaaatttttaaatcttaatatgagtaaatatattattaaacttttatttt

SEQ ID NO: 114724 - DNA, 1922 bp, Cannabis sativa
  modified_base (521)..(546): a, c, t, g, unknown or other
aagaaattaacgatacttctttatcttttgagttgttctgccagcacaaatatcccctatattaataacaatttaaacactactttcccaccaactaatcaaatagaaaatatagttcccaaatgtcattacttcaaataaattaatgtgactgattctgatttcttcttctactatactattttcttaagaaaaaagaaagaaggaaaaagatagctgttttgatcattacttttaaataggtttattttccccacattacaacatgtgggtgggtagtttgaaattaaataggtcattatctctgttgactcattctatgtacaagaaaacatgggtacagtccaaatcgaatccaactttcaaatgcattgcttcccctaatgcccaaatgtcttgattagaacatgactccatattataaaaatttaaaacaaacctactatcatctaaacatgggtattttttagcttttttttgattgagtggacactatagtccattattattattattattannnnnnnnnnnnnnnnnnnnnnnnnnattattattattattttgaaatgagttataatcaactattcaaattgtataagcattccaaattattttgtgaatatattttgaaataaatctagtaatttcatgtcttcaaaccgagatgagcaaggtgagtcacttattaactccctttaacagtgttttgactctattcatggtttttatgtagtattggcgaacattgtctcacatatattaaatgtaaaagtattgagtcatatataagaacatgagctactccactaatcaccaattagttttgagatggaacctcatgattctcatcatgcaaacttacgagctaactctaatccctactccttctcctatccaggtggaggattggcgtcctcctcctcaagattggataaaactgaattataatattaagttaagctttccactaattttgttggtcgtgtattttcttacatttcctgatcttgtaattttattacccataatgtggcaaagtgagcttttacccataaacaatttagtaacttgcctgtatcatcaatatcaacaaacttattttgtaataaccttgagatctaatttatgatctaatgaacattttattttcaaaaaaaaaaaaacaaagaaaaaacaaagaaaaaacaaaactcccttcaacttcaagcaatcaccctaacctcaccacatcataaagtgggcttcaacaaatagccctcttcctctcactgtaaaggaatagcccaattttctttttgaggaaattaggtagtttaagtttactagttacatttttagcaaatttttaatcttctttcatttccaacaatttttatatttgatgtccttttccctattttacccttgcagccctagccgtggaatgcaaactactcaatccaaaatggaaaccacaagtttggaaatgtaaactactttcatcaaaataaaaatgacaagccttcaaatataaactaaacaagtttgttatcaagttacgccaatttttgcaggataagttaggaaatacctcttttttgtatccattaataaaaaataccctcatattatattttattaaaatatacccacttttgtgagcgagttgtctaatatatctttaccatccacttaagtttaccacataatttatattaacctaaaaggtataattgagatatcatctataaaagtgggtatatcttaaagcatatgaaaataagggtaaaaatttaaataaataaagtaaaatggacatacaatgtaatttcctctatttttgcttcattcttcatacatttaaattggggaaaagttgaaaaatatccttttttttatacattaaccaaatttacctcaaaataaaatttaattcaaatata

SEQ ID NO: 114725 - DNA, 1063 bp, Cannabis sativa
gacctacctgccgtacacgtgttcacattgggcacaaaatcggctgcctatgaatatatacatttatatatatatgagttattacaaggttgcattaatgaatgaaatacaaagtctatttatagactttagactttatactcttaactaacataatcgaatgcaagacttattggtcataactgtgaatatttaatttatatatggtatgtataattgattctaattgatggcaattgatctttttcgatttttgctatgaatataggagattgtgtaatttttttttcttttttttcaagaaggaataaacttcattaaccacaaacaattacaacctaaacaaacaaggcaccacagcccgaaaagctacttatagtataatccttctatacaaatctgctcaatactttttaatctcctttttttgctacttataacctatagaaaacattatctttaatatcctgaacaatcttcaaaacagagctcgaaaaattgttaaaaatgccacaagttgtaaattgttgctcccatgactgtggtataaattctctgcattttatccttcttgatcttcactaaccatctttgccattcttgaaaatcagttggccaactgtttttcccaagccatatgcatatctgagttgatacttgctgagacagacaacaagcaaagaagaggtggctgtttgactcaacttcagccctacaaactgggcataaaacactgtcaagggaaatttttgaattgagcaaaatatcccgggttaatagttggtcattggccgcttgccagaaaataaacctgtgttttggcatgttgtagttgttccatatgctgctgctgatcttaaagactgcttgttgtagcttgctgttgtacaacatctttgtgttgagtcggcccttagcatctccttcacttgtaaggtcatttggagtaaacttgtcccttaaatgacaaagttttctccaataccaactagaatcatttttaaggtcataggtccaaatggaattgttcttgagatatatattattgacccatttcacccaa

SEQ ID NO: 114726 - DNA, 4194 bp, Cannabis sativa
  modified_base (53)..(54): a, c, t, g, unknown or other
  modified_base (153)..(165): a, c, t, g, unknown or other
cgacgctcttccgatctgactaaaaatacatttagtcacaacaaattgtgatnnttgtgactaatacttttagcaactaactttttagtcacaatataaaaatgataatttataattagtcacaccatgtttttacttttagtcacaagtttnnnnnnnnnnnnnagtaaaattttttgtagtgtaaatataatgaagaggcaaatatactcgaagtcttgggttgacggtggatacttaggaaatgcgagcgatcgaggtggagaaagctaattcattggattggtagggtaatttgaagctgttgtcgccagtatggtgagttgaagctaccgtcagaatggtgggtggaggctgtcgtcgaaataaggagaaaggtggctaggtaatcaaatctaaatgagagaaagcaaagaagagaaatagagagcataagtggagcgagttatgacacatctatatatgttttatttgcatctcaaaaatttataaaaatacttatttcaataattttattttatattaaaattatatctgtaatttgtgccaattttttttaaaatttttattcttcctctttatattcttacaaaatatacatataaaaaatatattttaaatatttaaagaaaataattaaaatataaaaattatataaattttattgaaaaaaataaaaataattataaataacttttagaaaaatattaaagtaaaattaaaataattattgaatttaatacaagatgatgtaaaaaagaaaattttaaacaatattagaacaaatatttaaaaattaatttttttaaaatattaaaatatgcttatatgagatatatgcaaatataatttttctgtccttacatatataattaagaaatatataattttgattacactacaatattaggcatattaactcaaaattttcaaataaaatcctatttgactacatatgtcattaatgactacatataataagagtgggtcctaaataaattaagtaaagtataattaaagattaacaatggaacaaattaagtaaagctagctattaaagattatttacaaacaaactaaatgaagtcaaatcaaatggaccccaattaatattaattatacattaatttaataattagtggttgatcacatggattagatgcccaaaataaaatctgatgagaaaaattacttgcctgttttagaccttttgaatttgacttcagccacaccacaaccaaatcaccttaatttttaattaatatattattaatttatagcataatattaattagggaaccctagggctaaggtaggcacatacaagacaggttaaattattattaccaatatgttaacaaattaattatttattattaattaatgaatttatgatatgtaatcgtcatgtctaacgtggattgttaagaaaaataaattcaatattgtgtaataaattagcattaatatacattatatattgagtgtttagggcatttatatggtggggtgtgtgttttttttgtccctatcaataatagtttttggtatgtaattagaaaaattataatttaaatatttttttattacactctatacattgtagttattaagtacaaaaacatactaatttttgtgaaatttaatataatttatcgtgctgatcgaaaacaaacttcgaaataacttattttatgttttcgatactgtaaattataattattcagaatttcttaaaattttattaaaggttctaaataactaaaatatacacatgatcatgtaaaaagatatgtttgtaatctattcatgtgtcaaaccacgaaaacatgttttgaagcttattttatatatatgtgcattgttattgaagaaacaacactaaaatatacgagtattcaaataaaattagaacacttaaatacagatgttcgagtactcacctcaaatagcgagcactcaagatacaagttgcaaaatagacaaaaataaaagcagaaataaagaagagacaagagaattattgtaattcaatcagagagcttggtttacttatagtccattttttgtaataattttcacttagtttatttaatttagatcactcgtttatataataaaataagtgtctatatgaattacataactaatcggtttagaactgtttctacaataaatgacaatatttaatcgaataaacatttaaggaataaatgaagagcagttttatctattcttgaattaagtgcagcaacgtatgtgactttatattccacgagttgtctgttcatattccaacacatgagttcctaggttctacgatgttgtactcgaaggatggccttcgggcctatcatttggatgtctgcgtttatcatgatcacataatcagacatttcatgcgttgacaatgtggaacatgcgagtccctaacgagtcgtcgaacacatcattcgtaccaaacctatgtaaacaaatattctttaattacttgtcgcaggaggggtctacttggtcatcacatataatcggtatatgcacgaccagtattgactcctttcggtcctgcttattcttttaactatgcaaggcctagtatgcgactagaccctgtctcgatcgcattttcttgcaagttcacatcaagtgaggttagctctactggagctattttattaacatgttattattttctatcgcgaaccagatccacgtgtcagctatttacaagactgcactcatatttctaggttacaaattcacactataacacatgtctttagttttgtgatgacaactgcttgtcaaacaacgaaagtatttatgagggacaggcgagttgctctatcacatgacgatgactcttgattatcttgtcgagaattttgaaaagacagttgtatttatttctatattttcccaagatgtcacgtcatcaaatcctttgggatttgtgcaggcatggttttgagatagtcgttggattaagtgacctttgtttttttattgccacatgtctagatactaataaatgaggttgatttgtatttaaaatcattggaataaaaattgacctcacttcattttttctatcattcttagatttttctctctaaaattgcaacagaaaccttttcaaaaacttgagtatcattttgctaaagactatttcgaggttcaaagaattttctaaagtgataatcaagttcagaaggacaagattttgggtcaaaaattgatatttttcacataacttttgtttatttactgtgttttctttgaataatcgcttgccttctgggtacttaggggtataaaatgcatgaaatagaaggaaaggttctagacaataaaatttcaagaaagaataagacaaaaaagagaatttttctagaaatttttttacctgtaatttgaatattcacatctgtctcgtcataaattttgaatatttgtatttttagctagaacacgttgagtattcgcatatttcaatatcaacccatgatcttggactaacagagtctaaagtggttgggtgtttcacaataatttaatatttatatacccgtgtaaatcttaagacactgtaaaacatcgaaccactttagtttactctagtgttagttttgttattttgaatttattatttgtgtgaggacacttctcttttaaattgcactcacaacacgctgaaaagatcttctatctttcagatgagtgatctctcggacaaccaaatattcgaatttgagcgtggagcatctgcaaatgaatctcagaagagcgacaattttctcccaatgtctttattagaagacaaggtttcaacaagggtagatcaacatgacccgtagtctattggccagataggtcgcatggtctaggagttagaagtacctgtcgccattgagatacgaggaagcgagtccactgtatctgctcaagaaagctttattcattgaagggctgctctagatgcagaagttgaggaaatggggcaagattttgattttcctgcttaaggggatgaaagagatgacgaggaaaatgatgcaaactctgctgaggatgcactgtgacagtcagttgtcccgtaatccgtaaggaaaaacaccgggtataagctgtacaatcccacactgcttggagaaggtcaagtgggatgatttctgagactgtgtaggtatggaa

SEQ ID NO: 114727 - DNA, 4798 bp, Cannabis sativa
  modified_base (829)..(834): a, c, t, g, unknown or other
  modified_base (922)..(941): a, c, t, g, unknown or other
  modified_base (1651)..(1659): a, c, t, g, unknown or other
ttatttgttatagagtatatatataaacaaaaattctaaaggcatcacatacactattaaaaataatattctaactgtttttttttataggcgtggaacttattattttaagttttatttctgatattgttgggataaagatatcataattatttgtaactattttaaaatcatgaggctattcaaatctaatccaattatctatcaaattttttttttaatctaattatacattggaggttggattttgccaactgtaaatggctatatatagagtcatccttttcattgtaaggacacacaatagaaaaaatttctagtattcttctctcgtaatgtttttcattggatgagatctatttaatattttaaattcaatccattccttataaaaaaaatcaaacattattttcattatatgtatatttcaattataaaaatattaattactgtccaaaatgaaaataccaattatttcaaaatatttcaatataacacaaaatccaaactagacacaatagagatgtagaaagagataagtcgttgtcacaaaaaaagtcaaataattagtatcttatttgatttaggaattcttaatatttccatgtgtatggttgtccaaaatattaatgatagtaaaataaaaaatatatatttgaaatcatataaatagaagaaataattacataagacaccattatttaaaaaaaaaaattatatttttacgtttacggaattttttttacatttttacggttttccatagacacaacacgaaaataacaaaaaaaactacataaaagtatcatgaaaataacatctaaataannnnnnaacaacaataaaaaataacatacagataacatgaaatcaacaataaattaacaaatgtacaacaaaaaaagaccgtattttctgtaannnnnnnnnnnnnnnnnnnnaaaatatttaaaattctatgaaactgtatttttgtaatttttgtgtatttatgaaataatccttaaatataattggatgattattgtatattgaaggaattggattcattgaatatatctcatctaacaacccaccaaggcctctcttgagtcaaaatgatcttagaaaaagaaattgggcccttaatataagaataaatgatatttttaaaaatcattaaaaatattttaaaatattttttttatttgggcgtataagatggatggaccctaagtatgggttcgccttagcctagctagggccagctctgcaacccaccgatcaagtattagattttaaaaaataccatgccatcaaatctgatccaatcttgctcaatttttgacatgattgatagattataattggattgggtcaatttgtgtaagggttgagatgtaaaatgattctaaatttgaaaattaagttagcaaattttattttaaaaaaaaaataacaaaatgaccaaatgtaataaattagctaataaaaattattaaaatagatttaggacatattaattttttaaaaatatatatatataataagtaaattaagttatatcattattttaatattgcataatattatcttgtaacaaaaacgaataaatatattagatcattgaatttctacaacagtatttaatatatcgtatcactaaaaattnnnnnnnnntagtaataaaattatatactacaaataatttataacaatactaaattaatactcaaaaatatagatatcatgctgacaaaattatacataccactattaaaatatgtatacataccaaaaaatttatatataataaaatagaaaataaataatacactatgcatagcaaaaatcatataccatacaataaaatatatatacctactataaaaataaaataatattatttaaaaaattatatatacatgcatattaacaaaattatatacaaccataaaatagttatatcatacttacaaaattataaatcacttttatatataataaaatgaaaactaaacatgtatctaaaataaaataaataaaatgatatactatagaataaaacttatatatatataccttataacaaaaaatttatactttacaatacaaatatatataataacaataaataaaaataaaaatatagagctaataaaattatgtcatgtcaataaaagtataataagaaataggacttaaatattatttaaaaaaaatgatataagtataacaaaaaatacatatactcatcaaaacatatatactaacaataataataaaatatatatattactaatatatatatgtatactatactaaccaaattatataccataattaaaaatatatgccatgacaacaaaattgtatatataccaccattatatataataaaatagaatctaataaaatattatttaaaataaatagtatgtcatacaattaaaatacataaaaataataattaaatatatatatcatgttaataaaattatatacatacattaaatgtttgtattatactaacaaaattttcaaccactattatacaaagtaaaataaaaaaataaatatcatctataaacaataatatacgatacaacaaaacagaaatatactgtacaataaataaaatctatatactaacaatccataaaataattaaaaaaatcgacataagatgaaaataaaaaaaaaattaacaaaactaatatagatatatcataatcttattttaagtagtttacttataattctaaaaaaatatatgagaaaaaaaattattaattcttttatgtactaaaacataatataaataataggtagtgtaaaaaaaaagtatttctttaaaataaacgacatttacttatatatatagtactatgatttgagatcttgctataatttccctatatgcaatctatacacacttctccttagtcatatcaaataaatatgatataatttgagaaatacttctacagtagagctgaaaaagtgatgccccctaccaaacaaagttcctattttttttttttttttttgaaataaaaaattcctatatttgaatgatattatatattgtacatattgtatgtgcaggtttcattcgttgcaccacactcagtttcgaaccaattatagcttgttcatgccaatgtacgactacatctatggaacagttgacaaatcgttggaggatttgtatcaagtatcactgaaaagaaaagaagaattaccaaatgtggtgtatctaacacatatgactacacccgactccatatattatatgcaaatagggtttgcagggttggcatctaagcctcactcttcctcaaattcaaaatggtacctttggctgatgtggcctctcactacattgtcaacactaatgattgggatctatggtcgtacttttgtggttgagagccaccgttttcataaactcacactgcaaacttgggctatacccaagtacaagatacaagtacgcaaactttactttaatatataatttaatcatgatctatactattaaattagtataataatgcctatatttttatatttcagtattttctaccatggccaaaatcatccgttaacaatttgattgagaaagccatacttgacgctgagataaagggtgtaaaagtattgagtctaggtctcttgaatcaggcatgtatataatatatatatatatatatatgttaccctctaactgatcacttttcattaattaaattaataaaatgtgatgtatgtggatgcagaaagaagatttgaatgcacatggtgagatttacgtgaaaagataccctgagttgaaggtgaaagttgtagatggcagtagcctagcagtgagtgttgtactaaactccataccaaaaggaacaactcaagtcttgcttactggaaatcttacaaaggttgcttatgctgttgctttgactctctgccagaagggtattcaggtaattaaattttactttttttcaaaagaatatatatatatattttatgttgacataaattcattatgatgagcatacacactaataccaaaatggatttgaaaacaagtgtgataaaaaaaaaagtaaaaatagtaataatgtgaaaataacataaaaataagtatttatataagagaattagaaacccttttttctttgtgctgtaggtagcttcttctaaggaggaggagtacaagaaactgaagaaatcatcaatcaatatgtccaataattctaccactaatgaatgtttggtgttctcccaaagttattctgaaaaggtataatgatatatctaatagtatgatcaataataataatagtcataataacatgatttacgtaataatgcagatttggttagtgggagatggattgagtaaagaagaacaagtaaaagctcgaaagggaacaatcttcattcctttctctcaattcccacctaaaccatttcgcaaagactgcttttaccattacacaccagcaatgcacactccttcaactctccagaatcttcattcatgtgaggtaataataataataataataataataatctattaaataattaagtatatatgatcatgcatgcaagatatatagtactttaattatatatatatatgttatggacagaattggttgccaagaagagtgatgagtgcatggcgtatagcgggaatagtacatgggttagaaggttggaatgagcatgagtgtggcttccataccattactgatattcacaaagtttgggaagccactcttcgtcatggatttcacccactgccaat

SEQ ID NO: 114728 - DNA, 3180 bp, Cannabis sativa
tttggtattctttattctcaaaatttatactgattattgaaataagcttcaattccactacatgaaaatcttactacaataaagtttttattatcattttcttattattacttaactttataaaggaataggattaataattaaatctgaaatacgtttccttgaatggctatcttgagaagcatgtccatctccatgttgatacataaataatgacatcctaccaagatttttgcaagcttgaacaaactctttagagaaaatagagttatattcatcttcatcattcatctccttccatatttcacttatcaaaaatttgatgtgctcacgagcttcatcttcagaaacaccagtctcgtgcatgtaacattgaaccgatttaggaatgtcacctcttttcaattcatcctgattcattaacaaaatatattatattttaaacaaaaaataatatagaataattttaaataattattttacgaacttactgatgatgttccaagatcatctgcaagtcgtaacattaaggatccttggcgacatgcagcgtgatgaccctcttgcaaggactctaaggcctcgtttgttatggactttgtaagagagaaaaaagcatatacaaaaataatttgtcctcctattgaaagcgaggcgttctcaatatattttttcaaggttggtttgtatccgctatagaaccattttgcctcttccaaatagcacctacataactctgcccactgcatcattgttgttaaaaaataaacaaaattaggctcgaaatgttgtaactcaacgctaacaaaattatggtcaaaattagactcgaaatattgtcataactttgtcttttcggtatatattacaaacatttgagacatatttttattgagaaaagatatacaaaaaaattatttataccgagttcttgaggtattcaacgctgacaaaattatgctcttctaacacatcatacgccatttcatttacggtgttaaataaagtaaagaaaggcagcttcatataatctggtaactcgtctatggtttttgcatcccatctgcaaacaaaaaaaaaatgtgacacaaatttaaacttattctacataatatatactatgaattatcaaagaaatatatacatatataattataaaaatatgttatacctctcaacagccttggtgaaaagctctaattcttccaatgttccatacacatcatatatgtcatctatgattgtaattagagcatatattcttgcagatattctcctaaagtggctgaattgtggctcaaatcttattccaacctgccatagaaaagcctctaccaatctatctctagcataaaccattttattttttccaagcttagaatgttcccaccacctaacacattataacaaaattaatgtttctttcatttaggttacgaaatcccatgatttgtatttttgtgattacaagatcaattatatatagcgtaaatattattttgaaccctctattttgacaaattagaccttgtattttttaaaataatactaaatagcaccttgaactaattttctatcaaaataaaatttaataataatttgatctagagatgttatgataaaactgattacgcttactgcatccattcatgttaaaaattatcttcaagttggttatattaaaaaatattattaaaaattgagctcagggtcttaattatacaattttgaaaaatacaatgtctattttgtcatttaacaacaggtggtccagtcagtaacttttgcaaaacacagggtccaaaatcgtactaacccttatatatatgtttaaaaataataacagttaggtcaagttcaaattacacactactatacacgaacgatatatatgtaatttataatcccaattaaatcattgtgtgttataagagtgtgcaatttgagcgtgtatctatcattataactcgttcgaaaaaatatgtacctcgagacatgttttagatcttcttgaaatattgattgaagcatgttgaaatccaatttcgcaaattcaagcaaagtgccattcttgtcttgtgttttctcatattcttcaatgaaccacttagcttctgctcttatagtcctccaatgaagtggcatctccaaggcatgtctcactaatattgccatattatcatttaatatcatgttttgatcaatcatcattacatatcttttgagatattctgttgtgaaaaccctagcttcctccaaaatattttcgccatttttcacatagaatgaagcttcatataaagccaatactcccttaatatcatcatttttaatactcgctttgaactttcccgtctcgtccttaaaatcattaaaaatttctgcaataataacatcgattaattgctcaatttttattcacacacacatatatatatatttcattaataaaagtttatattaattaattatataacataccttgaggtacttcatatccatattcgcgtaaaagcctaaattcgagagcagtggcatataaatcatatttagggtttttattagtactaatattagtgaaatattccttcaaaatagaaatgatttcattctcaaaatgataagatattccaagtctttgtaatgtatcaatcaactcaagttggactaaagagttttccattccaactaacatctttttcacttcttcttttagcttattcgatcgacttgtatagggttctccctgcatatacaacatatatactaaataatcaataactattcatgatatatatgttgttataaaataaatacataataaattaactgcagtacaatatatatgtgaactcaaattataacagaaaagtgatatctacttttgctaatattttttcattctgagcattactttcgctataatttacgtacttttttgtttaattaatttatattttaaaaattataatcgtcacaagtacacaataaaaagttataaacactgctataactttttgtcgtcgctaaattcttaaaattcctccccatccaatactcatagcgagtatattaattatccttactaataattggtcgctattgtaagaaaaatagtgaccaattgccttatatggactcgaaatattcactacaaaaaaataggtcgatgtcggcggg

SEQ ID NO: 114729 - DNA, 1533 bp, Cannabis sativa
  modified_base (1476)..(1488): a, c, t, g, unknown or other
aaaataatttccaacaagatcaccccagcttcggcccccctctcgttcaatgctccacccacgtagaccttccaagtaggcagttcaaggattggatcttttgggaggtcatttaggcttgaacactctattataaagttagcgaggtcctatcccttaatagatacctacggctggtattggatatcaaattaactaagttccatgacccattttagcaatctactgaaggacgttggcttttgaactacctagcgtgggggatgatttatgagtactcttattgcataggcttgaaataacagcctcaactttcacaacatggtaagcaagcaaaatgttaacttctcaatcatgggatacctggattctgcacctagtaatctttttcttacgtaataaactgggtattgcactttttcttcctctcgcatgagtgcagaaccaatagcgtgatcagacattgccaaatacagatacaaatcctccccttccacaagctttgataaaattagagattggatcaattatccttcaacttctacaaagaagtctccactcctcgatccacacaaacttcttgttgcctagcaacacatttaaaaatggtagacacttatctgtggatttggaaatgaatcgactcaatgcagctatctatccggtaacactttgaacatccttatttttcttgggacaaggcatgtcagtaaaggctttgatattatctgggtctgcttcgatttcttgggagctaataatgtactctagaaacttctcgaaagagactctctgatggtacatttttttgggatttagcttcatctcatacttctttattaccagaaaggcttcctcaatatcttggccatgctcttcagaggtcttggatttcactagcatatcatctacgtacacctccatatttcaccctaattgatttttgaaaattcggttgaccatccattggtatgtagctcccgcattctttagtccaaacgacatcaccttatagtagtaaacacccttattggtttggaagctggtatgttcctcatctgtgatgtgaatcttgatttaattgtacccagaataggcatccgtgaaagtgagaaacttgtacccagacgtggcacgtattgtttgatctaactgcgaaagcggaaagcaatcttttgggcaggccttgttcaagtcagtaaagtctatacacatcttccacgagtgattaggtttcggaaccaatattagatgtgcaagccatactgagtataatgattctcattggaggtcaacttgtccacttccgtttttaccacctcagccctaaccagatctaaaggtctccttttttggcaaacaggggttgcatcttctcggatattcaacgcgtgaaaaattgtattacaattaaaccctttcatgtcagaatggctccaagctattgttggattatttattttaccaggatcttannnnnnnnnnnnngtatgttgtttaaacaccctaaaaatgaactttctaaaacgataa

SEQ ID NO: 114730 - DNA, 1674 bp, Cannabis sativa
tattctcataaaatcagtaaaatattaaaaaataaatttaattaatataatatataatttacatactaaacacgtgcggagcacgtgcaacttactagtacatataaatatatacatgtttaggtatggagacgtgccagaagcacgtaatcctatcaacgcatatagattaattatatatattacgttcattagattataataataataagaagaaaaatctctaattttctctactaggacatcgactttcagcttcgtgttgttgccatgaagggtcgaggtcgtctatggaagaacaatgctcagggattggggaagagttctgccaagaaatctaagaataacgttacttctgcaaagggaatgtgaaagaatcctcctaagaaagcaaagaattactgtcaaactcccatagatctagtgcttacaaagtccatggcataattaataagaatccaagatattgagttctttgaataagaagatgaaaataatgaagcgagcgaagtcctatcaccatgatcatttggtcaaatttagcagaggaaaaatcagtggtgaaggccaatctatactcgtgaatcagagagatgaacagttccaagaaaatgcagatctcaagtgagttatccgttcccctaattcttaaaaaagatgagcctaatgattgcacagaggagaaggaaagtttttttcccaaatgctatttatagatgaggctaattttggaaattattttgggggaggaaatgaattaaaattgagaatgaaaatatcgaggaggaggcttgctattggagctcagctattttctattaggttctaggagccaatcaaccaattcaagtgatgaagggatatttttgaagtgtttggggtagcaatagattagataagtttgctcttctcacacatagaattttttagttcagttccataacaatgaagacaaagataatgttttacatggaggctacctcttctttgacaagaaaccgattatgatgaaagtatgaaatgctcaagaaaaattctctaaggatgatcttgataaggtgcaagtttcggttaagattctgaatttagacttcaaatactgaggtgaccaaacattgagcaaggttataggacaagtagaaatggtggtgaagcaggattaggaaactaggaatcgagatacgctatcctatgctggggtacttcttgaaatttttaggttttaggaattacctaaacttattgactttaagaatgagaaaggagagattgtcttcttagatatcttctatgaatggaagccaattaaatgtacttactttaagtgttttgggtacagtaaacatcagtacaagaagcgcgtggataaagaacagaaatagattcttaaatacatgatgctatagaaggcatatcctattttcactaagacagagaaaggacaaaatgaagataatgtgttgatagcacaaccaagaatggacagggataacagattattaaattgcaaggaagaaacaaaattttgggaaggaaattacacaggctggaagtgtatctacatgtaatttttgttggaatttattttaccaggatcttagttctactcacaagtatgttgtttagcatcctaaatatgaactttctaaagcgataataaacacatataaagtt

SEQ ID NO: 114731 - DNA, 2080 bp, Cannabis sativa
acaatctcaatagttcgggggaaatttttaacggctaaaaaagttcaaggacacgatttactacatgtcaaagttcatgggaaaaaattattaattagcctatatttaaaaaaaagggaagaacgtggtggtggggaaattcctcctgttttgatgaggtgaaaattgggcaatcatgtttatgaatttcaaaggcaatcattcgtaattatgctcaagcaggaaacaattttgttgcttctatactacttccatgcctattttaaaatataatatgtacatgagcaaagaccctcttttttcttgaaacaattttagttattgtgggtgcattaattctttaatttatatctttgtacattgtttcatctttaagcataacctaaaacaacgaccaaataatcaacagttataataaaataaaacaaagggttcaaaaaccaattttttatgttaacataaacatacttatatgtacatcaatatttccatatattgattattaatttgaatatttccatgttcagaggttctatatgtatttatatgaatctatgatcaatcatttccaatccgtatgagagtgatacatatctatatgtatatataataagacgaagagaagataaattgtacgaatttcaacggtaaacagtgaaaataaaaactgaaaagatccctgcctaatctgaacatgttgtactgtttggtatgaccattggcaggaaaaccacgtgtgaacaataacacatatatatttttttttcttttttaaaaaataataattaaaaggggcagagttcgagaagtaaagacaaatatatgtaacacaaactcgcacacaatatgggtgccgaatgaggcctgtacagtccccaaacgaggtatagctggcggcgaattaaacgcactacattacattacccatcttcttcactacattctttctttaatgtattttttaccttcaaatacatataccctttatcttaaatttccaaagaggaaaggaaagaaaaaagaaaaaaagaaaaaaaaaaagcgtcagtaaaaatagataagtgggggagttggtggcattaataagggacaacagcagagaaaagaaaagaaaagaaagatgggtattattattataagggataccccacaaaactcaatatccccccgagagacccgcgctactataaggggttgtgggacccttattattataggtgaggctagatatagagagccaaggcgagttgtcctttgcttttaaagaaaagaaaagaaaagtaagaaagggaaaatctgaagagggattggacgtttctgccactaaaacacagagaagtgtaattacccatgttcatttgtcattccctccactcacactcacactctcactcctttactaacacaacactgcatttcgcctctttcccatgcaacctcaattttcaatctctctctctctcattttaaatgtttacaacacattagagttaaaagttggcaaaccataatatatatatttaatattttaatcacaccatttactctatatttaatatgtattctgtgatgtacggcagccgttagatggagaagttatttgatctgagtgctagagttaatataggagtaattagggttaaaaaatagtaacgtatcctgagacccatctaatgtatcctgagacctatctaatgtaccacagaatacattccgtgaaagtacatcacgggacaaaatcgtatccctatattgatttgctttcatgacaatatttattacacttttaggaaaactttgtatatttataaatggaaatttacacaatgtttgtttggtaggaggaaaaagttgaggaatggacataaaagatggaaggagacctaaaatcaatttgtttgatgagggatggaaggagagaaagaagagatatggaaggattggaaatccttctcatcaactattgtaaattacaaaaatactttctgttcaattaaacctccacttacactgatattgagactaaatacaacttaatacaaaggacagaaaaggaaatacatgcaaaatccctaagttg

SEQ ID NO: 114732 - DNA, 1823 bp, Cannabis sativa
tagagaaaaacgacacaattaaggggaaaacgacaacaaatggggaggaaaaggtggagtaatatttgttcgtatacaaatattataagacagtggcgctctactcacttctctctctggtctcttgtggtgagagggagagagacagagagcgagatggaacacgaagatgtcgacatgaccggggctgatggcaccgaagcggtaatacttttcctccattttattttccttacaaagcttttgcttgtttggcttctcggaatttattcttcatgttaggtttccgaccctaaacccccaaatttgatttttgattttggaatgggttaatgtgaatcaatcgataggaacttgatgacatgaagaaacgccttaaggaaatggaggatgaagcagtcgcacttcgtgagatgcaggctaaggtcgagaaggaaatgggttccgtacaaggtgaccattcctctctttgtttcatttcattcttttttcctttcgtatttccggttggtttttctattacatttttgtcttgtaaaatcatcgtatcatgggtgagaaaggattctgagatatgatttttttgccctagattgctaattgaaattgaaatttgaattttcatgctcttgttaatttcattgatagcaacttttaaggttgtattagtatcattttgtttagttttattgtacatattggtttgtaactttgtatacatatacattgaataatatctatttatgtatgtatgaaaaattgttatttgatttatgggtaagaataggagaatttgtctccaacctcattttgattcttgagtttgtaagccattgtaggagaaatcttcaatcttttattctatgaacatgtgtagaaatacggctatacactactaatagttgaaacatttttacattcctctgactgattttcttgtccatctagaaccatctgcagctgcatcacaagcaagccgagaggaagttgattctcgatcggtttttgtcggcaatgtgagatcacttatcttgtatttaaataatgattgttcattttgtttcgaatagtacagaaatgatatgtcaaatcctctagcttctgaattcgtataatattctatatattgtagtacatatttccctcttatcagagttctttattgttttttgctttctttggatcactaaatgaagcttgtatgttattctcattcgatggctgattaagtgtggatatttttacgttgactgttaaacttgttttcacaaataattttttttcttttcatgccactaatgaactcgtctgtagaatcttccctatggtcctaatgttgaacttgactgacgccacgaatggctttggacttgtgtaaataccagtgagccttggtttgactttttgattgtcattcaatcattatcttggctgttctctagttaacttcagttcaaggtctcaaaatattttatattcaaaatatatgcttaggtgaaacttgcgaacatctttgtttgctttttcatgtttaaattgatgctggaaccaggtgattgatggataaaataatagtctcctccttgagctcatcgcttttgttttcctatttatgttagtaaggggtaagctcaaggttgttttggaatgaaaattttgatggagagaagatggggtactttttgatttgcatttataggagctaaatgttttgaaaggcagaaacaagtttcgaggcgttttgccatagtaccgcgaggcgtaagcctcgaggcgctccaaggcgtaagcctcgacaataagaataaaaaattcataaacat

SEQ ID NO: 114733 - DNA, 2161 bp, Cannabis sativa
gatgctacgactgctaaattgctaaatcatcactttgaatccattttcctatgtatcccaaggaggaattttattcctcctttttaaggtttatgttattagatggttgctgcacactgattttgacatattttgctgagaaaatacagaagaagcaataattttgttcataatttgggtcatatttttgctgagaccaatacatttccctacttttttccaagtttccaatattagctgatattgaaagttaattattaattaccttgtttgaccctttctataaaaagattaaaattagtttgacaagtgactagtactatttcaggtggttccatatcttttgaagtttctggacaaccttacaaatatttatgtgagattcaatcgcaagagactgaaaggccgtactggagaagaagattgtaggactgcactctctacactttacaatgtatgacatcaaaattgggaaacagatttttatcattatttctgccctattattattataataatcaaaaagtttctttattactttgagcatggttgttatatgttgggtcataaattttgcactattttgctactgtgtacatttgggttttgtttttgcacctctcaatacattattttattctctgcatgcatcatgctttggttttgttttaggtgttactttttagagatgcagtgttcatgcttgctctttcgtatctcaatcagtatatcatttgttataatggaaatgattttctgctgcaagaccttatgttttcttagtgccttggtgactcaagagcaaaacgttatagtttactaagagagggtaatatcaaatgttcaagtttggggattgctcctttttgttggtgtttggtcccttgtagtaaccttcctaacaactttatgagtttcctgcctgctgcttcttaaatgttgtagggttgaactgagatctagttttaaaggagttctcaaagagtgaaatagggcatttttttcttcaatgttaataagcaagaaaaatagaaggctaaaactttatagctgtgcctgtttatttttgctactagttatgtaattcatcgtattgaagtggcatctttgtatggaatttagattataacattttgtatgtttttttatatgctttcaggtccttttagtgtcatgtaaagtgatggctccatttacaccattcttcactgaggttctttatcaaaatatgcaaaaggtttctaatgatacggaggaaagcattcatcattgtagttttcctcaagcagaaggaaaggtattgagctaatgttattaatgcaaaaatatttcaaacaaacattaatgtgctcttattgttatctttattaatcttttggttaacttgatttaattaccgatttataatattgaaaaccttttctgcattccttggagcaattattcccaaatgttggagctatatgctacattctaaatcaatgacaagatttagatactagacagctcagtattttatatttattatagttaatgagaacaaacttttggtggcttctaatttttcattttactttgattctcttccatcattatttgaaaatttttatgtcattgtagagggatgaacgaattgaacaaagtgtggcaaggatgatgactattattgatctggctcgtaacattcgtgagcgtcataacaaaccccttaaaacaccactgaggtgcagctttgttgccttgtcttttcatttatgtgtttcaactctttgcacgccttacattcttctcgtttcatataatctttttactttaatatttattctgatatcttaccaagaaaatgttatttattgaataactccagggagatggttatagtacatccagatgcagactttcttgatgatattgctggaaagcttcaagaggtaggtcaataatggttcaaggccaatcaagctttatgtatctttttatatctcactctcagcatccataaaatccataggctcagttttattttcttttctcttcttttcattaaatatctttcctctctttccatatttgtctttcctcttttcttttgttcttttgtcactattggtcattcttatcttatttgattaatgttttgtccaagtattaatcttttttt

SEQ ID NO: 114734 - DNA, 2477 bp, Cannabis sativa
aaatcccttaccatcacgacatacagagtgaaactactataaattttatgcgtctctctaaattatttacttaaacttattaatatctcaccaatctagtgagttgatgttgaccacttttcaaggtcaacaaaaatttatacccaattttaccataatattaacaatccatcatctcacatatattcacaatcatataccattcattcacaatatacatcacatatatatttatgtaaatacataaaactctcacgacattaaatatatatacattatggaattgctcttgatattaattattagttttatggtactaatatttaactaattatcattgtaccataatcccaaagatcttcagatgtatatacattaagtccaacacataaattgcatgaaagaaatgaatacctttagatgactatcaggatatctttgaaacttctcgtaagttggatctaataaatctcacaccgtagtcttccagatcgatccaccatacatagagtactgagtgatactaggatgaagtgtatatgaagtttttgtataaatctcaacacatgagcaaaaattattttttatgtgatagagagataaaggtttaatggtaaaattctttatatgctttctgattagttacgtaaaaattctattctcaaaactcatcttcagaattttgttatatgacacatttaaataaccctaataaattttttattacaattaattatttaaattcaaatctatttattaaatcatatttaattacttgaataaataatataatcgaattcagttataaatacttatatttaataaccaattgagggaatctcacaactacttgagagaatatctcaactacttttcaaattaaaatatttatctattgaattaattaattaaaaagacaaaaccaataagaacaccccacacactatatggggaacatgcactgtgtttggacagagtgcatgtgacgcctcctatgccttgtttaagacaaggaatgtgccttttgtcctaacaacttttatcttaacaacttttttcattttttctaattaattaatttgaaaaataaattattgattacaaaaataaataattactattttgctaattcaaaatagatttttctgaacttccatatacatttaacctaccccttaacagtgtttcaagatgacgatctggggaacatgggcctataattctaagctctaataaattggatttatttattaaatctcatgaatcaaataatcttgtttgttaattccatgattactccactataaatttagaattgaactcttagtaatcatagaattatatttattgagttatactgttgtgcctatttatataatcaatttcagtgattagacctgtttgtaatgatttgtaattagatttggtcaaattaccattttacccttctaattacttctttatcctttagtaccgttaattcactagtacaaataatctaaatttgtgcacaacttttcagttccagaattaacacttaaagggaacaaacattcgatctattaagaaagctaggattacataattgtagatcatgttctcaactattcacattattagattcttaaaacataagttgtaagattcatcttctctgagatactttaatgagtgaataaaaaaacttagtactatgaataagagttcatgattactcaggatttaggccgatctactattgatcatcattataatatgaattaggtctttatagtaaaaggtctgtttgataaaaacaactttattcatattagttcttgtcatgtataatctctattatatacaataccttcaataagatatcatgttacactagtaatacgaatcaagattacttgtaccgaataacgggcatccgtgaaccgtagtagcaaccattgattaaagattcctaaactttaatatgttgctgactgttttattcatgactaagtgatcttaattttctgtatagatacaagtcacagtctcatgcatgaataagaaatttttttatatttatatgttattcaatattaaatattaataatttgacattcatatatatatatatatatcaaaatgtttaactcttattaataataaatgttgtctttaaagattttttaagacataaactcacctagggccaatagagcccccataaatagaacatcattccatggagaaagggtttgaaaatcataacttgtaagctcaatattttgaatcaatacaacaagagcattacactatttttacttgagttttctttagaacttccataattcttcatctcttatcttcatatgtcttttgtttttttagtcttaacttggtttatgagtttttactaggggtgttcatccgatccaatccgtatttttttggtcaaacaacatccaatctgcactaagtgcggatttcatattttggat

SEQ ID NO: 114735 - DNA, 2270 bp, Cannabis sativa
  modified_base (2224)..(2234): a, c, t, g, unknown or other
ccagttccaaatcatagacgagaaaatgggaaccggagcctgttagattaaagaagaagagaaatgaaagaaatatggagattgaattgagagttaattagtgtgtgtgagtaagaaataaagaataatatgaaattgaaagcgtacccggaaggaggtaaggaacagaaaaagatgatgcgggaactggaatgtattggctaagatcataaaaattgcataaagaagaaagagaataaaagaatgcggtgagcgtggatcgaacacgcgaccttcagatcttcagtctgacgctctcccaactgagctatccccgctttatattttctgaatagtaataatactaaatatactgtgttgtatgttttgggcttttctttttttggtgacagaatgttttcctatgttaagaaacactactgcattagaagctgaattatcagttctgtttggcttgttgctgcaaaataccatgaaattctgtttttaatttctatgtttagtcattttggtgctgagtttttgcctagaaagttaaatgtagtagctcacacagtagctaagggacttgccacttcatttgacaccggttattattaatcaatcccatcaaattgtcttatttaacagaatgagtagtatggtaacatgatatcaaactaaataaggataattttaatgcacgaaagtgaccatatcatcacatattattacatagatgagatagaagaagaagaaggcaataaaaatgatgaagtgaagtgagttagtcgagcaaaggacagctgaatcggctatcgacaaaggagagtttctcagctcttgtaacagcatctaaaggaagaggtatgaaacttccagatggtccataaaaatgggggaaactattcgactcatccgctttctcatataccaatccatccccaagctgcaacatttcacatccccaattcaaaaatcaaatcaaccaaacaaaagatgatagtgatgatagattatagaccttgttggcatcgatttggaggaggtacagctcatggttggtgttgaggaagaaattttgcagagtggactgtacctgaatttgaagattacaggattagattaataataattagtgagagaagagaagagaagagaagagggtttacctggttatgatcgctaaggtgaatgaaccgagaagatttatcaaggtctccgccgaaagtagagccatttctctgcaactcttcccattcttctgctatgctgatccggtacacaaagttttcctctcttccattaccacccattttctttcaccttcaaatcaattcgtttgtgttttttgtttttttcttcctcagactttatcttgcattttatttgtttttattcttcccttttaaattttaaaataaaattaaaggcctgactttcagattcaatttctttaacctaatttttttgtgtccattgctaaatcgagatttttggcatgtcacgcgtaataagtcttttggcattggcacgagctaaaaaatataccgtacgatgttgaaaattaacacagcagtacaaaaaatataaacttaaacacgacacaggctgcacaacataaatacaaataaagtaaattaaaaccacaaccaacatgttaaaaactcctataattttgatgattaataatatatatatatatatttattaataaatattcaaattctaattattctaattaattttttttgtataattatttataaagtattgttaaaaaaatggaatgtttttaataatagacattttagggtatcattttacatttttaccttagaaaagaaaattaaataaaaatcaaaatcaaaactttttattttcaaaaatacaatctgaacaaccaatctgtgtgaagcttctccttcttcgttacctagccgaaccacacccatctccatctccacaattttcattctcaacccaggtaattcagctccaacgataattgaccaacgtggaaaaaattgaggatgtgatgagtgcacatttgtacactcattcttagtcattatgatggactagtatttatttttgtatagatttaatgtattttctccaagtgtgtaggtttgtgctgaaaatgcattttgtgatggtctgagatctttaagcctatttttgacaagggatattggcggctaaaccacctgaactttagggtttgtaacacttaaccacaaannnnnnnnnnntggcggctaaactacctaaaccctggttccgttttg

SEQ ID NO: 114736 - DNA, 1717 bp, Cannabis sativa
  modified_base (705)..(712): a, c, t, g, unknown or other
  modified_base (1016)..(1055): a, c, t, g, unknown or other
  modified_base (1676)..(1690): a, c, t, g, unknown or other
atttggatttgttttttttttttttttttttttttgtcttgttttttaaatttgagattgtctttggatataagatttgatcagattttagttttcatgtatttgaatctgagagatttttggaaataaaatgtggatgcaactgctgcggttgtactggagataggggtcacgacaataacaatggtggtggtgatgatttggtgatggtggtgatgatggagaaaatttaaaagttattgaaataattaaaaaatttggtaccaataagagtatatcatgtgtacatagatgtacacaatggtagtcttaattggcttcttagttggcacttaactgaaaaaaaactaactgttacatgagatttgcaaacagaactaaactaaagaccattttactaaaaaaaaataagagaattatatgtatacaaattaaatcataaaagggtttgaccacaaatttcccttattattatcataccaaaagataaagaaaaactgcatatgacaaaaccaagcaataaatatagtttttgaccaatatgtgtaataaatacattttatatgtatgtataatatattatatatatatacttttatctttttaatgagtcaaagtacaccaataaaaaccacagcaggcacatctaatcaagtgcctaaccatttcacagaactcatacatctttctctctctctctctctnnnnnnnnctctctctctctctctctcctgcaccaattttcctccataaccaaaaggttttaaaacccagaaaaatcaattaaacctcaaaaatggataataatcatccaaaattaaagatccattaccactctttattgggttctaaatctaatagtattgcactaataatcttcctcttcttaaccgttacagttattcttagtctcttcatttggtcacctccttacttctcaatattccaaacacaacaaatcatccaatgtagtcactcttcaaattcagtaagtctttattattattattattatnnnnnnnnnnnnnnnnnnnnnnnnnnnnnnnnnnnnnnnnattattattattattatcaaaatttcaacataacacagatacaaaaatattaattataaattaacatatttctttttgtgttttttattttttttaagacgacaggttttgagatgaccccaaaaataaatattgaagatgagctagaattagcattggctaaagcctcaatgggaaacaagacagttataatagttgtgatcaatagggcttatgcagagcaagatttgaaaggtgacactacaatgcttgatattttcttagacagtttttggttaggtggtgaagagactaggaagctacgtgatcatcttctgatcgtggcggttgatcaaacggcctacgatcgttgccagttcttgagacttaattgctttagattagaaacggacggtgtggatttcaggggtgagaagctctttatgtctcaagaattcattaagatgatgtggagaagaactttgtttctcttggatgttcttaaacgcggttatagcttcgtctttacggtacgcattactacttgttaatctcaattaatagtcttctaattaaccgtttattgttacttaattacctatacaattagggctcgtttggaacgccgtattaagtcgtatnnnnnnnnnnnnnnntatattgaattggattatatatcatat

SEQ ID NO: 114737 - DNA, 1201 bp, Cannabis sativa
cataaaatatatatgtttgtttatcatttaatttcttatttttttatatatacatatagtaaaaaattgttattaaaaggcctttattttgaagctcgcccaaggtcttcaaatagctagagacagccctgctagacaccactagtgcttaatagcaatgctcatatatttatggtcgataagtcatttgagcggttgagctattaatgacgaaataacatattagttttaataaattagacattcattttttgtaattgtatggtatataagcttaattcgtagctcaaatcatcagttcgaatgtctttgttcatgtcattaaattggacaaaattaagtgtgtctataaaagcaaaatattatgattcgtatatatagtatatatacatattttcaaagtattaatataaatttcaataagatgtcaaataataattaacaataattaacttaaaatatagtggtccaaggtaagtaggtatctcatgatgtacatatctacattccaatctattctatcttttttcttctcctattgtagtcacaattaatttttatcataatttctttaaatggagcacgaattataattattgttatttgtttatttgtgggtacgtctagtattattattaatcaaaaatgatatgcatatataatttacacataaatatgatatatacctttgtagcaagtcattttaaatagaaaagttgaatttatttatcacataaatatatactaaattgatatgtgaattatgtatacacatattattactcattattaatttttcaatgattatatatcattcataaccattattattaatttttgttttcatgtgcttagtaacgatatcactatatgcttattactttcacaactgaagtcaaacttttcaatttttttaattttagaaaacggaataattctatgcaagcataaatcatcaaaattaagttggaggaagacctcaccactaaactcgaaaaccttctaatttttatattgatcaatttatctctttgtaattcctctataaattaaaaaagttaatcacacttaaatatatatttaggcccacttaattaccgcctatcataatattaagaggaaattacgtagaatatgacattttttccttaaatttcataaatatggaaaattagaaatttacttaacttatggctttttt

SEQ ID NO: 114738 - DNA, 2712 bp, Cannabis sativa
aaaaacaataataaagaagaaaaataactataaaatgtgatccaaaacttaggctaaaaatagcctaacaggtaacactgtaactaccctaaaattctacactgtaccaacactcttaaaatcacatttctattagtgccagtagtgtaaaaaaattagtaataagcatacattcacatatattttatttatgctatcttacctcgtttccgtgctcaagtgtgccgttcagcctgagtggaattgcagctcgacgctttatagggccctaaaccataatatttaaaacttgatgagagacacgctaaaacacttatcggggacttaaaattaaatctaagaataaccctatcgataaataggatggtaatatcccaaataacacaaaaatagataaaactagggttctaaaaaatagcccaactgccagaccggttcccaaccggaagtctggttcctagggaccaaccggtcgaccggttgttacaggctcccctgaaccagtcggccagttaagtgcagggaacccgaaaaatgtccccatgacctcaaaacaaccccaaattcaaccaaaaactccagaatacgtgtatacactataatgaatcaaatccaagcagtagaatttagcaaacaagacgaaaacttaagcaacctagaataaacatcagaatcctaacccaaacatcaattggtaccacagtacccaaaatcaaatatttatacacccatttctatcttaagcttcaagaaattaaaaggaaagaagttagaaagtactaccttgaatcaaagctctccaatacagcaagaaatcactgaaatgagctaacaaaatccaaccctaggctggtttcttgatgcttcgaaaaagagagagagagagagaatggtgaggaaatgtgtatctaggttattcttcaaaattcaaaccctttattcttattttaattaatattaacataacctatagcaactaatatccccacataatgacaaaatccccaaggtaaaagactaatatacccttaacataaaacaaaagcaaccatgctcatcaagggcaaagtagtcaaaccaaacttccaaaaaatctccaaaacttaacaatgacgccccgctattaataaaattctataccatacaagacgttactctctaatggcccaacgtcgcttcccactgttaccgagcacaaacataaaaaaacgagatattcactcacatagcataattaatatttattaaaattaaataaatctctacaatatatataaatcataggcgataattaaatctcataaataaactctaattacttgataattcaacatatcaatataggtggtccttacaaggtcagtgttacatacacactaggagaactcatgtacacaccaagatccagcgaaaccatttctgagtgttatcattcaaaaaataggttaccatgaccataaaatcatgaaccatgaagctaaggatgttacgtggaagtcccagggctcaatgtgggatcaacatcaatgttgggcacccaagttaaaatcatgtgcgctttctcacatcagcttgggttcctatcagcttcttatgggcaatttgttcaatcattgtcttaagatacatgagaggcatgccttagccaagttttaaactttagagatagatctacgagaaacgacacccaagcaccataaagccctaatgggcgcgtaggttgacatctagtcaatctgggtgcaccgtggctagggtttaggtttttagggacatacttggaccctgattcctcaaatacatcaaggaataatgcaagaacatgatatttcatcaacaacatctcgaaggagtccattcacaactatgggctcctaggttaacattccagccttggcacaatttcgtttcatcgggcaacacccgtgcaaatttgacgaaattaaaattcatggagtacttttcaccaaaaaagaagattgaacatgaatgagaccaatttcagagatgttgacccccacctgggcgcacagtgtaggccacaaggccactataggcgcacacgtatctcaacctagggaactccaggacatcattccaaagaagtaagagcgttatagccttattttcgtccacaattaagatacaaaagctttcaaaaaacaaacaaacataaccaccccgttggtggttccgtcgatccagttattttgctccgagcatcgatcttattttacctcaaaaatattatttggatccttctacaatttaatatctccattatcatcgcggtatggagagtaaactactataaatatttgaggtgttctctctttagtttatattttttcgtttgccacgatcacttatcaaatggtatagagaacaattttttagcatcaacaatatatattaaaagtaaaaattctataaagaatcatgtttggggtaaaatttctatttactcttatacttatagggcccgtttggtatgcaagattggactgaattagataggctaatttgtccagttcaatgtttgggcatattggaagtctggataactaatccaactaatctcatctgttgggataatgtatcctatccagaagggtgtgataaataatctcatacaggtgaattttttttttatcgttttttttaatttttattttattaatactttttaaatttaataagaatttaaatgaa

SEQ ID NO: 114739 - DNA, 2462 bp, Cannabis sativa
  modified_base (33)..(54): a, c, t, g, unknown or other
cataaaccaagaatttcagttatataggcacannnnnnnnnnnnnnnnnnnnnntatatatatatatataatatattggtgttgcatggagaaacgatcaagacccttataattgcttaattagtgtatcgtctcttctgcctttgatttaatttgtctcacaatcatcaagcatcaaagtaatgtccacatacatattttaaaatatataatacataataattataatatacaatataactcgaatgtggcagacaaaattagggtttctccctaaattatatatatagtataatgtattatatatattattgatagagctatataattatactattatactagctagtgcataaatacttaagttcccatagctcatgattatatatatatacatatagatatattatatggtaatatatatgatatgccaagtgacgtacattaccacttcttgtttttgcttgatttgtcattttaggatccgcttattattataattacaataattttcaactgattacgtataattttcttttaaattataattaggtcaaacatgattaagactctgcttaattatatatatatataggtctaatctaatcctaattatgaaaaagaaattagaaagaaagaaagaaaaaatgaagtgggaagagaatccaatatatcctagaattgtacaaaagcgccaatggttttcaatttaattttccaataagtatatgagcaattttaatttgttcacttttcaaagtgttaatttttttttcctattttttttgtcggtattttatggatttgataatagtgtgtttgaaaccctaattagaaaaaaaaaactttttgtttgacttataagattcatttaatttataaactatatataagtatttcttaatgttgattatttttagttaattaaagctcacattaaaattttatataaattataataaaaaattattaactattagtaagagaaaattttagtgagtgttagacaacactaatggatattctttaattaaaatttgacaaatatgatatttcctaaatttaaagctcacattttatacaaaaatgatcaatgatgatttgtcaaattttaattggtgaaacataataaaaacatgtaatttggagatagaagatttatattggccagataaaattttaaagttttaggtaaagatataaagatgctgtacgaaacatatattaataattaatatgttataagatcactgattaagaagagagattagttaattgacattggttaagaagagatatcagtatattatatttatatataatatatataaaggatttgaatgatgtagatgatgatgctacaaatattactaattaaatcgtactaacttaattggcattggttaagatgagatattagttacaataactcatgatatggattattaggctagttttggaccatattaattcacatgtattaatttaattatatgatcatattaaaaagtcaaaacatatacattatatataatataatagttgatcgattttaacatattccatacatccatgcataaaaaaccaaaacagcataatattatcgatcatatgcatatatatagatatatttatttttcatgacacataaaaagggacatcccaactaagattaattataatatatatatatgctaattaattacatattattatgtgtatgaagtgtgtaatttgagtgtgttccaatcatttttcttgtaaacatctatataaaataatgtaatatagattgaaatgatgttttgatgtattgctattaggcattactagtagctagtatctagtaatttttataggtgatgttttacgattggttaattaacgatattctttaaaagttattttcttaaattatatgagactcgatatttaattacaccaataacagtatgatatcaagaaaggactagacactagtactttttagtaattcttaaaaattatataattatattgatgttttgtggtgtttaaaaattaaaataaaatttgattttctcataattttttttagaaaaccgatcaaaattgctcaacaaaataaatttattaagaataatatcgccatctaataacttttaaatatgaaataacaaaatactttcaacaaactcataatatattgaatttcgtttaatattaaaatttggttacttttttagttatgtaggtataatttttttttttatttcagttatctactctgattagggcaagggctagagaaccattcaaaacttcatcatatcaatatcaatatgacattaaaaagtagatcgtgatgataccattcttgaatctaaatctaaaaaggaaatttgattaaatatgcataaaatactttaatatttttttcctaaatccatatgtattaaaattggccatatatgaccacatta

SEQ ID NO: 114740 - DNA, 2666 bp, Cannabis sativa
gtccattgaatagacttaatttttaaaatttactttcttgtcattgtaatagaaaacttttagctccatatgattatataactatattgttattgtacatcagaacataattatatcagaccctatattcaattaaccaaagagttaagactcacaaaattttactaagtgcttttgacttaaattttcaaatcatattctatccttctctattattttcaatatgtttagactataaatcctcataattacaatatatttaacaacttgaacaaaattagttgttgtttgcacttctttatcccaaaatattttgttcctaggtctccaaatcatatacacacgcgttgagaacaaaaatgtaaattcttttccgcagttttccatgatgacatctacggatgtaattcaaaagccccattatatgtttatatttattatttttattacaaatatatattgtaattaactaatatatattttttcccaattatttttttaaggaggttcccatcacttttattttgggtcagcccatgcatatatgtctttaacttaattattattaaatttatccttattggatccatcattatttgagttttgatcctcaaactttggagaagttcaaaatatttaataagatcatatcataccaaaataatatttatattttattttaattgcaatagattttgatgagaataatggaatacatgcatgttgggtttcactacatcatgctagacatcacaattattttctggtaatatatatatatatatataaaatttatattatagcactaattaattaataataataagattcatcataatgtttcacatgcctccctcatcacagaagtcatcatttttgtctcaaactatctcattcaacttcacataataatgagtaaaaattatcatgctctatatatagttttaaattttattattattattattatcatgatacatatatatagttactactgcctatatatgtatgtattatttaattaataaatattttatagtataaaagtttcaaaattattgtctgtatatcgatcatgagatggtcttccaggaattctgcatgtgcatgcattatggttgatcacccaccaacatacatataaattaattaataaattatggtcaagagttcttttttaatatctatattattcatgattttttaattataaaaaaaacaatttcatggaaccaccacaaaaaaataaattaatacgtactattgttcatcttcatttccttatcttgttctttctctgtcaaattaaattatcaattattttaattatcttaattaaaatgttatatgattttagtaaatttattttaattatgtaattgtatgttttattgtcaatgctattattattattttgtaatgacatgacggagccaaagtgaggatgagatttgtagcccaccttaattttatttttgttatgttttcatgtatttattatgtataaaaacaaaattatatatatatgattattgttaatcttttagatctgttcggttcgtcgtcatttgattatatattgaataatattgtctcacttcgatcaaatataaaaatattgagtcatataagaatatgagttacttcactcattaccaatgaatggttttgagatggaaccccatcatgattcttaacatggtatcagagcctttttcttagtaggctttcgatccacacctatcagatacttagccaaccacaagtaagtaaaaatatggtactcccagctgttaacaaaaataaacgagcaaataacactacttatgataaggtgattcaagattgatgagcaaaaaataatcatcatcttgagggaaaatattggacaattttgttccaaatggatcaaatgtaaaaatattgaaccatatataagaacatgaactactccactcattaccaatttattttgagatggaatcccataatcttccacatataattatatagaattttagttcatttaggtttaaatgaatatcatttttttttaaaaaaagttcaaattgtgtatagttttttacatatatatatatggatatgattttgtcccgtgatgtactttcacgaaatgtattccgtagtacattagatgggtctcaaagtacattaaatgagtgtacgtttctactttttaactctaattatccctagatcaatctcaaccgtcagatcaaataactctctcatctgacggctgccgtacaccacggacaatccgtaaaagtacactaatagaacaaaatcatatccctatatatataaggagtaaattaatattgatttaaaataaatgcacgaataaaataataaaaaagaaaaaaagttgagagatgacactagattcaccctagctccttattattataatttatatatagtctatattaagtctagtaaaaatatctagataagtataaaaaagttcttattacttgattttgaccaaattagatagattaatatatgtaagaagacatgttgtaattaatccatatttttatatacaataacactactacaaaccaagcttttagaggcactttttttcagcaaatattaaagaaccgacgtcatagggttggaattttttggaagggatt

SEQ ID NO: 114741 - DNA, 1934 bp, Cannabis sativa
caaccacatcaaaatatgtattaacttatttttctgaaaaaactatgtattaattaaagtttcaaagatagacaaaccacaaagagataatgttaataattagagcagagaatgaggcgtacattttaaacaaacaatattcacatcatcaatacatctgatctcctactactctttacaagatttaatttttatataagttaaacaaagtagatattgttctctctctctctctctgtcagttaatatatatttatatagatatatattaacctttcaaccctaccacatatagcccttccattggccacaaaaaagtgattctgaggaaagtgacaagtaagtgatgcacagccacttgctcagaagtgattaagcaaaagcaaagtaactttggcaaattttctctgaccagtagctccccaacttgtttagtctttctgagaaaatctcgttaatctaaaaccccaattcgaaaatcccaaaaatagaaaaggcttaaggatcgaccagtcattttttttttctctttttctttttccttatcacaaaaatcatatatatgatatatatatatatatatatctaggccaccaaaaaagagtaagtattccttcttacttacttccttccattcattcattcatttctcaaaatggagctgtcaaggttctatacagactcgtacgtttttttgggcattgatgaacagaaggctctttctttttcgagctattgatctgcagatatatactatatatgataaaaaatctaaacaatttgattgacccagatgataatataacaccaaaaatacaagaaagcaatctcgagtgatttgatgatcgttattacctgtttatgaagcagagcattctctttctttagattagcaagtttaatctccaactctttagtataagcctgcaaaaccaaaaccaaaaccaaaaacagaaacaaaaggggttttgttggtgttataacccttttaatctaaacttgttttttttagatgaaaacgataaggcagagaaaagaacaaagaagggtttgcctcttttctagccctggctcgatcagctgagtctctattcttcatcagcctcaaaaatcgtttttcgggtgattcgacactcttctttgttgcccttttctttatcagttgaacagaagaattagaagtggaatcccgcttttgttgaggaggttttgaattaaccagagctcgagtctcgaggaagtggaagccaaaatcaggtgggtcagaattcaagctgaaggaagagagtgatgggtgttggggatgatgagagagagaaatgtcatggatggttgatgatgatgatgatggtgatgatgtagggttggaaaggagaggaatggggaggaagtcttggagaatagtaggtgggaagggttgatcggaggagttagtttcagggagggcagagagggttatgtctttccacacttcttcttccatggccatgggaaggaggattgaatttgagaaagaagtgaagaagagtggagagacccttttattttttatgatgttgacaatgttgtgtctccacctggcaaaacaaaagaaaacttgtttggcataaataatggaaaaaatacactgacatatttttattacaaaatggaaaattatttgactttaccgaatacacatgaaataaatataaatataaatattattcttcctatttccttttttttttgtttgaattatgtaaggtaaataagagtttattccaaccagatgagagcgttcctaaagatgaattaaaatagctcaatttttaaattatagaaaataaaaattacaaaattaagctttcaacaagtgaggtaaaccttcctaaaaaaaaaaaaaaaaaaagtgaggtaaaccttaactattttacatattttttaacttaatg

SEQ ID NO: 114742 - DNA, 1846 bp, Cannabis sativa
caagtttgacatattgaacaatctcttcctttctttctctattaacttcaatacccttaatccttatccatcatagaaagttgaaactcaataaatttgttaaccttttcttcctcctaagctaaaccataatagtgtctattcacatatagctttcaaatgatgccttcttaattttgaattagttgctaacaagactttgtcggttcaaactagacttaatgtcgaagtccaacctttagatttggtgtttttcgttttcgagtactataaatacttgtaattgaatattgttacaaggcaccaataatattaaacaccagacgaatatatgaacttcacgctcttgtattattgtagtgcccaacaccttcaaactcggaacatctcttgccctatacattattcctaattatttcgagtttcttttgcatagccataattggaattttcttaacccaattgacctttcaaaagatttgactaagttaaagaagaaaattccttcaaactattttgcctagatgacaatttcattaaacatctcaaaatcaaacaacattccaagtattgtgagaagatctacttgggttcgaggttgcattcgaaaatcttttcccaagactcgagagttttgtcttctgggtcggttttgtacaacgcgaggcgagttatagggaagctcaagctactaaggctatcatcaagaatgttagctctgtctcgagcctttttcatctcatcctctgttaaatctgcatagaggatgcttaaatgcggcatgtatgctacgaaaaaatgaaaatgagaaagaagaaaatgtcatcaaacaagatgagaaaagaaagaaagaaacagttatatatgcttatgccttatctaacaccaaacaaactttcttcaattgagtatgaattagttttgtaataatccagaatcaaaggcagtaatatcgaatccaaataagcgaattcacttttcgaaaggaaaaacaaaaaactaaattaagaaaccatatgtaacatgtacacaaataaattgaaaacaacagttcaattcaataaatataaggacttagaataaatatttttatgcaataagctcacctgagttcatcccaagtttcaaaatttaacaagacttacaagtgattttgattcaatattcttaagtgatatgtttataaactatcttttcaacttttttattcaatagttagctaaagaaaccaagaattcaagaatatttcaagagcaaacataatgacttacgtgttgatctcttgtaaccaaaatgttcagagcaatgtgaacaagcttcaactacctaaacaaatgagaagaaaatcataatccatcatacataaattataagaacaaatatgaatttcacccctcgaattataacactcatataggatttttttcctgaattatttctttttcgtaaaaaaattcctctcgaattatggaaataattacaaattttcccctttatttcgatcatttttgcaaacaacttcctgttataactccagtaattcaagagttcatgtttaaagtcattaaacacgattccaactagcttaagttagtaaaataagtcctaatactataattatactaatagtttgtgactacatcaataaagtatctcaaaaaatgaacgaaatacaatccaacaattttcataattcaataattaaaaattttatttattctaagaataatataacatcacacacaacagaaattgagtctaaaaatgagtgatgcatttcatcaaacaccttgcaaacaatcttcaataccaaactaactcaaatacccattaacccaaaaacaca

SEQ ID NO: 114743 - DNA, 3653 bp, Cannabis sativa
  modified_base (3589)..(3589): a, c, t, g, unknown or other
gctcggcacgataaatccaaccgtttggatttttcgccattaaaccacggaatctccatccgtggtgggcggaagtcatggctacgggatcggccattctgaaaggagccgagctaaatcgaaggcccgaccaaaatctagaatggtggtactgccatgtttgttgagattttgggggatggctgagctctaacggcactgggttcgccaatcgaagaccccctcccttcaacagcacgtcgttgtcgatctgcaacagccgcagtcgcatcgggtgtggattttctaggtggtagaaggagcagtgagatctgactcaccaccgattccatctgcttggcaacaatgtgctcaatggtgctctgaatctcaccttggagcttctccaacccctggttcactttccggacatcaaggagaagctccaaaacttccgcttcgaccttctctccaatgatatcagccatggcgtctttctttggtcccatggaggcaatcctctgataccaattgataggtcctaccctatcgattcaagcactaacaaacagaaaataaaaggaagaagatgatgaagaaaaaaggttactggtattagaaaatccccaggtattcgagagcctaggctctccttacaataaagtaaaatcctctctaaaacctcacacaaactcttcccacattatttatatcccttaccccatggtaataccgtgaggctaagtcccacccttacaccacctacaaaacaacttgcacagtcacttaatgccctggggcagcccctatattaagtttcctacccctttattcagcatagacataagtgacaggtgggttatcagttagctgattaaccatactaccatagtgcttcaaactaataccaaagtaaagcctatacagttcaagaatatgttcacattctcattcacaggatatgcagcattgttatatagatgattattacttattactatcattaacaactcaccatctctactccatatccttgcttgtccatcataagagcctgttgcaagtaatgtcccatcaccctgaaagagaagtaattatgcaaaggtccttatgtatggcacgccgaatcttagtagtttgaagaattgaaaaacatcttggaatcaaaatctataacatctattgacaataccggaaacaaaaaatctcatattaactaattaaaaaaaaaagataaaaaaagaaggaaaactcacattccaatctagtgtcgtcacatccttgcttttctcgttggttttacctttgaaatgcttcaagacaacggaagttgtagtagagtcattttgcatgacagattctgaagttgcatctgccatggtccaaattcgagctgttgaatctccagacctaatgtcaaaacatttcaagcttggttctttctaaataaatcttgagcttctatatcttttcaaaacaaatactcacccagacgcaagaagtgaaccagaaggactccatgcacacgcaaaaacctatagaagtggaaaaatagatcatgtgatccacaagataataagctcaaaactcaaaaaacaatggattattcagattcatgttcagacctctgaagtgtgcccttctagaattgttatgtcagaactaggaagttctaaaggaaataatggagttgtagagatttccattggctctggtcctattaacaaatccactcacacattttaaaatgcttacaaatatgaaaacactactcatattataaaaacagatattaatagaatgtgaaagaaaagtaaattaaaaaggacaacaaccatacaaacaaattaccattgcattctgcaggcttttcttcaagttcaacgttagccttatcttcagacttctcatccaattttttatccggctccggtcttcccttatcttcctccaaatccttcattattatctctttatcattttgttcttcttgttccttcactttttccgcctctccttcctgtgagcgatcttgttctattttctgctcattctcattgtctttctcaactgttttaaccatatcgatattcataccctcctttttctttttaatgatcttctgcagttcatagacatctttcgtgataagatccaagggttgtataaatgagaaatcttcatctacatcggcctcaacctgtaaagtggagtacaagaccaaaattaaaccagctaaaacatctcaatcaatcagctcaaaataaatgcaaaacattcaaataattaaacacttacgttgccagagtttgcctcaagctcgaggtattgaagtcctttctgcacaaatgtaacaagtgcaccaggtggaactatgtcgccatcaattgtgcttttgttaatacccgcttcacatccaaaagcaaaagctgagtgtgtaaagcctgaagaaactttcagaaactaatttagcgatcaaattattatttttattaaatatgtacacacacacatattctctgaagaaaactacaaaaattagggcccgaaagaacacattagtatcagctcagtgcccagacaagtaacaaaagaaccaacgaaaattaatgcataggaagagatttcatagtgggcaacccccaaactagtaaaaagtagatcccttagtaagaaaattagagaaaaaaataaaataaaaatattgtaagctgagtgttttaggaaagtaagagctgagatcacgtaacagtttctaactataaattaaccgcatctggagaataaccgatttgttatcctagaagattaagacaacaagttcacttttccccgtcaaagtattacccaaaatagaaaaatcaggtatttaaataatttttcaaataaaaagagagtggttttgattttgaaaagaaaaaaagaaattgagagagacagagaacctgattcgtggagataacggaagactatgtagttgagttcggcggaggtgatagagatcattgagcttagaaaaacgatgccgtttccggtgttttatacttcaaaaccttattgaaagagattaatctacttccgcagcttattcagcacaaaatgacggaccacagacgttggccttggccgttcttctgcaaataataaaaaatcagggtgaatctttttgttctctttattctaacttctaaattttaactaaagagagaattttattttatggcgctgctcttctgcttgcttctacttaaattaaatgttcgttgacgacgacgacgtcgtcgttttcatctccaataccaatttagcccacttcattgttcatgtatatttatgggcttattttacttgttttttgaaataaacttttgggcctgttcgattttattgtaggaaaaattagatgttgatacgtttttttccatttaattttaataataacgttactttttaaatttttgaatataatgttacttataccgttctttcattttaaacaatttctttttagcttgttgggcacgctgagttaatggcggtgacgtcagtgtcagttggaacagatggggtcatgtccaactggcagggtcggccctaggcataggcgggntaggcccgtgcctagggcccacactttccgggggcccaaaataaaaaaaaaatattaggctttt

SEQ ID NO: 114744 - DNA, 1095 bp, Cannabis sativa
  modified_base (43)..(74): a, c, t, g, unknown or other
  modified_base (1035)..(1053): a, c, t, g, unknown or other
aaccatgcaacataaaatgttgtttctgatctttattaataannnnnnnnnnnnnnnnnnnnnnnnnnnnnnnntagggcacaaaacccaacattgaccttcgtgtttctttgtttatgttggcagagcctgtgcctcagagtgctgagactaagggtttggccaagaaagtggtccaatacaaggcttttaccgaagcccaactgaaagttgagggcttgatgaccacaccactgctctacgagcatggagttattgcaaactttcagagcatcaatagtgtcggcagcaagggccaaagttaggccctagaggaagttaaggaggtgattgctcgtgacttttccaaaatcctcacggaggctgttaaagaagaccagctcctaaaagctagcttgggagaggtatgctactataaacctagacgagggcgcatcgggagctagcacttccaaaagaggtaatagaccattccgcgtgtactacacccctagtctttatttcatattctagatggatcaagggggatttgatacacatttcaaaaatttggatcgcactaagtaccccatgagttaattcatatatagggtaaatgagattgttaggagacctagcaatccagagttatctccaaactctattagggtggatcctatagtaaccatgtccttcccattcttcagagaacacgacaactttgttggttgggaggacatgactcttttcgcttgtggagaaccttatagctgctcacttaatggttgcacccacatgcacacttttaggaatttactattgtatgctacttgtacttattgattttgttgttttgggttggttccctaacaatgtgcttgttgtgtttccaaatactaccgaagcaagaatgctgaaatcactgagtgatggagcccaattccatgtcataattgcaggcaacaataaattatttcctgaaggcgaactataactccttccaggaatgaatttgtaatgaccgctctagtttatgaattagtaaaggcaattagnnnnnnnnnnnnnnnnnnnattattatttgtgaattaaatttatttgtggaccccaatatt

SEQ ID NO: 114745 - DNA, 2599 bp, Cannabis sativa
tcacataaagaaagagaaatagtagttagcattaacaattgggtaattgaaacagcaggattcgtttccttaattatcatccttgattaaacacatttattgctttctttaattttcttgtttctctttattttaaactctgtcaaaaattatttatctaccaaatagaatcataagtctaatttagagtattcagttccaaaatttcccctatatggttcgacctcactcgtgtgagtttattacttgaacaaaaatacgtgcacttgcatattaaaattgacaacagcagttcaggatttcgaggcacatcattagcattaaatgcccatcttttccaatttttccatgttcccaatcgttagattttaattcttttgatataactgcgatcacttccagggtataaaattcgagagtgaacactcattttgccatttctatcttttaaactttcaagccattctggaaaaccattttcgatttctcatcacattgcatgccctcactatctttgacttattttttgcgtgtttcattggacttcatccttaacctcagagattctcagaactcattacctctgccatcaaattctcattcgacaagttcttcattagctagaaacattcgtcaaaacagtgagtgttttatctctttatctttgttattcccttttcctgagttagtaatcctatttttgtaatcgattgcatcattatttactttgtttggtttagataattttcgatttagttttctggataatttttagggttttaaggagaaaatttaggttattcagttcatggattcttaggttagattgtatttgaacttttcagagattggaatattatttgctcaaaaacatgacccaagttgttccagaaactacaatccttgaattcttagaaactaattgtcctaaattgttggcctcccccttcgaatccaaaatttatatacctaaaaccattcttgagataaatgatgccaaaattagggatcacttaatagaaacacatcaaactgaatttgccagtcgctataggcggtttttgcaagaaatttccgagggtaaatgttgttttccagcgagatgcagcttggccagaatcccagattttagcttctatccctttagcgagacccttgtttttacctcgagtcacttttgttttttcaccaggtgacgtagactttaaaatcatgaccacccaagttcgtaaatcaaagaccccccaagatcctactgtcactttcgaagacgagcttatcgagtccaaagtaaaggtcattgggtactatgtcagcaatatattaaagtcttgtggcatcaaacaagagcgaggatgttacattagatgtgttgctccaggagaattcagttactttccactagaaagggtgattcgagaggaatgtggtgaagttagtactagtgcctcgtcaggaattggcgcttggagcctcgaggctatacttcattaatcatgcttggagattacaatagaaaaatagaggtccatcttcttcaataatagagtcttgctcctacattatagctcatgtgaggatactgtgatcagacacacacaacttcttgtataacagttctttcactcaatatgtcatctaaattctcttttgaatcgtcacccaacaaagaacactaaaggcctatatataaacatgtacaaaaggagctaaaagcttaaatattagttcaacaaaattaattaactttgaccactaactaacaaaaatgaatagttagttaggacatttggacaagtgtttaaactccacagacatgtaccaaatcgtttttctaaatttttatttgcgttaggcgctcattagtaaaattagacaagagctcttgaatctaacaatctcaataatttgggggtagatttaacgtcctgaaaagtttaaggaaacgatttagtatatgtcaaagtttgggatgcaaaaatcttaattagcttatacaataaaaatgtgtggacatcactcatattattgtgatttgtggagtttatatgttacccttagcagctacaaaatcttaactccatgatatggttttgataatcaaataaatattgttaggtgcaattaaatatatcaaaaaatttagctaaagagaagaagtttcgcaccataattaaaaaaattatatgttgttttgtttttttcttaaaaaatataagtgattgaaaatgttttcataaaataattttttaaacaaattagaaaaatacatttttttttacaaaataaataggtttgatgaagttttcattattttttattcaaattattttatcttattatttactataaaattttaaaatatttataaagaaattaaactatttttcaaaaatatcaacaaacacttttaaatctatgaaaataattaaaaataatgttaaacatgcctaagggcatctacaataaaactgcaaaagaacatttttggtgttaaaatgccatggtactgtaaatacgtcaaatgctttttcttttagtttttagtgtttatattaatatatatatagggatatgattttgtcccgtgatgtacttt

SEQ ID NO: 114746 - DNA, 1507 bp, Cannabis sativa
tactccaagagttataatggtctgttgaggcttgtaaaaggtcttattttatttttccttgtaacttgttaatgagacagttagtatgggaatttatctaacaatcagatatgtaattgaattaatttctccaatatgttctctacttacacataataaaaatgctaattaggatttttacctttgaatgttaatatgtaccaaatcatgcctcttaaatttttaaagatattaaaaatcccctgaactattgagattgttagatataaagaatttttttcaattttaataaggaaagtctaatatggataaaagctcaagaggcttgatttgatacatgttaaagtttaaggagcataatttagtcgacatcaaagtctaaggagtgtgatttagtacatggacaatcacagaactagtaaaattgaatgaaactggacaaatgttcttaaatctaacaatctcaatagttcaggaacaatttttaatgactaaaaaagttcacaagacataatttgatacatgtcaacatttaaaaataaaaatcttaattaatctaacaaaatgacagcatactaatctattaatataatctaatcatatcatatttgtttttaaaatagaagtaaaaataatgttgaaaccacaaacaaacttctttttttttttctgaaatgaaccaactaaaactttattataatataattgttatttgatgaggttaatgtgtcatccttgtcttttatcctaatagattccacgtagacacactaatgaaagtgtgactcatggcaaaatctctttattttaatagtaataataatataatttgttaaaaagaaaataataataataataataaagtgttattagaagaaccacatgaaatgaagtggttagtgtaattgtgattagggttagggtcactataaattataaaaatattacaaaaattagaaagaaagaaagaaaaaaaaagctgttccccttttcaggcaacaacagctaatagtagtaattacccaaatccagttaaagagaatgtaatgaaatggggtcactataccaaacatttcatatagattgtgttccaaatattcaagttattaaatcttatgtcagagaaaatatacataaataaaagtaaagttgagggagggattgctttggttttggaccaaaccatctttttagatgatgaaaaggagtgagatcacaatgtcactaatattactcccattttaactttttttttgagctgtcaagtttgaatatatcaacaataatgaatttttatcgagtaatttacggtataaaaacttaagtttaactctcagttgcaaataaatacataagtttaatttttaacgaaaataatatttaagttatatttctagaatttttcaggtacctaaccattaaatgttaagtcattatatccacatgttattttcttattgatatatttaaattattttttttttaaattataaaaatttaatgactt

SEQ ID NO: 114747 - DNA, 2079 bp, Cannabis sativa
tagtttacatgagactaaaattacaaaaagttatacatgcataatttattattcctcgagaatagactattatatgctttcgaagatcaatagaacagtccttgaaaatttaccatcattaagtaaagagcacatgttacatcgccactttcttccagcatctgtaaatgtcacatacggattcacatatgtacgacatcttctacatcgaacaatgccagaattggaaaaattaattactggcacctcatcctaaatgaaacacaaaagcagttaataataattattagaggaaattttggatcattaagttttattactttatataatgaaacactcaccccatctggtgcttctgcaagtggacaaacaactgctccaagaggcaagtgccatcttgaagctaaggattgggaacttggtattccactagttgttaggcgtagaaatctagaactgcagtttgatggatacatttcattaaacaattttggttccatatcaccatccaatggtcttggcaaagcgttgagatcaactccaggttcaattgacccaggactggatccaatagatagtgagttaaagtcctctaccaagccttgcaaggaaccagcaggaggtcctaaacttgaatgttgcatacgatccctcgtctgtaatcccatgggagctgcaacaggtggagaagcagcataaccagcttggtgcgtagcaaaagagggaggtgtagtttggaaaggtgcacttccctgcttagaaagaaatggagactggacaggtggcgctggtgaatctgcactagattgttgacgaacatatccaggaaatgacggttgggaatttggcctgagagcaggaaatgatgaatcagatgaaggctgcggaatatttgttcttcctgttcctggtacataattcatattttgagggggagatcccattggcaccaacggtatttgctgttgtggatgaagtggaagttgtggaggaggcacttgagctgcaggaggttgaaatgggggccggcttccaataacaggccgagaaggaggtggttgatttgagggaaattgtggcgttgggaaaggtccagcaggtgtaggggcatatgacgttggtggaggtggcacagatgggtcattaaacctagctggtggagcaggtctaaaactagaagcctggggaatgtttgtctgtggggccattggtggaggacgaacataactagaggactcagatccaaccacaggcccatatgatgaaaaaggtgttgtagattgtggaactaatggagtattgggtctcaaacctgagttatctgatcccaccaaaggcccagatgattgaaagggcgtcatagttgaagaattacaggcaaaaggtgcagcggtgggtcttgcaaataacttcaaatgcccaagatcgtcagtgccaattggtttcactcataaaatatatcataaccgtgatagctacacttatatggccacctactcctgcaaaatcaagtaatatataatataattattcatacaacaagtattaaaattataaacccaaaccctctctaagtaacatttggaacaaatattaacaacaaaaacaagtaacatatcaatggaagcagaatattccatgcacgggtacaaattttgtctggagaaaagaagagagacttgtatattaaatgtgtgtatgtgttcatatctctcttttgaatacctacacataaatcagtgattattccaaatatatatgttgatattcaacaaggaagcactcctcgaccaaacaattatagtaacattgattttttatttttattttcacaacaccaatcaccaactacatagtgttagcataaaaacgtatacactcatactaaaggataaagaaaaagattgaaacattgaaacattgaattacaactataggaatcacccattggacttaacttaataaagaatgatatcttacctatacaataaatgcctatctaatagaatttcttgtggcttaacagaaattttttaaaaaatctattagttttaccagaaacatgtcaaatactaacaa

SEQ ID NO: 114748 - DNA, 1237 bp, Cannabis sativa
atataataaaattatatatatttttttgtcaattattgaaaggaccgcgcaacgcgcggttaggttacctagttaaatcatattgtccaaacttttcttgaatgagtttctttccacgctccatttgaggtgttaaatagttgatccaatatctccaacttcacccttcctaaagaatgaatattcgacaactcatgcaacccaacataatgccttcctctcttatttactccaaattttttaaattatcaaagctacataattcttgtatttcttgtggaacgactcgattattttcttcttcagttgaaaacggaaatcccaaaaactccccatctttttaataaaaaaaacacattatatccttcttaaggttttcgtatttaaaaataatattttttaaggaattctaaacttgctttccaaaatcctaaaatatgatcccaaaatggtccagctatatgaattccattacagaacaaatcaaaagtctcttctaaatgacttagtccaacattatcctccaaaaatttatgattaaaatgccaattagaaacaaatacatctaatggaaatatatataattttacaattagagaagttagatagaaagtggtaaagaagggtaattaaggaatgtgtgtgtttaaaattctaggctttattagggtttcaaccacatgtaacgtagactcagactcaagcaacgggataagatcgtgtgaattggatgtaaataaattagggttattgttattattaatttcattattattacgtttgacaataaaaaaacaagagattttaaccaagtagtacctgatttagggcaagaggctaacacaatatcatcatttctcactacaaattgagtttgaaaagatattataccttttaagaaaatgtcataggtccaaaatccttgatataagacaatagtaagagttaccacgtagtggatctttagccttttcaagctttgcaagaatttcatcattatcttcctcattattcttcattgtagattttgatatttccatatccaaatcactcaataaaaccttgattaattgtatataaaaaagtactacttaaaaaaaataataattgagataagccagcatcaaataaactctcacgttcaatgatttaaatatagggcattttacaattttgtatacattattttaattaattacaaaatatgtgcaaaaaaacttattatcattttctcata

SEQ ID NO: 114749 - DNA, 1789 bp, Cannabis sativa
attggaatttgagaattaaattatattaaaccatataaagtagctagattcaatcgaaattaatcaccctaaacattaatcattgttaatttcactttaaatattttttttcctttttagtagaatttaaaaacttcttttcttaatattattgtcactaaatagaattaaaaattgaattatttggcacttaactacagtccttgtgggatcgacctcactcttgtgagtttattacttgtaagcgatacatgtacttgtgtgttagaactttgaaaatagtaaaggcaagaataaagctgaaccataatgagtttggagctagctcagtgaaaattgtacatatctagacagttagacctaaagggttatgatctttgggacaacataagctcagttttgtttgtcgttagggaacacttttgctattccgtattttatgtttatttgaaaaatagattatggtatccagacttgtaaacattttgtaaatatgaagtatgtttagtaaatttttatttaatacaaaatatatatatatatattatacgcgtttttatagtaagccatttggctaggaaaggttagcacaataattaagaaaatatcgtatcgtgcctaaactagtagggtgttacagttcgttaccctttgtatgaaaggataaagccctatttatagattgagaccaggtttattgatcaacctggaaccgttaggatttggtgtatagaaataagcccactgatggggtaaaatacaatataatattaactttaggcttggtaggtgaggcctaaatgagggatatctgtcgtccatacaggatagtattgtctaatgttgacaggtggtcgtgtgccactaatcatgtatagtaaggagtgggcgttgcacaaaaaggtaggttattttttgtgttgtgcacctttcccaggtctgatttgggggacaggcccctaattctatgggatttagtgtcaacgatgtgccacattagacagaccccagaaggttggttttcgcgacaccctagaaggttggctaccgtgataccctttgcaatacccttttagatactcgtggagtatacgtttatgtctcatcagacacttggtaattcgattgagtcagctctccgaattcgttcctctaacttaattcatagtcaagtcttaatcaaatcccaactatcagtaagccagcttcatgcttgggttggaccactatctgattaggccttgagaataggctcacaaattgacttaaggataccacacgcacatgtgttgtttgtctggaaacatgaataatacttgttataaaggcttttgtttcacttttaggaatcgcaatagtacaaccaattacatagccaagaatactctagagatagagttagtgcttgatggaatgagaaaattctctttgctgcttatgctgctattgttccaaataagcatactcttgtaatttattttcttcttttgtgaaaatttttcttttaaaaaaagagccaaatcttctgtcccaattttttttttttgtctctctatcccaatccaattaaaatactccacttcaattaaatgtatatccccttatttaatagagttaatatatttaaagactattttagttaaaataaaataaataaagacactattttagttaaaattggcacttcaataataaagacacttgaataaaataagagaaacttacaaaaatactggaattttggttaagttttacaaaaatactatcacacgaattttttttaaaaata

SEQ ID NO: 114750 - DNA, 3514 bp, Cannabis sativa
gggattggcacagcttacccagttttttcccccctacagatcacgggactactgactatcacagtttagttaattaatattaatttccttactaatctcatattctaagtgttatctcaatttttgtccacctgacatgacatctccatttggcaaaaagctgaaaaatacattgaagataggctagtactaacctgccaagttagtgttgtacaaccttccaacctggaagatcccataattgcacggtacacacaagcaagtttatcctaatagagctgtacaagcctgcaaggtccttgccagacctatagttggccggccaagggtgatagcctccaagcaccgagcaacccttcaacaaagcttgttggccaagcatacagatacgctccaacacttgtgtttttccacaaagccttccaactcgaccttaacattcctacaacttcagaacagttcaagctgcccacgaagatagggattctccatcaacaaataacatccctattatttgggaattactaatcatctattttatattccaaatatacagtgcaactttcctattttttaaggatatttctatgtacaatttgtaagtcctactactatataaagggaaagatacctcaacatgaggtctaagtctcaatcatgctcagaagcacaaaagccttaaactcttctcatacttctcacctgcaaaacacattctcattattgtaatactgaagagagccatagctagaacttataagatttcatccttagtattatctcaagagtgaatacaactaaaaggggagtaggttattaccggatcaaaggggccaaacctctataaatcttaatgtctttacatttattattgtacttctatgacagtcataagtggaatccgatcctagtcagactccatgtcgatcggctgaatcacagtcaatattttggtgctttcagtgagagcctaaaattctcattcaaatagttctctatttccattgtgcatggttgtcacaagatgtgggaattcaactaaaccacgagacccaatggccacagatcctaatgtcaagtgccacttgttgtgaccaacttaaacctggctagccagccaccatgttccggccacctgctcgctaccctaccacggaagtccagccaggtgagcaagttcctactgggcccactgtccaatcaacaactaaaattcttagcatgggggtttaacctcatttttatgctggtgagactggacttggggttggtaaccctagcattgacgaaccccgcgtggacctaggggatgacactaacttgccagcctgagagatgttgtaggacaagttcagggtcatagtaatctctttcatcatgaccaacaagcaacatgtgttgctattagtgatgcttttgcccaatagagacacgaattccaagaatagatagattggcaagctgcgatcctccaagcccaacaagtagagctgaattgccaaaatatggaggctaatgacctgattaggtcgttcaatgagagggttagttctcaggttgaagagccacccttcataagggatcaccttctaggaaaaggtccctatgtccagagggaactcagtgtcctgtggaacttgggtagacctctaggccaaggggaccaactgcatcccaaacaaggctgccctcttatctgcccaacaatggtgaaatcttgcctgagagaccatatggcaggattgaccagtttcagggcttgcccaaggatgaagggagaaaggaagatctccccctaatgcaaagcctgagtagtcccgtagtggagagtcctaccttgatcctaacgaggatagtgccactagtcacccaagtggtgagcgcactaactagggaactcaaaatattgggcaaaacaatgacgttccaccccagaatgttcgaacacgttctgaatgaggcacagagattctgtgtttgccagaataggcccccatgtaagcgtagatctttgagctggcttgaactgaaggagaaatgcttaagacgggtacactccaccctaaaacactcaaccaatagggtagaacaggccaaatctgaccaacccatcaggcggctagccagccaaccacctgccaatgatcgaccaggctggccgggcaaggtttggcaggataaaacctggccggacaaaggaaagatgatgttgatcctctagtgcaggcacaacttgatcaacttaagaacatgatacaaggcatgtctggcccaaagttgtccgacttagagttagacaagacccgagggttaccttcctctacacgcatcaatgcgctgcccttgccagccaaatttaagattcccacatggagaatgtacgtcgggaaagaagatcccttgacgcacatcaaatagtttgagacccagatggatctacagaatgttgaggttgatacccattgtaggatcttcccgacaactttgtctaaaactgcacaacagtggtttttcaaactagttgctaggaggtttgatttgtgaaactcctttacaagagagttctacacacaattctcatcttccaggaaaacaccttatgggttggaagagttagttgaggtcaaatagaggctaggggaacctctgaaagactacctctagagattcatgactgaggccaccaaagtaaagaatctaacaaaagaaagaaggtacatagccatcatgagtggcatagtagctttgagtgagttgtggaaggatattcgttgacactcaactcaaaacatggttgatttccttgatcgcacagaaggctttgttaagcttgaagaagctatccgacaagcataaagtgggagacaggcagttgctagacaggccctaggtggaagacagccttcagttctgcccagcacacctgccagcatatgtagccagcgctccaaaggccaaacacaatggaggcaaacataacaacaacaactttggccaagaaaaaggaaaaaatgggaaatttaataagtctcccttgccacaagactcaaaggaaagggggagaggtttacatgcttcactctcataacaacaactccaaaaatagaataggcgggtacagattcaatagtattgtacaagaagcctcatcccatgaggaaagacatgagcaaaagggacacctctgaatcctaccgattttataatgattttggccatgataccaattagcgcaagcacttatagtcgaaagatcagattcttgatcagaaagaacaatctccatctgcgtcgttatttaagatagccagatagaggcacaaggtgcccaaaagagagacccaatgccacctcagtggctagtcacctaggggtaatcattgggagaccccatattgtaggcgagataagcaaagctatgaaatgctatgctcggaccctccattaggagtaaaaaagcaacatcctagctgtagagaaaagagatcccaattagcttaagcttgaagagtct

SEQ ID NO: 114751 - DNA, 2555 bp, Cannabis sativa
tgacgcttattacgggcgtcaaccgcttgttgatgtggcgctcaggtaagtctctctcaaccacaattttataataacacattggggacaatgtgcatctaaagacaatgaaaaaccttgataccttacaactttcccacaaccaaattcaaggaagaattcctgaatggctatggaataatgaaacaattacttcattgcttgagttgaacatttctcacaacttcctcacacatgtagagcaagttccatgtaagaacttacaatccttagatcttcgctctaacatgattcaagggcatcttccaattgttccaccttcattgggaatatttttcatctcgaataataatctatttggagaaatgccttctacatattgcgatttgagtgggttgctaatccttgatatctcaaataatagcattcgtgggaaaattccttcatgccttgcaaataaattctctctctccgtgctagatttgcatatgaataaatttagtggggaaatccctcaagacatgtttcaaaatttaactagattgaggagtttgcaccttagtggaaatcatctagaaggatccataccacgctctttgctcagttgtcaaagcttggaagttttagacgtgggaaataacaagataactgatacattcccttattggttggaagagcttccaaagcttcaagttcttgttttgaaatcaaatagattccatggtttcataggagcaccgaaggttaaatatccctttcgcaagttacaaatcatggatatctcagacaacgaattcagtggtcctctaccaacaaagtattttgaaagtttcacagctatgatgagcgaacatgcaatcggtaacttggcgcacattggagatgattattatcaagattctgtaattgtggtaatgaaaggttttgagcgtgttttagaaaagatcataagtatttttgtaacaattgatttttcaagaaataatttcgaaggagagatttcagagtcgattggaaagctaagatcacttaaagggctcaactttagtcgaaataaactaaaggggtctattccgatgtcattggttaatttaagtaatcttgaagggttagatctctcttcaaatgacttaagcggagaaattccaagtaaaatgactgatttaacacaacttgcatacttaaacctttcttacaacaaattagaaggcccaatacctcttggaaaccaatttgaaacattcaacaatgattcatacgaaggaaacttaaaattatgtggatttcctttgtctaaatcatgtaacatggagatgcaacaagatggtgataatggcgaggagcacaccaatcacataataatattagattagaaaatagtgatgttgggatatggatgtggtctaataattggagtttgtatgggatacgtggtgctttatagtcaaaggtttgattattggctacataaaaaggctagaggaagacaacaacgaagaattgagcaatgtcgcaaacgaaattcttgtttgcgaagaacaagttaaagtaccaaattagtgagctcgttattaaagaaagttgggtgatttttggtaagtttagaaaataaattaaaattgcaatacttttttacattttagattagtctgataataatacaatcatctaatgtattattattattattgtttgtttgtgtttacatgctctaatcaaaatcttatcagactttattggaatgaggctcatgttttttttttcttttaagcaaattatattatacacccactttattttatttattttaatttatagttttatttttatgttttttttaagatatactcacttttataaatgatgtctatattatacgccttaagttgatgtaaattatgtgctagacttaagtggaagataatgatatattagtaaacccactcacaaaagtgggtaccttttaataaaatataatataaaggtacttttaagtattatctatatatgttataaataatattttaagtacctttctttctttaatctaaggtcatctctaatagcaatctgaaaattcatatataaggtaatttttctcacaaaatactctaaccaaaccctaaaacccatcatatttatttgccactacattttttttttactttttaataattaaataattcatttatgaagtaaaaatttttattataataatataataatataataataaataatatatttttttaaggtaatttttaatattgtggttggagttagaaaaaaatttaagggtaaattgcggcataaatacttaatgttttagattttatacacttaaatacttaatgtttatttttggaggcaaaattacctaatattataattctcttacaccgttactaccacttccgttattaactcatgaatatggacacatagagggccaaaatacattacatttatttattttattttaaaatttaatattattaatatcaaaaattaaatactacttattttttaaataaaaaataagagaaatgcaatac

SEQ ID NO: 114752 - DNA, 2529 bp, Cannabis sativa
ttatattgataactaatcagactgtaaagagttttatttagggcataaaacccaacagcaacagctctatcatgaggaagcattccagattaaaggaactttggaattggagccatctaggaagttgagtgatctgtcacggttaaccctattgtttctttgcatatagtccatatttttttatttctagctcagtggttaacttttctagcatatatgcaaaggaattttgatccatggggattttcttgatggagtaatgcttaaatttttgtaatagttctcaagatttttccactttactagccatctttttccctttcgtctgatattctcttgaaattttatatactaccagttatgaatcactatagagctgaatattttaggctccaacttctttagccaattgtaatctagaaatcattgcttcaggttcatctttagtgttgaaggctttgaactcaaattggagtgcactttgaagctaatgttgttgtagagaaattagaatggttcctactttagaaccattcttatttgaagctctatctacatacattcccaatatttttagcttcaagatgggctctttaggattattgttgattcttatgcactccacaataaagtatgctttggcctttgatagagtctcttggctgatactgaatgtcaaattgagttagctctattgcccactttaaaagtcttctagatgactttggcttttgaagtacttgggggagaggatgatttgtaagtaccctgatggcgtgggcttcaaagtacagtgttagcttccgtgaagcaatcagtaagtaataggaaagtttctcgatcattggatatctggactctgtgcccaaaaatcttttgcgtacataatatacttgaagttgtgcccttcccttttctcacactagggtcgcagttatggcatgatcagacactactaggtacaaatacaatggttctccctccacaggtttggagaagagtggagatttggatgaatgttcttttaatattttgaaggcatcttcacactcagatatccatacaaacttgttgttaccatggaggacattaaagaatggaatgcacttatctgttgatttggaaataaatctgttgagtgttgcaatccttcctattaagctttggacgtctttgttcttctggggtgaaggtatgtctagaagatcttgaatcttttttgggttggcttcgattcctctagaattaagaatgaaccattagaattttcctaaagaaacttcgaaggttcttttcatgggattaaacttcattccataattctggatgatagaaaagattcttctagatcttcactatgctccatagaggtttttaacttcaccaacatatcatcataaacctctacgtgtttgccctcgttgaatattttattgactaaacgttgatacatggctccaacatttttaatccaaaaggcatgaccatataacaataaataccctcgtctttctagaagctagtatactcttgatccaccacatgcatcttgatttggctataaccagagtatgtatccatgaaactgagaagctcgtatctaaatgtggtgtcaattatctaatctatttggggaagtggaaaataatcttttggacaagcattgtttagatctgtgaaatcaattcacattctctaggttctattaggctttgggacaagtactggattggctaaccagactgggtataaggcttcttagagaaactctatattggttagcgtgtcacttctgcttatactgcttccgctcaaactggatcaaatgaccttctcttctgatatactggatctaactttaggtgcatgttaaagcttggaagattacatgaggactgattccaatcatatcataatggctccatgttgtgataaatccaacacacaagtatacgtatcgttttaacaagtaatactcaggtaagtgagatcgttcccatgaggactgtagctaagtaccaatcaatttaattcttgtttctatttggtagaataaataacaaggttgaataattaaataactaaaaattaaaaagcaggaaaaaataataaaaagtgtaattaaatatggatgaatatttagaaatatgaatcatgttagtttagattctcaattgttaatgttaattattaattctatcctttttggtgatgacagattatcaaattaaccctaactcttctcagatcattaaggtcctaaatcatatattacctacttgcatctctaaagtaaattaacataagttgcattaaattcagaatctaaaaatcacataagatttgtaaatactctcgttttacataaaaacttatgtttgtcctattagagcattcctaatattcacttctcagatttcacattaggatcataaatcacattcaagatggccagtctaaaatatttaattaaaacaaataagaataaatcacacaatatggggaagaaaaactaataatcacataaac

SEQ ID NO: 114753 - DNA, 3703 bp, Cannabis sativa
gggccagaatcatcatttaagcatgcaaaaactaaacaatattaattttagcacaaattaaaataaaagaaataatgttatatatatatagtctctaagtataatatcgtcttaatttttaaataatttggaataaaatcttaaaaataaggttaattaagatttttgcctcctgaattttgacatgtactaaatcatactccctgaactaaaaaagtctaacatgaatgaaaattaagggagcataatttagtacatgtcaaagttcgaggggcatgatttggtatatatcaaaatctggggaacatagtttagtacataaacaaacaatcagtgaaatagtaaaattgaataaaattagaccaaagtccttaaatctaacaatctcaatagttcaagagacatttttaacgactttaaaatttcagggacataatttgataaatgtcaaagtttaagggcaaaaattctaattagcctaaaaataattaaaaatgaataaaataaaataaaataaaatgaaacttttcagatgtgatttccggccgcctctttttttttttcttcttcatttctctctccgtcggcaccagtcagtatttcgacgacgaactaactggtattttcttattcgctcgttttgaagtgtctgtgatttgttattgttattataagaaaataattgtctctgttagacaagaacgggctttaatttaatgtgtgcacaaaaagggtggggtttaagaagtcactgtggatagaggatgagatgatcgggttctgcatttttaaaatcttgagattgggagcgagctcatattttgcgcgtgtaaagtttggtcacttttctgtaaagggtatttttgccatgttttttctaggaaaagaaaattgagattttaaataatgtcaagaaaataggttttgggtcatttttgtttggttctaatttggcagctgaaatgccaagttgggacttgggatcatcattagagaagaaacccagaacgtgtgatgagctgcttgtcgcagttttcttcgcacattgaagcaatcttcagaatcagtcatttcagagctcggacttgttggtgcggagcttatgcttcttcttcttcttcatggagtaatagaagagtccagtatagttaccgcattactcctccacacgtcaatctcaactcttcactgaccagttttggtgctcggttttactcctcaaagaaagcaaccaaaagcgactctagtagtagtagtagtggaactgaaaccacgccaaggtagtaacagaactcattattagtttttttaatcaactcgagagttagcttgatgaatctattaattcgaatttggagatgtttttgattttgaaaatgatgatttttctttcttgtttttgttaggagaaggaaattgaagcccgaaccagcaatggaccaggagaaagatgctttctatgtcgtgcgcaagggggatgtcattggtgtttacagaaatttaaatgattgccaagcgcaagttggttcttcggtaaaatgtttgattgaattcatagtgagggtctgagagatgtttgtttagaaacttggaatgttggctgtggatttatttatttattggtatttgattgattagatatgtgaccctcctgttagcgtgttcaaaggataccgtttgtcaaatgatactgaagagtatctcacttcgcggggactgaaggatgccctctacactatcagagctgacgacatgaaagatggcatttttggcacacttgtgcaatgtccattgcaggtaagatgagttgtcaattgtgttgttgtctgggttgagaattgtgatttgttttaggagaaattctcttctaattcaacctatggagtagacagtagaggatatcatgtttctttagttaaaatctctccaattatctatatgaatttgatgatgtactgaggattttgggcaacaatttgagctagtagttttaattgccaaggttgttaatgctttttttattggctattatcaatgcaacgatttgttgtcttggcttttgtaggtctttttactattaattgtggaaatatgagctgagaaactatttggaatgtttcctattttccttgatccttgtgattgctggagtttttttacttgtttttaaatgtatgttttctgattataatttcgatgggataaagctgtgtgtggaaataaatttgatttattattccctaaaatttcagattccaactccttcattaggggaaacatctaccaaggatacatccaaaaagagatcacagctagtggaagggtcagaagatctggtaagttgggaagcatgaatgctatgaaaatatctggactcaagaaagtaaaacaaacaaatggtctttttgtaaagtttgttggtatatactttgtactagtcaagagaaccctgttttattttgtcaatagaattttatattaagataaatgtatcagcgttgtaatctatgcattttccttgtcatgtctgttttgtagattctgtataccagtgtcaaaatgttaatccattgaagtcgtgcatagtttgtacttattgctagaatatatttgtgtgcacataggaggtcatggctatattacatttcacattttattttatcaaatgtattgtgcatatgtttcccctgtcacgcttaaatctttatatttggctgctctgaagtagtgaattctgactgtttttcaggaaacaatgggttctacgtcaattgatccttcaagaaagcatcccaaattagatcattctaatgtggggaaattatcaacagtgaactgtgtaagttagattatattaatgcctgatgaaatgatgatagcagggatacatgaccttgtattgcaatctaaagtttgaaacaaaaaactgtgaccctttgttttgggtaaaataaccattgaattgtatctgcctcaacagcagctggtttttccggacaaagatggtgtattgagacgcatctttatttatttattttcgttatgatttctggatggcctgtacaattataaaaacctgaatcctgcgatatattacacatgtagcggtcatgtattcttaagtttgatggtgcatcaaaaggaaatcctggaagagctggtgcgggggctgtgctactatctgatgatggaagtttggtgagctttccttttactctatatggtttgtataccttttattttcttctcttatctaacctttgtcttttcttgaaaaataaaaaataaaaaacctttgtctcttcttagatttgtaagttgcgggaaggccttggtatagctaccaataatgtggctgagtatcgagctgttctattaggattgagatatgctgttaagaaaggttttaataggatatctgtccaaggagactccaagcttgtttgtatgcaggtttgctatcttctttatcacttaattttgttttgcctaatatgatattggaatcaacagcggctagattaattagcagcattattatttgtaagtaactttattgtagtttcttcatggtttcttttcacctttatttggaggatatgtatgcgtactttgtaccatttttctggtacagaagttgtacatgccctctagttaatgcaatgaactagtacatatacattccattcaaaaaaaaaaaaaa

SEQ ID NO: 114754 - DNA, 2450 bp, Cannabis sativa
actgtagcgtgccttagcattagcgcgttacaatagggattaatcacaacaccattcgccatgccttgaacaacaacgaagatgcaacactagtctaccaaaagcagaggccattagatccgatgatagcataagtggtgaaagtagaagtagataggttgatcacaaatgacttcctctgggtagcactttatcccatttggttggctaatctagttttggtcccaaagcccaatggcacatagagaatgtacattaacatcacagaccttaacaaggcctgttagaaagattgctttcctcttacgcgaacagattagattgtggatgccacctttgggttctagtggcttagctttatcgatgcctactttagctaaaattagattacaatgcacatagccgatgaagaatacataaacttccagatagataaaggtgtgtattgctagaaggtaatgtcgttaagcctaaagaatgtcgaaacaacatatctgtgacaggttaacagtattcaagaatcatttggggagaaacatggaggtctatgtcaatgacatgatggtgaaatctaagacatcaaaagaacacattacaaacctcgaggaagccttcttgtttctccaaaagtacgggatgaagctcaatcccaaaaaatgtaaatttggtgtctcctccaagaagttcctaggttttatcatcatctttcatggaattgaagcaaactcggagaagattaaagcctttgtcaacatgttatctccttaaaagcacaaggatgtgcaaagtgttactggaaggattatagccctcagtaggtccatctcaaaatctatagataattgcatcctattctttaacgtgttgcgagggaacaagaagttcgaatgaaccgaatagtgtgaagaagccatctagaaaataaaggagtatttaaccaaagctcctattttttaaagtcagtggaaggggaagatttgtatctttacttggcggtgtctgatcaggccataagtgtcaccttagtacaagaagaaggaagggtctagctatcgctgtactacgtcagcaaaagactactgggtggggaatccatgtatccgttgattgaaaaattgaccttttgcttactagtcacctcctgaaagctcagaccctactttcaagaccatgccattaaaatattgacaaaccaccctctctgccaagtgctttagattctagaggcatccgatagactgttaaaatgggcaatggaacttaaccaatttaacattcattatcaaactcgagtgtcgatctgaaatcaagccctagctaactttaagatggaatgtttcgggttaggtgacctcctagagtcacttacctggaaagtctatgttgacagagcatcggatgaaaagggagttggagcaggaatcatattaatttctttgtaaggaaataaactcctaaatgcactccgtttcaaatttcttgcctccaacaacgaagctgagcacgaaaccatgctagcaagactacgattggctaaggaagtcggaggccaacatgtcaaagtacacaatgactcctaatcggtggtaaataatatgtctagggaatatcaaataaaaggcaagaaaatggctgcctattagatgatgtcccaggagctgttacaagggtttaattgttataaaattttccaagtcccttgggaccataattcatttttggatatgctagctaaactcggtaaagactcggagatcattcaatatggagtagtgcctctggcccacatggaaacttatagcatcgaagcacagggaatgaacgccattgttgatcattccaactcatggatatgacccatctacaagttcctcaatttaggaaagctttcggtagataaagctgcatctcgaaaggtccagtaccaagctccttgatatgtgatactagatgggaagctttatcatagggggttatttgtgtcgtacgtaaggtgtgtagccgagaccaaaataagtgttgtcatgcatgatattcatgaatgtttctgtggagaccatacttcaggaccaagctctaagaagatcctttaaccaggctactttttgcttaccatgaagtaggactgtatagagtatgtccaaaagtgagaacaatgtcaatagtacaccaaggtttcgcaagtgccaccaacagaaatcaccttcatgagcagtccatggtcctttattctttagagaattgacttagcgggatcccttcccactggaaaaggaggagtcaagtgcgccatggtcactgttgactacttcaccaaatgggtagaggtagagcctatgaacatgattacctccaagaaggctctggacttggttatcaagaatatagtatgccgcttcagactttcacagaagactgcctcagataatgggaagcagtttgatagtgac

SEQ ID NO: 114755 - DNA, 1911 bp, Cannabis sativa
aactcttaaggtaacttgaacaatgaatatgatcaagaggtattaaactacagaaaagttgcttcagaatcgtgatcactggcccttaatataactaattatttcacgaattacatagacattatatcaaacatatatacaccaactaaaacactatcacaattcacataatatcgaaatacgactatataaaatggaatgaattcagtctatgaaaaagaaaaaaaaaagaaaatcagagagagagatatttaccgtgatagtttgttggaggatcaaaacgatggagaagcaagtactggggatgcgatcacgaacaacgatgaagaaataagaaggttgaagtattgtgaaaggtaagagtctattattttttattttgcatatttatataatatagtaaatttatttgtacatcagtgaaaattaaaaataccacattctaattttgatacaaaaggtatgtatgaacactagtaactaatgaccaattacaaccttttactatgaattaaaataggatttactaagaacactagtaattaaataagatatttatctgtaggacctttctctttgaattattatttttggaaaattttctctcaaactaccgaaatgattataaatttctacattttgttacatttcactcactttttaagaaacttattaatgtggccacaaaccatatgtataatcacaatctcaaattttataataattacaaaatgaacaaaatgcaaccaaagtgaaaaattacaattatttctaaagttcgaggaaatttttttacaaaaataaaaaaaaataaataaatatttattcttaacatgatatgtcctgaataagaatgtaaatagaacaagtcgatctgagtttctaaaatattgtctcatcccctcccattaagattttgttttagattagacccaatccgtaaggtataattttttttttttttttttttttgccacaaaactaagacgtatgagaagaatatttgaaaaattttattaggaaaatccaattccattgagaaacatagttaggcaataaaaaagtaacatgacaagaaaatcttaaaaataagtccatacctattacctaccggtaggaccatgatattacaccatgatttaccaatcattaaaatgtgttcttctaagccaagaattgtgaaaatgagtcattaattagtccccattttaacctttaatttggtcactacaacaagctcaactattggtatacacataaataatgccatttataatggacagttggataccaatatataatcttaaaaacttaccatataccatgtgccacataaaaagcaaaacatattttaatttcatttatttcttcctttatttattttattttaaaaggataataaatataaataatttgtgaaacaagcttatttaaatgaataagcagtttaagtctgtgcgcccacttacttatctcaggaactcaaaaaaaaaaatattattttaaaattatatattttttttttggctaattttaaaaaatatcacattttcttctaaataaaagcccaaaattttttatttcaggccgaccctgagtgtcctttcaataaataagaaaatttatcttccttcaagttttgataccctttaatttttttactctactgtagtggaactgacaaaaaaataaaaataaaagtgatcctctgtttgtttagggcacgtcaaaaaagtcaatagagaattaaaattgagtgtaattgaaggtaattacacaattttatgagtttgtctgaccatataattatatgggatcttttcaataatatacttaaaatataaattatttacaaaaataccttaataaatctcaattacaataataccttgccacgtcattaaaaaatac

SEQ ID NO: 114756 - DNA, 2604 bp, Cannabis sativa
tattattattattattaaactcatcttgttataaattttccaaaattgttatttattaagttttcattctaacaattcattaactatcaatttctcttttgatacatggagaagaataatttagatactctattgaaacttttactatttttaattgattgttttttccatattaatttttcacctaaattactcctaaattacttcagaaaaaaaaaagaaaagaaaagaaaaaactaagtcaatgttggatgttatcagttttcagaatattgtattttcttttaaaagaaaaaggttatttaattaatattagcactgagtttgctttgctcagttcatataatttatttatttgtctaagtcaattctaaaaaaaaaaaacacctttactacattctcaaaacaaaaaataattaatgtatatatatgttacatcaacaatttttttttttttttttcagaaacatcaccacatttaaaattaaaaaaatatattaaaaaggtgtcgattatataacataacgaaaccgtaataataataataaattcaatttccattcttagccctgaaataaaaataaaaaaataaactaaatcttaaaacatttcctcatttcaaagctccagaatgggacttgaaattcgacattaaaacccacaattctcttcctagagagagagaagagagaaagaggagagagaaagaagagctatggcggatcagttgcagaggtcggaaatatctttcagaaggcaaggatcttcaggcttgatttgggacgataagctcgtagcagaggctttacaacacgaccaaaccaaacaagacaacaatcatactacttctactgctactactgatacggctggagacgacggagagccacgtggcgcgcttgaacggagccgatccacaggcggtcgtccctatcggacggtcaaggaaccttctccttccgccgacccaccgtctcctcgattctccggctgttgcggtgtgtttggaaaaccgattttggctcgtcagcccaaatcgaaccggaggagggcaaaatagtaaatacacctttttttttttcttttcttttatatgtattattaataatatatatgtgtatatctgtatgattatgatgatatagtagtatatgcatcatgtgtcatatcatagaactaaaattacatgttttttctttttttggttcatgatttttatgagtttatcattgattgttgttgagattttttgggaatttttttctcttttaatttcagaagtttagattttgtttttcattggtctaatcgttcatcaatcattggtgtaattcttgtgaatagtgattttttttttttggattatgggcatttcagtaaatttatcaaaacttaatttttttttgtttgaaaagtatcaaaacttaattttaatatcttttgttctcaattttccattgttatgtctttcttattcttttgctataatcccccctaaaaaagaagtgaaattatgcaaaattaaaaactaaaattatcaaaagaaaaaacattgttcatgtgtcaaaaccaatgtcccacaaaacacattatttgattaggtaagtccatccaaaagttttggttactacaattcgcaatccattctccatttttttcagttgttaacgtaactctgcctatttttttttccatttataaaatattatgttttatcttatcatcctcaacaactaacttaagcagccgtccatttattcatcacattacaattgtcaatatccaacacacatatatgtacgtatacactatatatctatgtatgcattaagtattgtatgagttttccttgaaaacatctcaaaatgaaagtgccttatttgttatttcttgatttaataaatagattatctatcacctatttaattcgcctttactgatcagattaaagctgcatatccctttaatcccaaataactttactttttatttatttattttggttaagggggcaagctagataatttattaactgttttgcaaattattgaaggttgtaatttttcccagatagtccaaaaagtcttttagtcaaacaatgagactaagacataattctgtaaagcaaaggctaatgttagtaaatgaatataaaagataatttatgtttgtataaatgacaagttgatttagctggtccccaaattcaaccaacaaaaaaaatgtttataatagcaagccaagttgacagcctaaaatttatcatcaaattttgtccttttttgataaaaaatatattatttacatatgttaaaagtcaaattaatatggatactgattggatagggtggatagaccatgattatcctagttggctttgactgttgcttaagaaaagatacaaattttgaattaatacatatttttttgctgggaatgaatttatacattttaataatgtaatatgggttatatagaataataatcaatgagtgtgtgcatgtgatcctcattaactaccattttatattttagattaaattcaatttaattcaaattagtgcagattaaatagttattttacattaattatcttttaatatt

SEQ ID NO: 114757 - DNA, 1127 bp, Cannabis sativa
ttttgtaaaatatcttaaatagctataacgtacatgaatataaaaaaaaaattagactaaattttttttctagatgccgaaacaaggtaaggatgcaccagtacatcctttttaagggggtgcattgtagaatcaccctatatataatagtcttgttattttccaaaaatttattagtacaactaattaagaatatgagttatggtattattagtagtacgattacaatataaagcctaaattttgaagaaaattataatagaaaatgatatctattaaaactgtaccaaacttagccaataactgatttaattgtacttccccaaaaattatttatttatttttatataatttactctttcattttatattttttggcatcctcactgattatgagctcttaccttttcaaaggtcatcctcattatttttgtagtgtttggtaatttattatttttgtagtgtttggtaatttaagatgtcttttatttatagtggcttatgtatttttctttaatttattaagaagaaattgacttcattaatcacaacacaagtaaaatacaactaaactatataagataagggctacataaaacttccggcccctacaacaaaacgaggagtacttatctatataataatttttgtataaacctttgttcttgtaaataatgctttctattttttataatatataatttttgaataatcatatttttaatttttatctctttgagttgactattttctcccatccaatgggcatttggtactgtgctatttttttttttttttttataacagttggtcataattaacaaaaagcttaaagaaacataaatagataaaataaaaatcatgtacatacacatttattatatattaaaaacatcattaaggtcccacatttctcaactaataattctaattctaataagagttcactatgcacccttattttgatgagcatatacacgaagttatccactaatatgcatgtcatataactattagtaatagtataattatttaattaatagtgacataattaagggtaaatactattttggaccctgtgttttgcaaaagtcgtagattggaccctgtgttttgttaaatgacaa

SEQ ID NO: 114758 - DNA, 4112 bp, Cannabis sativa
tcatctcgctttcttacagctcaccactataatcatattttaatagttgccgaaaatctcggtcaacactttaatatttattcaatttatattttttttaaaacattaatttaaagtgtaatccttttaattgttgaaagggctatactacacctttattttttttcaaattaattatttgaacacaaaaaactaacaaccataaaaaaaaatgaaatataaagatcagttcaaacgggttaatccgaccgaactaacgaaaattattgggtaaattaatttttttttttcattaggcgagttataattagatatttgtaacccgatattcatatgggattagttgagaaatacctttttttgtattcattaattaaaaataccctcatattattaaaaaattcctacttttgtgagtagattttctaatatactcttactctccacttaagtttagcacataacttacatcaacctaaaggctataataggaacattatttataaaagtgggcatattttaaaaaaatatgaaaatgaagataaaaattaaaataaataaagtaaagtaagtatacaatgtaatttcctctatttatattaagttgataaaaatatactataacccgatcaaactgatcgatgtatactcttaataaataatgcgggtttcatgattaagcaggtattctgcccacccctaatgagaataatttttcagtccatagtccatgttcaatctctctctaatgttttaacaattctaatttttttaaaaatttacaaactgatattataattgtaacttataaaaaaatattctaatatgtatttaagatgcaaaaattaactaaaaaattataataagttgtaattaatattttttaaaaaaataaaataataattaaaagaagaaatgagaggcaagaaaggctattccctcactcactagtctctctcctcccatttcattcctttctttctttcccattttccctctctcacttaaataaataaatataataaactctgtattttttttttttttttcacttttcagatacactttccctctcatttcccatccgcttttcttttcttttccatctcactactctcacgccccctcagagttatcccatggaatacaccccatcttccccgtgacttcgatttcctctcctcatgattccaacctctcttctcctcttcttctgtttcttctctcactaccatgcgatctcctcaattccaggcagcgcgtaacggtgagacgccgtcgccgtcgccgccacagcagcgccacaaccatcaccactataaccagactccctttcactccacactcgccgtacaaaagctccgtcgattcaactggctcatattcatctttcgtctcgccgctttcttcttctcctgtccttcctccgtcttcatgcttactaactcccacggctcctctcactggtacgatttcgatgctttcaggtcagtctttccgatgttaattttttattttagtttttttactacatgattcgattttctcagtaaacaaacaaacaaaacaataatatagtttcgtactgtggttgcgttgcggaggcagattcgtattcgcagcaaatgcaatagtagcgttgtactctttattcgaaatggtggtatccgtttgggaaatttcttggggactcactatctttcccgaagccttacaagtgtggtttgactttagccacgaccaggttcactacttctccattcgatcttcttcatattcaaatttgatttattaagaagaaatgggtaatgattgtgtaggtgttcgcgtacctgttaatgtctgctcagtcggcgggaacagcgctggcgagggtgctgaaagaggaccaggccacgtgtaacacatccagctggttctgtatgcaggctgacatatccatagccctcggatttgccgggtttctattcctagggttttcttccttgctttcgggttttcgggtcgcctgtctaattatcaacggttctcgttttcatctctgaatttgatgagagagagaaaaaaaaagattgggtgcgtgagggtgttgcttttcttactgtgtgtcctgctattggacgactctgattagtgattagatgtagatgtgacgtggcactggcgactctgtatgtatattgaccatgtttaaagatcatttgtctattctttcttaattttatttcatttttattttattcaaacagtttccttattgtgtttttaatttttattatttgcatcaattttatttcgtggttactggttaatttgtcttattttccgattttactcactgtaaaaagtaataactaacatatctaaacgttattagttgttttattttagaatgtgagagacttagtaaaataatataaagaagatgcaaatgcaatgttaccatgtgtgtactaatttactatttgtgctttatctattttaaataatattaaattggtactccacaattggaaatgttgcatatttggtaccaaattagtaagtggaaatggtacatatttagagcatgaatgttataaaattggagtatgaccatgttttagaatatgataaaactaaaagtaagctacaattgtttaaaatgtgtgctaagagcattttcaatggtatgttaaaaaaatagtatattgttatattttagctcacttaaaaaaaaaatattacttcagtagtgttttaaaaattgtactaaacttgatccatgttaaaaattatgctaaattttgcataaattatagcattgtgttaaatttaatccacaataaatttgatttttgtatttaatatagtatcactaattataatgatttattagaatttacataactttatcttttttatttactatattagtattatttaagcaataaaaacataaaaaataataatatttgtatatttcaatacaatattaaatgataatcacaataattatatttttatatttttacattggcacataattataaataatgggctaaatgtaactcaaacaaaatttttgtgtcaaacttaacacaaattttacatcttgcatgggagatgatctaaatttgaccgaatttagcatgacttaaattttaatctataataaatatcacattcttcaattactatctggccactcaataatatattattgtaagagcattatcaatgagggacaacatttatagttgccaaaacacacacattattttagtattttttttattttttctctcatccacataagatttgtcacattttttaaaataaatacttcaatggttgacaacactaaaacttgcccactatgattccacatcgcattaaattatcaattttttaggtaaaaaataatttttctaataataaaagaaaaaaaatatcatatggccattgtctatattaagcaacacttcacataaaattaatttaaaaattgaatcacattgtatatgtgccaaaacaactccaataaacaacctctattggagatgttctaatccatattttaatgtcgcaatttgaaccaataaaataaaataattctaaagaaaataaaataaattaattgtattgtagcttttcaataaacattaattatttattaactttttttttaagttattttaccccttatgcattggagtataattataaaaattaaattaaatataattttgatgcatattttgaactaaatttaacataaatggtacattttgcttggagatagtcttacaagtttagtatgtatatgttttttcactatgtaatgtatataaatatatatatggatcattttttaatgggtattagtcatgaattgttaccaaataaatttaactataaacattaattttaaaaatattaaatcatcaaattttgctctaataacaaataataaaaaagaaatttgaatttctatgctttatttaactacttaattaaaaaaatatataaaaaaatatcctttctttatactatatcaaaaatatgttcatataaaaatatttaaatgaaactcaacttttacttatctttttttttttgctaaaaacttt

SEQ ID NO: 114759 - DNA, 3328 bp, Cannabis sativa
actaatcagattgtaaagagatttatttagggcataaaacccaacacttgactcacgtccatggcttcctccggcgataactcgtcaccagttggtgtcactgatccttgacctcaggcgcctccccctgctgctgcctctgctactcctcaatggaatcctttctcgaattccttgacttcttcccttaccatcaagctcgatcgagttaattttcttgcttggaaatcctaggtcgttcccacggtcatcaaacatgaccttgatgagatcctttttactggtatcctccacaaaaactcgtcaatggtgaacccaatccaatttatctccaatggtgaaagaaagatcagttgttgctttcttagctttgatccttgatgactgaagcgattcttggaactgtctccaactacaactcctctcatgctgtttggatggcccttgagcaaacgttttcaagtcagtcaaagctaggttacttcaactcaaagaacaactatccaacattcataaaggtaaccttagcatctctcactaagttgataagatcaactcaatttgtgattctttagctattgctggtcactccattactgatcttgatcttattttttatttgctcaatggcctgggtccggagtttaatcatgttgagtttggtatcacctctcgaagtgatgctctcacacttgaagaggttcaagcactccttatgtcaatgaaactcgtcttgaaagacacacttccatcatggatatctccactaaaatggttggcaatctcacctttggctcaagaaatggcccctatcgacatcattttgcctctgggagaatgaacaataatgagaactcatcaatattccctcctcgtaactatggtcaaccctcttccaccaacaaacccctatgtcaattgtgcatgaaatattggcacactgcaccaatctgtcattacgatttgacaagaattgggttactccaaagcagccctcatcccaacctcaaatcaatctgacagaacaaagtggaagctttgatccacaagctcctgtcactcaaaccatcccagaatttggtgatgattctggctgttatgtggacactagagcaactaatcatgttgccttcaccatggaaaactttgattgagccactccctatactggactggaatctattgttgtaggagatggtaagaaattacttatctctcacattggtaaaactactctcccttctttaaattccaagcctttacaacttcaatctgttttacatgttccatctattaccaaaaatttggttagtgtttccaaattaactaaagataataatgtcttccttgaatttcacaaatcttgttgttttgtcaaggacaaacaatcaggtgttgtcctactcaaagggatactcaagaatgacctgtacctattaggtgatggtcactctaaccactctcttcaatgtaatcttgctacatctatcttaggttcatgtaatacaatctataataaaacaatatcttgtaatacatgttgtaactctactgttactgcagtctcagattgtaatcaattgtcctataaataaagatgatatttcttcttcattccctactgtctataacacaactttggatactgatataaatctatggcattctaaattaggacatccaacacctgccactttaagtaaaattctgtccacatcaaatataccacactctcttaagaacctcaaattttgtaactgctgtcaacttgggaaaagccacaaacttccttttttttatcttcaaagagagcctctcaaccactagaacttatccacactgatctttggggacattcacatattgtgtccaaagacaactataaatattacattttatttcttgatgattacagtagattttcttagatttttccactaacatcaaaatctcaagcctttgaagttttcattagatttaaaagtttagttgagaaacaatttaacctaccaataaagggagtgcaagcaaatgaagatggtgaatatagaccttctgaaaagtttttgacagatcaaggaatcaaatttcaactatcttgtccacacactcatgagcagaatggaagagtggaaagaaaacacaaacaagtgatagaaactggattaactttacttgctcattcagatcttgacatgagctattggtggcatgcctttcaatgtgttgtctactccataaatagaatgccaactcccataattggcaatatcagcccttatgaatgtttgtttcagtgacaaccttgattacaagattcaaaagccctttggttgtacttgtttccctcatttgaggccctactctcatcacaagatggaatataaatctgaggaatgtatatttcttggttattcacccaaacacaagggctatttgtgtgaaaatcatgctggcaggatctttatggcttgaaatgtggtgttcaatgaattacattctcaagatcatattcctgttccaacatcacaattttttactcagtatgatcaacattatgctaatactaatgtacatcctcgtgttgttcttgagtttgttgatcctgcacctgttgaatctttaaattccaactcaaacaacagccatcatgctgcaccatctcagtctctacactcttcagatccctccaataccagacccacactatctccagcacttttatcttctcatgatagtgctacatcagcatctctccatactgccaacaacaatcctactgctactttagcatctgagattgttgcagctgctgtttcagcacctataattcctcctcttgctacaccacccatgacacatattatgatcacaagatctcaacatggtatatacaaacaaaaggcctacattgccacaaaatatagacatcataaatctcttcttcgtagagagcccaaatctgtaaagggtgcccttagtgaccctgcctggaacgcagcaatgaataaagaatttataactctcaaaacaaatggaacatgatcattggtaccctatcagcctaatatgcatctcatagacaataaatgggttcatagaattaaactcaactttgatggcagtattgatcgattcaaatcaagacttattgccaagggctatcttcaagctcccggtattgattatgcagagacatttagccctattgtaatatcccgataagcctaatggtaaatattagggtttatatttatattatgggttaatcaggtaataagtaggattacgatcctactaatttattacagcataaaatttaaatttt

SEQ ID NO: 114760 - DNA, 2220 bp, Cannabis sativa
  modified_base (62)..(74): a, c, t, g, unknown or other
  modified_base (2179)..(2181): a, c, t, g, unknown or other
aaattaaaagtcacccataaatttctcaaaaaccaagaattttagttatataggcacacttnnnnnnnnnnnnntatatatatatatattatataccatatgatggtgcgtattgcaaattaagttcattaataaaagaataaaaataaaaggtcgaaacgacaaaacatacgatagtacacaaatattaaagttatgatcacaattgattacactgcgtgggaacaaacgacattgttccctcagaaagatcatggacgacaagaaaattctgctgctgaatattgccaaagatggacataccactagaggaccccatagccaagcaaagaactcctaaagttcggtcactaagaatgtagttttccggcggaagttccaaaacggcatcgtttttaaaatgaaacgacaacttgggaacttccactgaagtagaatacttgggcaagttaaagcaaagatccaaaccctgcgaaccagatttgtcaacaggaaggtttatctgggaagtgaattcctccttcacaatatcaaaagctttcttctcaagatacgtaatggttgtcccagagtctatgattagccctccactaccatcttttttgagggcaaaagtgtctttttcaatgggtaagagagatcctcctactgaaatcccttcaagggaaagatagtaaaaagatggctgtgatgggttttcgatcaaaggcgttgtgactttagcgccggaatgcgtggtgttcacgctcgctaatggccccaccaacagtgagcttgttttagtgtcgtccatggcggtcaaacagtacgagaatttgggctccttcagctgggaaacaagggacaagggcccacgtccgagtccaacgagaccagacccttggctgaacccgtctccttcgttgtctcccccacatccaaacccaataccattgaccgaaaccttttcatcaccatcgccgaatgaaaaagtttctgatgctaaaacaccttgggttgaagagtaatctccgtagccatagaaatactcgcagctatcgctgcacgtggattggggaagggcctcgcaaagctggctggaacacgagagcttggagaaggaagaagagtttctcgggtcgaaaattggagtgggttgatcgaaacaggtctcgcatggcaagcactgtgtccatatgaggtcactgccggtgtccattatggcggaataagcattaggcggggttcctatggatagctgcattaaaaactcgccgttcccagctcgaatgggggattcaaacaccgaagaagaagaagaagaatcggagttggcagccaagaccatggcgttgagcctctgcaacctgtggctaccacgcttgattcctcgctgaagacgttcaagctttgtcaagttcttgccatgatcgacgtgatggagcgtcaccctaaagcccgttttctttgcagtggtttgatgatgaagaagagctcttcttgaagttgaatataccggaagaacaaacaaggagagtagagccacagccagtagaagtgaaacgaataatactgataaatggactgaagaatgatttcccattattggatgcgtaagttactatgatagtaataacaattataataatatagtatttgctatagatgagaggcgaggaaatgaggttctggggctatgaatttaagaactataaaacgatcccttcatatttatatatatatatatatacatatataaattgtatatttttatattcgacacaatagtgccggctccctataattaattagtaatattctttaaaatatatttttttttagcttatatgaaatatgatgagtgagtggtgttagcaactctcatctatctaaaaaagcatcttcaatggaaatataaattaatgttgaaaatgcaaagtatagttcattttattaaaaatatcagaaaattactttttctacaaaatgtagttcaatttttacatccatctaagtgtaacggtctgttcaaagttagatgaacttgttggaaaagttaatttcagaaaagtctatcatcagttaaatatattattataataaggaataattgaaaagtatatccatactccttttatatataaaagtagagaataattagatgtctcgtaaggtgttgtttggtaacacttttgttttnnnattttttaatcacaaaataaaagtcaaatttttgttttt

SEQ ID NO: 114761 - DNA, 1635 bp, Cannabis sativa
  modified_base (26)..(54): a, c, t, g, unknown or other
ctctttctctcttcatcttcttcttnnnnnnnnnnnnnnnnnnnnnnnnnnnnnatattattttataacaagattatatttctctcttaaaaaaaatgaggcgagacaattgtccatactcattagtcattatccatataggttcgtccttaattataaagtcagtgtcttaggttcaattatacccccaagaacatgttcactaaccgttgagttagaaatatttttggttggaaagtgggcatccaagcaaatactaatatttggttaacaggctcttgtgatgattttcaattctttaaactctattgtagtttattgtattgcttatattaaaggagaaaagaaacaccaaaatatgtctttcagcgtcactaatactcgaaattaaaagttaagcaatgcttagtgcatgtttagcattataactaaaaaattgttttctgtttttaaaaacaaaaaattattttttgaaaacaatttggtttgtttgaccttgtttagtgcattacgttaactattgaccttctcttttagcgtcaatgaagtggtactatcagttgaacataactgacgctaaaattggtgatatacaataaatgtttttgtagtcaatttttaagtaacgctaaatgacttttttaatctgttgaagaagtcacgataatttaattctcaacttttcagttttgatgtatttcatccattaattattttaaatgtgacatcatggtttcatgtgttcgtagtaaatagttcttgttccttcactatactagtttataagctattatgtattgctattaggttgcgtgtttgagtttgaggaaggtgatactttgagctcactttaaaaagtcaactatttggagatgaaaggccaaatattatgaagtctttgatcagctaaaaattagtttgggaagaaaaaaaaacacataattggatttggagagttaaagacaacaagaaacatgtggttctggttgtgctaataaatcccgagtcaaataaattatcgaattttgcttattaattaatttgtgacactcttctttaactaataatgtaattactatgaaatttcccttctaatacaccttcggttatcaaataattataaaacaatagcaaactcattcaagaaagacattttccgttttttttggataagttatcttcttaaatatatatattatatatatatattcaataattacatttttattatatgattatatttttgttgacctataataacaagttactaatatgtaaattttttttaagaacattaaataaactataattaactatttcttaaaatgattaatttttatcctatgacttttccatcataacattctttagtctaggaagcccatcaaacttgagagtttctatccctatgacttttccaacaagaccgttaccaaatgtaacttcttcacactgcattggtctaatgctcacaagatattcttttttacctgtcatgtgtctggaacaaccactatcaaagtaccacattttagtatcaatagttttaaaacaagaagaacctaccaagcatttatttttgacaacccatttttatttttgtaaaacatatttatttccaagataattagattt

SEQ ID NO: 114762 - DNA, 6762 bp, Cannabis sativa
  modified_base (6717)..(6722): a, c, t, g, unknown or other
gagagagagagagagagattggaatacgaagagaagttggggtcggtggctgggaatcgtgtgaagaagaccaataagaaaaagaaaagaaaaaaatattttatgattttaaaatcatttttttagtttttttattatttaaaaaaaataattaaaattattatttgtactaataaaagattgacacatggtactttatttaggtttaatggatcagttagaaagggggacaaacgaacttacagaaaacgtgatcttgaaaactattgctgccaattttcgagattgaaaactagtctgcatcaactctaaatttttagggacctttaccgcaattatccctaatatatattataattacaaaaaaaatattcacgcttcttatcgttttattttagagttaacacaatgttggactctataatattttgtaaaacaaacataatgatacttagagattgagtccaacgtttttaatccaaactccaaaactttctctaacgccttactaactaaaactattagattataatcctcaatatgagttcatatgtatatttgtgtggcttgctatacaaaaatttgatccaaataaagtgatcatttaataattatgagtcaatgagtattaaagtgtcatgggctaaatgtgtacataccttaaaagaaatttctaatttgtgtggcttgctatacaaaagtttgatccaaataaagtgatcatttaataattatgagtcaatgagtattaaagtatcatgcgctaaattagaaataattaaaattataacttaactatgaggttatatattggtagtgatcccaaaaaaacaagagtgacactttatttttgccccatcaagagagaaaactagggaactattaatcttgtattcatggaagatcattacacaaagatctaatctataacgttatcgtattttctaagtactggattacacaaagaactatatgggagacacacatctcaaacttctgttgagtggctcccacaagaagtcatcgtttcccacaacaataatttttcttaaatgaaaaccattatatacatgtaacggctagtaattaaaaccataaaatgtactttttttcctagagtgaaattatccattctatacgtctaaagagagaattctgaaaggtaccatgcctattttttcaatataatagatgacaacatagcatggccagtgctgatcatcaaaagcaaaatatataatactatcaattgaccataagcttttaatgaggatggggctgaagatcgaatcatcgaagtacatcattaaacatttttgtagtttttgtaacatctagaagtacgaacgtaataatattactaattctatgttagtgacatataactaataattaattactaaaagctgataaaatctagaggtgaagtttttgaatatccttgttggcatgatttaggcgacccactgtaatattgtatcatatcatcagcagtactaacacatggtaacactatttgacttgtggtacgttgttgcacgccagctgctctttttgaaattcttcttcctctctccatcttactcctatttctctcttcctttaaaatcaaaggttcttcggtaatggttgacagatcacctaaaaagttcaccattaattttgtacataaaataataaatttgttaattacatatgtacataattattaactccattttgcgtacggaaagttccgtaaactaattaggcacgccttgttagaaaaaagaaaaacatttacgaaagaatatttgaatttcaagtcatgattattataattgcttcaatagtaaggattagattttggagttctgtagcaacactttcaactcattaatcactttcatgtgttaattttgagactcacaaattacaacatatttaaaccaatgcacaatttaatctatattatgttataaatcttggtattattagttgagaatatgcatatagtgataatcagtactacgtaccaatgatgatgattctaaaaattgtgtatagtgtatttattgatttttggcctaattaaatggctagggtaattccttaagaaatatgtacctcttttgtccatcaaattgggcctcatcatcatttttctgtagtactgtccctcatcattgccactaatcatcttctgctcaacttgtgacaatcttaaccgagatgtggcaaaaagccacgtggcgtccatctgtttgctgatcattcgcgcagcataatatggaatcttcttggtgatcacctccgaactgatgaacataatgcagtccatcaaactctctttggccaatcctttcatgtcataagcctgcgatcttctccacaggcttttaccatgagaatttggcggagtcgaaaggcaaagagctctggtcgagtctgtaatggcagaatccggatccttaagcaacaattggcactgagccctattactataaagaactattctctctttaatcaaccttaaaggacataaagctaatgcttcagagtacttcctcctagcttctcctatttctcctaaacaatacaaacggtttgcttgttgtttaatcaacccaaccaaaacccttctctcctcgagcttctcttcagatattgccttttcttttctcctcttctctaccttccaatcccataaatcttccaaaaccttttgaacttttttagtagtaataaatgacttcactgacttcttttccttaaaataagtataatccaaaaggagtgcctttgtgatttcttcacccacgtttgctctatctccaaggtctttaagttcgattaaatcaataagaaacaagatagcaatgtcaataactttataccttgtatcgaaatctttgagaagtaaaagaaggcaatcgattcccatatactgccaatcgtcagaagacctcgagagaatacagagatattctataacatctttcatgtcagcaattcttttcctcccatatttattgtaacacaaaattctaataagtccaaccccagcaggtgaaacatggttcgccagtccaccccacatccaacaaagacttctcaaaaactccttctcacaaatgatattataagacctccctttataagcaaaacagttgagaagatagagagaccaacattgaatttggctagtccattcctccgccttgaagttctccatttctctatttgcaactgaccctctagtaagtaagtcacaatgatattttagcctccttttattattacttttattattattattattattattatccttaactctaacaaagtcgtcgtaaacgacatctacgcaagtagaagctaaacgcatggctaaccttaccacctcttcctcgtattgagccaaggcttcgaaagttctttcatagctggcgaggtgaccaagagctcgaaccgcaaccctttgttctacccaactcatctttcttcctctaagaagctccatcaatggtggaatgacgcccgactcaacggctttctcagcaaactcgacccttttcatggtgtaagaaccaatgacatgagcagcgtagtaagggatgtatatgttttggtccctgcaacgccactcgtcgtcgtttagagctttgtggattaaactagtcatgcactcaaaaacgccaagcgaagggagctcccagtcgcccgggtgactcatggcgatgtaccaaagaccactaagcaccaaaacattttcctgttcgcctataacaggcagtttcttaaagcagttggttattttggttcttctttgtttagaatctggctctttcattatgcagaagaagcaaaatggggtcatacatggggtggtactgatcaaatcatgagttttggaaataagatgagttgttcggatattctcatgttttgtaagggaggaatccatggaacagaacaaaaatgagatgattgtgtattgcttaggcaaactagctagggtttttacttgtatgacgaggaaattagtcgtaagggaataaaagtgttttaatccaaaaggaaagaaaagaacgttgagattaagggaaaagtacttggagaagtatatatgtaataaggacacctagccttgctagcggcgcatgtagagtatttaaatcgagaaagctatagtagctagccaggtttggaaggggagatgaatatgcccaattaataagatatatgctacatagttatatataaaatatataatgaacatttctgggagaaaccttgcccaatatatcgacatagtggtgtctcatattatatactattaactaacagaaatgctaaaactaaaaagtactactaatgtgtttactagcttactatgtgttattatttccaattaattaagtatcgggtgacatataatagtatcgctaggcgacatatctagaggtactaaacaccaatattattgccccatagtaatgctctattacaaatattaacattacaagtctaaacaaagctgcaactgcaactgtactagacctaagtgctcttatataattaatcaccacagttatttctatgcagtggatgtctattaattctctatttattttttatttatttgttggctgcttgtgatcgaactgtgattttgattttatttatcaaatgtttgtcctcctagtggaaaatatgctttctagtttctacataagaaagaagtggtcctcaccaccccactatatatagcttttcaaattctattaattttattctgatagaattaattaaaaacattggcacctttccacttttatatttatttagttcatacataattacattaagctgcttttttgttatttccaccctcttagtcaaaaagctgctatttttctagtttaggcgacaaaagatcatcagctaagaacggtagaattcaaaatagttaaaagaagattctatcaatgatcaatctaagccatatacaaaacaattaataaaccattatttaaacatgtaaggacaaaaatccttggttttctatgcacatttacaccatcatgttgtctagaacatagattttcgttcaagtacgtttgtcgagagctgtaagatgagatactccaactccactcaaaagcctttccaaagcctacactaacttctgttctttcacttgtgagattttaaaaaaaaaaaaaacaaccatatgaatatgaagaaatatatacatatatatatatatagtggtgtgcgttgttgcgaaagagatcatttagtgaggggagggaagggaccacaatatgaatatgggctatcaatatatattttctattcaacatacaagtaggatcatgtggtccctttacaaatattccccaatcctgcaaattccaataaactatagaactccataaccagtaaaagctgaagttataagaagaaaaaagattaaaaacgtagtacaaatggtgatggtctcaagaacatgcatgcggcttatactacattacaacacatttatgtattaggagcggcatcacccctaaaatcatagaaaatcacctataatgaggcgacaagttacccttaaaaagtcatctctaataattcgcgtctaaaaatagtattatgggcgacaatatcgatcttagaagtaatctacgaaattttgaactttatttttagggacaataaagtcgtccctaaaaaaccttgtcagaaaagtatttttgacttttaggagagatatagatttttaaattaagaaaataattatttatcatatataaatgtatatatatttacatagggacacgattttgtcccgtgatgtactttcacggaatgtatttcgtgatgtacggtagccgttagatgggggagttatttaatttgagggttggggttgatctaggggtaattagggttaaaaaatggtaacgtaccctgagacccatctaatgtatcacgaaatacattccgtgaaagtacatcacgggacaaaatcgtatccctaatttacatacacacaaccataaatatatttactcacacacaccatatacatatttatatatgtatatatctttatatatatatactcaaacacacatatacatatatacataaatatatatatacaaatatatagtataaatatgtataacataaatatatatactcacacacacaatatagattgatatacatatatatatatacgcaaacacagaacatatacatatatataaataaatatatacacaaaaatatatatatatacctgtataaatatatatacacatacaaatatatattcatatatacatgtatatataaatatttacatgtacactaacataaatatatacacaaatatatatatatatatatatattcacatatatatttgttgcttataattttttttaatatatatgaaaatcccagagtcggtcaggtggcaggaaagcctaaatgtcaagagtaattaaggtaaacctcttaagacaatagttcgagacctaatggtcatgtccggaaagcccctccaggagtttcagtcgggtcatgctaagtcaagaattatgttcatctcaaggagctaggaaaaacattcgggtccggtcgttagaccccgaacctgagttgacatgggcgcattaaatgcggcatggggaagactgttagaaattattttaccaagannnnnnatctactcacaagtatgttaatttaacaacctaaatatga

SEQ ID NO: 114763 - DNA, 2348 bp, Cannabis sativa
aataaataataggataatataaaaatatatagtagtgaggagaacgtgctttaaggctttaagcacgtaatttttcttaaaattggtgtgttataatgatatattttatttttattaaatatatttaaaaatttgaaaaaaaaattatatttatgaagatatagtgtggtacttattgacaaatcatttataacaaaaaaaaaaaatgatcacaaaaaatttacatcaagttttgtaattatacattagaatataatgttcaaaattaatgtaaatacatcacaatattataaactagaaaatataaagcgagagagaaagagaagaaggaaaactgaatgaatttctcattaatgaatcaaagaagggaatgagcttcatatagctcaagttcaagaagattacaataagcacttagttacaagaaacaactaaccaatgtaactaacataatagaatacaactgaaagaagccagaaatccagtggtagtaacaactgagtaaaggaaaaaataagcatattttaacactctccctcaagatggggagctaatactaatcagtcccatcttgtccttgaaaccattaaattgagtaggaaaaagtgtctcggtaaatatatcagcaacctaatctttagtaccaacatgactggttttaataactccatcctgcactttttccctcaccaaatggaaatcaatctctatatgttttgttctctcatgaaaaactggatcacattagagccaggcgagacctttgtgttcgattcttaactctaagcatagacaacagccaaacaagctcacaagaggtattttccatagctctatactcggcttcagctaaggatctagatacaacatgttgcgttttactcttccaagaaattagagattttccaagaaaaatacaaaatcccgtagtggaccttctagtatcaggacaagcaccccaatccgcatccgtataagctttaagttgaatctctgatgtagcagggaagaataaaccttggccagggcaattcttaacatattgaaggaccctctcagaagccttcatatgtctagcttagggagtaaccagggattggcttaatttgttgatcgagaaggatatatccggtcttgtaatggtcaaatattgcagctttccaatattccttctataaggtttaggattagccattatgtcttcttcatcttgacatagtttcaggttggcttccataggagtactcactagcttacaccccaaatggccaagatcctctaacatttgcaaggcataatgcctttgtgatataatgattcccttaggagatctagcaacttctaacctaaggaaatacttgagatttccaagatctttaagctgaaatttattattcaattgaactttaagagtctccatctcaaccagattattaccatccaagataacatcatcaacatatataagaagaatgatgaagttgtctccattgttcctcataaacaataaatgatctatggctgaatgatggaacccttcctcaaccaaagtactagaaaatttaccaaattattgccttgatgtttcctttaatccatatagaaattttttaagtttgcaaacaacatttggtggaagctctcccttaggactatacccaggaggtagagtcatatatacttcttcatgaagatctccatgcaaaaatgcattattgacatcaagctgatgcaaataccatccatttattgctgcaagtgcaagcacaagtttgatagttaccaacttagtaacaggagcataggtatcagtataatccacaccctcttgttggttatatcccttagccacaagtcttgctttgtatctctctacagatccattagcattgtagttgatcttgtagacccatctacacccaatagcatggtgttcagctggtaaagaaacaatgatccaagtgtgatttttctcaagagcatcaatctcacaatccatagcattgtccctcactggaatccccttggcttgactgaaaaacttaggctcataatgactggaaatggccagaataactgcttaaaaggtaggtgaaagtatgatgtaatccacagcctgtgagagagaataaggagtaattttggaaggttcttgcaaggctttaacaagactagtttgagcaagaaaaaaatgatgatcctgcaaataagaagcttatgtgaggttgtgatgggtctgttatgaggcaaactgttgtcaatagcagtaggttcaggctatgaaatagcatgtaataccttagatttaagaagtggattagaaaaaccctaactagataattatgtat

SEQ ID NO: 114764 - DNA, 3127 bp, Cannabis sativa
ccttgtcccatcgttcgaacccccaacttggatcgtcaggttcttgcaacattgtcatccgaagaagacgaggagattataaattcggtagtgcaggggaaagtgccttcatactcgctcgagtccaagatcggagactgtaaaagagccgcggcgattaggcgtgaagcgcttcagaggacgacgcgaaggtcgctccagggtttgcccttggaagggtttgattacgaatctattttggggcagtgctgcgaaatgcctgttgggtacgttcagattccggtggggatcgcgggtccgttgatgctcgatgggttcgagtattcggtgccgatggcgactacggagggttgtttgattgcgagtactaacagaggctgcaaggcaatccatttgtctggtggggctagcagcgtgttgttgagggatggcatgaccagagcaccggttgtgaggtttagttccgccaagagagcttccgagttgaagttcttcttggaggaccctgaaaatttcgacactctttccatggtctttaacaggtcggtctatttatatatatatatatatatatttatatacatgttacggcgattgaatctttaacaagggcatcgattggatctcgcttctaatttaatagaaatttttgtaataaagaaagtattgaaaaaagtaaacaaagaaagaatagaaaactcaagtgaagtttctttccgatgtcagattcatcaaagtctttcaataatacagttagatttgaatcttttgtcttattgggtttggttatcgtctccaggtctagtagatttgccaggctccaaggtattcagtgcgcgattgctggaaagaatgtgtatgtcagatttacttgcagcacgggtgacgccatggggatgaacatggtttcaaaaggagttcagaatgttcttgatttccttcaaaccgactttcatgacatggatgttattggcatatctggttagtcttttttccttaggattattatatctttagactaattagccattttcccttatctcaaccccgagttattattgctgctggtctgggtgatgttctttttttcaagttatgtacagttataaaattttctgttggtgaagaaggcattatcgactgcaatttttgttgagtttcccttttgttcctattggaagtttcagtggtcgagttttcatgtactatttacgtatagtgtaataattcgtacaggtatacttgtcaagtggtcatcgctgataatgttatccccatccccaatatagaaatgtttggaattaggattttgaatgtcattgacctgctattttttttgtcaataaatgttaatacatgtaaggaccaagtccatatccaggtcattttctattactatcttattaccaaactctgtccttttaattttttttaagcgttaattgacagcttcctatgtcattctctagtactgtttcatgttttcctactatacaccacaggaaacttttgttcggacaagaaacctgctgctgtaaactggatcgaagggcgcggcaaatcagttgtttgtgaggcagtgatcaacgaagaggtggtgaagaaggttttaaaaacaaacattgatgctcttgtagagcttaacatgctcaagaaccttgctggctctgccattgccggtgctctcggtggattcaatgcccacgccagcaacatagtatctgcaatattcatagccactggccaagatccagcacaaaacatagagagttcgcattgcataaccatgatggaagctatcaacaatggcaaggatcttcatgtctctgtgacaatgccttcaattgaggtaaagccagtggttccattccaacacacaatcaattattaaagatatgcactaacattaattcgtatatattttatcttcaggtgggtacagtaggaggtgggactcaacttgcttctcaatctgcatgcctgaacttgcttggtgtgaaaggttcaaacaaagattccccaggagcaaactctaggctactggccaccattgtagccggttctgtgttagcaggtgagctctctttgatgtctgctatagcagctgggcagcttgtcaagagtcacatgaagtacaatagatccagcaaagacatgtcaaaagttgcatgctaaaacatgtcaaaaaagaaaaagggaatggggtccgggcaagatgaacgagctaaaattaaagagtccactagtccaggctgtgtggttgggtgtgtgcacatgggaaactgttgtgggggttcaatttccatagctgtaataagggattttggtatcttttaagagagagaaaagtaataatataacatggggaatgagttgggttgtgttggctgtacaggttttctcttttgatgctcgttttgttcttcccaacttctctaattttctcccagcgtgacgtgtcattgagtagacaatatactttggcaatggcaggccatcatcactgcagatctcccccaccttcaaaatctgtggtctgtattatgtcgaagtcttgattttttttttccttttaatttttctgaaaaagagatagatgtttttgtcttatgtgttgggagatgtttgtataataatattttgtagtgggattcttgttcaatcaatgtcttttctcttgtcattttgcttattgctattgcgatcatttctttctccaatgttattaataatcgtcatcgttatcaccatcatcaacaactaagtactatttaatattataatccattattgtacaatattaagaagagtggctaacatataaatattggtgagatttatgctgtcatacatttatatttttgacctgttgctgctgtattgtatgaagtgtagttcaaaatagctctcctcattgggccactgccgaatagggctgtatgtggaaatccaattatattagggggagttctattcgatctccaaccacacgatcaagacgctccctgatgtgatcaaaaaattgtcggccgttggactaggtaaaatgatagggaaattacattgtatactcactttactttatatgttttaatttttacatttatttttatattttttttgaaat

SEQ ID NO: 114765 - DNA, 2905 bp, Cannabis sativa
  modified_base (2270)..(2281): a, c, t, g, unknown or other
tattaaaaagtaaccaatccaaaataaccgatccaatccacacttttacggattagattggattggatttcagctattatgcggtatggattggatccaaaatttgaactccgcacttagtgcggatcggatgcactactagcaaaatagtaaggattggattggatgaacacccttagcatattctataaatggattggtatttaaagaactaatccattacaagaaccacatcacaccatctaacaagtaatactaacaagttttcatacaactcatgtccacaaccacaatttaaatggatctataaatgatggatacctcaccatgtcctcacattggtacattcaactgtatagcatgattaaaggttttcaaactcaaacccatcatactcaaatagcaatgatttaaaaactttggtgcaccagtacaaaacagtacatatgatcccaagagtatgagataagaaccataccattaactactcctgggcttacaccccctctatatcattaacactaagagcatgggcttaagcgtagacttttatttttgtctttactttaaattggctaaattcatcctgccaagtttcccacattattagcatcactgagacttagtaagtcttacaagaattagagttacagtcccaccacgtactacattcctaaaacatgcgtgaactatccaataaaaagagtgatcaataataccgatataagttgaacaaaataagctcacaaactttatgtagaattcattgtcatatctcctcatctcaaccatcacatgctccaaccattgtcctcttatgaggaaaatataaatatcgctccctaaaatccttttgaaatctctttgggtcacccgatcactatccattattttagtcactgtattaaaaagatgaactgttgctccagctttcaacttagacacaacgaattaatatggtaccctttaggtgtttcattagcgtgaaggtttcattatccaccttatctatctttcaataatcattggatctcatacacctccaaaattaggcattcaaacccagtgaaagatctaacaataatttttttctcaagtaccaacgtatatctattgagcgagaattactcccaaagctttaaaaattacattcatagagaattcaatctctggaagagggtcattagcctaagcggcattagctgaacactttctctttatttgtctttcctttgtaggcatcccctgctacgcttcaccttcgatgtgtttcctttagtctttatatcaaaagctaacaagttagtgaagaatggatgctctttatacgtaagctttaatataccatacatacaatgattaatttattattataattattattttaagaaaatttgatctattttgtaacacacttcgaggttctaaacccagcgctctaataccatttttttgtcacgacctgagccctaaactgtggcaattatgtaatatccataacttgggtggtcaaaggtcacactttgatcctttttgaaaaataatacttataagttatcttttagtctatattaaaaaaattaaataaaatacacattttaaataataaaataattcttataataaatagaaaatagttcaattaaataggactacttgtcaatctatatagaataataatattcccatagttatgtagtcatcaatgattagatttaatagtttacaaaacaccaaaataatctaaacatccatcatattcctcatccctaacaattcatagctctttaaatgatactggccatccatcaataattagatacatattcaatctttaatagaatagttaattattaattaagataggactaagctaatcacattgttctctattagtaattctccatcatccacaagtaccaaactgagttcttggaaggagaaatatagggggtcagcttataaagcctagtagaaaaacaactaatatcaaaggaccagtagtttagtaaaaatcctggcatggtttcttttaaaacaaaacatcttgtcatcatcatcatgtatataaaaaaatagagagaccacaaataatcacaagagacaagctacccatgcatatcacaccgtccactagaaccctagctctcaataccaatcattgaaaacgacatccaaaatcgagtagtcgcacctgataactaccataatactagggcttagatataattcacttcctgtacaaattctaggtctttcacctacaggtnnnnnnnnnnnngatctacctatgatgacacagagattaggtcgtgaaacaacaatatgcataaatcatcatcaatatggctctcattagtacaaccaaaagcaggcaaataagaataacaaaagaacacatccccgttttattttagaaaatctgacagcataatggttgcattttaaataaactcaaaaatcataacctgcataaataattgtgcgaaaatatatttggcagtcagtgccctagaacagtgtagaaaaatatgtagattaagtttcaatttttcaaacattttataattcataaaaattgggatatgcctaatgttattcaacacatataaaataaagtccaataattaagtccctacctctcccatatcgttaaactcttttccaaaatgatgatcctgagctcttaactcccgagctccaattgtttagtccaatcctagatatcactttaacctatgaccgtaaaatgtctaaataattattatcattgcattctacattcaaaaccgagcccaacaacatataacaaggctatattaaaagttttgagttctaaaacctcacctaagtgctccacattaactattggtggcggtagaaattggtgtactgaaaacgtcac

SEQ ID NO: 114766 - DNA, 2791 bp, Cannabis sativa
aatcgcataaaatgtcgcacaaaatcgctcaatatcgcatcaaaatcccaactccaaaaaaaacttcactaactcacattatatcgccaaaaattgacaaaatgttgctctaaaatcgcataataaactatctcacacaataccctatacagactcgcattacgtcgcataaaattgcataaaatcgcacaataatctagaaacccaaaacctatgcacactcgtattacgtcgcacaaaatttcacatgaaatcgcataaaatcgcacaataatctaaaaacccagaaaacagctattgctcgaaacccatattcttcccacaattttattgcacaatttatcccaaataacataaaaaatagcaaatttcatttcaatacaagaatcaattacaaatgtatgcattttaaaggagaaattcaaagaaaaattccaaaaaactaacctggattgctacgattggggttggtgggattcaagtggctctcgttgttcgctcgggtcgattgggtcgagagggcatccgtcgatggggtcgattggagtgggtctcgttgttcgctcgtgggtctcgttgtttgctcgggtcgtttgtcggagctcggggtcgagagggtcgtgggagcgaggggtcgacagggtcgtgtggttcgaatggagaggcttggttgattggggggtggtctcgttcgagcttgctggttcaaacggaggggaagcgttgggggttagaattgagagtgaaggaggagagagagagggggctgttagagagaatggggggaaagtgaaaggataggggtaattttcggagaatattgaaaaattggcatatatttactatgtttaaatttttggtttaattaaacaccacttctaacttttaagcataatatatcaaatttcctaattataagtttagatatatatttaaaaaaaaaaaaaaaaaagtcaaaccgaatcaaatccaattcgaataagtagcatatctaatttagggggcgggacagattcttacattatttagatcaggtcggatcagatagatcccacccaatctatttacacttctattaaccaataacaatgctctattaataatattgatggacatttctaaaaaaaaaaaaaacgaaagaaaatagtttcaggggcaatttcgtaagttcagaattatgtaaaggaagaacaaagtcacgcaaacgtgagtctctcactgccacgccgcagctgagagaatcaaatcattacccaaaatctcccacccaataaatcggagtacccaataaatcgcaaacaactaatcgccaaatacggaaccttttttacagttggagttggtcgtgacagaaaaaaaaaaggagaaaataaatcgttttgttctaaaatttccagagaaataatttattccaatcccaggggataaagtaaagcaggagaggacgatcctatcgtacggagaaagtatggtaacaagtggcaataattctcgagcgttgaatctcagccgtttgattaaagaatcaggtttcagttgacggcccagagtgaaagtacggcgaatatttgatcggagggggaggagaggagtgtggtttacacgtgcgagtgtgactgtgtcatcccatggcatggaggggtggaattagtgtggtctaacggctgttgtagtgtactggtatggtccactgattatataccattgatcgtggaatgactgatgacgtcacgatgtataaatgtggaataaataggatttttaccttaaggagttttttctaatgcaaattcttgtaaatatccagctatatttttctcatcttttaaaacaatttgtttatgtcattgtgagcaaaatacaactacagggtatatttgcaataacttttataatttaaggaaattttagtaactgaaaaatatttagggagaaaactctaaaatagtcataatttagagaataaattctatttactctataaatgtgatatgaatcgccagaagaaaaatgaataaagggggccgttttgacattaattcacgatgtatgttgcgaaagttttggcctttattatattttaagtttctcagctataaataagtttcagagcgctggttttttttttggaaaatattgaagctataacaatggaggatggcactttatttattttgttagaccattcaagttatcttaataaatactaggtataatcagtcagaatattatcaactgggttttttttttgttatcttttctttcttctttttaatcatcactaaaaaggaaaatcctattcttatgaatgtgatttgcttaagagattcgaccattaactacttccattaatatccttcttttttatctaatttttattagattttgagaaaggagtgtatctgctatatttattcacgaggagttttgaaccttttttttcttttctttttctttccttttcattctttttccactttattagggtgttatagtgaatttgtgaattttttttagtactcatcttcttcttctttttggtttggctctgtgtgctttattgatgaagaacccgattctgtgtactaatcgaaacacctatctttactttttttccttctgtttttttcgatcttcttcctttttcttttttgtgggcttgatttttcattaatgtttatcagagaagaaaacggagatatttgcaagacaagattttttttttttttttttttttgtaaaacccaaaccccctttttcagttttccgaatcgttttttttttttttttt

SEQ ID NO: 114767 - DNA, 2238 bp, Cannabis sativa
ttgctacaaaatcattttgctacgaaaatttagtaactaatattaattaactgctaccaactatatttggtagctaaaattttgttgctaaaaagttagtttcttgtggtggtttaattaaaaacacacctacatagttaaagatattattacaatggatgaaaattaagacattacaacttaatataatataaggatcaacaaaaaaattaaataaatgttacaatacataatacacaatacatatacattatatattatatataaaaaagatagaagaaaatatatacatacatatctatacactcactcacaactttaagtgtagaatagtggaaatcattatgacttcaacaatgtattacacttttgtccaaaagcttatttcccctttcctctaaacactaagggaactctttaggaagggaattatcaagccttagaattttctaacaaagtgctttcttgatagaaaactcgatctctctcaaataagcaccaaaaacctccttttataatgtttaagtgatcacacttagaattcaaacacctcatctcatttctcttatataatgagcattaatataattgtaacaactatatttcatactatttgaatcctatcatcaaattgtgtaacaacacttttattacactaataatgtgtgatcaatacatgagttacaagtgataataaattataactcctctctaagttacaacatgtaggttattacaaaagtgtaggtgaaattcataggttacacatttatttaccatacactatattattcacataataatatatttatcacattttaatctatacttattatattgtaaaataatataacaatatatatcatctagagggaggatgagatactccgtggaggattttaatacaatttggacaggactttttgacatgatacgaaatcggcacgagcacgatccgacatcaaaaaaatatgtgtttaggcacagcacgacacgaacaaaatatgagctttagcacgacatggtacgatgttgcgaattgagatgacacaacacaaaaaatatgagcttaaacacaacacgaaacgataaatttgacaacacgacacgtaaccaggaacgaggccaaaaaataaaacaagatgaggtgaatatgattattttgattaagtttctaaaattattaataaaagggaattatagcttttaaaaagtattatattatttatagaatagctactttaatttttttaatctaattaattgtgaataaataattttggatcttatattttgtaaaagttactgattaaattatccttaattttttgttaaataacaaataaaactcgatcaaaatagaacataataatatcataaggtggaggtattataaccaacttaattatattttttgcacacatttgtgttagaaactaactttagattggttatatttaatcatattaagaaaattttgattaaaattgtgctcaaaaaatagaaggccaattagtaaattttgtaaaatgtaggatttaaaataatatttaataattaaataattttaatagataataaatataaaattatataagataaattatttttatatagattataaatatttatatatgtgtatatttatacgagtgaaaaaggagaatagttaaggtgagaggtagctgcatcaccttggctaaagtagcttcgtcaatgcacataagcacgatacattaaaagcccgatagtttgataataataataataaaagtaagtagcggcataagtacttacagtttttagtttgtaagtgacataaatttaatatttttttcagtggcataaatactcaatatttataaaactgtaaatttttttcattttcatcagtacagactccgatttgcttatattaaaagaacatttagaagcaactaataccacatgttttagtctagacccaataatctagaatcggggccttatatgtaccctatttaagacaataacatattatgtactaacgaaattaaaagaaaaattacatttttataaacattggatacttataccgctaaaaataaatattggacttatgccacttacaaacttgaaattttgagtatttattgttggattaaaaatcctattatgagcacatatgtatactgtatatgctattataaagtgtgatacaaaattaagtgaccaattatgttatgggtatcaaaaggg

SEQ ID NO: 114768 - DNA, 930 bp, Cannabis sativa
  modified_base (49)..(74): a, c, t, g, unknown or other
catgcaacataaaatgttatttcaaatctttattaataagtaaatctgnnnnnnnnnnnnnnnnnnnnnnnnnnggcacaaaacccaacactatcatcttcagaagtacaagcaaactccctgccaaacaagcaccttctttcattgcctagatcttcatgagtactagttgttcatgacaattttccctctaaagtgagtcccagcccttttagtggacttcaaaattccaggtttgagactcatttttttgtaacttttttcagacagtttaaaacatattcccatctatgtacctgacttctgtttgtttcttatagaatccaaccacaggtccatgctaatagaagaattaaaacaatgaataaccttctatgaggctttttcaaaggaagaactaaaagtggaggattcggtgaccactgagttgatgtgctagtgtggcttgataaaaaatttctagagcatccacgacatcaatgataaggctcaactcaaattgccaatgatcttaaagaataaattgctttagacttgtctattgtgattaacaaagcggtaaaagatgaggaacttctcgcagctacgtgggcaaatcatcatctagaccccctcactaaggaggaggagatacaagcaaggtttttcgcctcatacctagaccaaaaattttttggggcaagtacttgtagaagaggtaaaatgcctttcagcataattttcacccccaacctgtctttgatgtcagtgagagaccaagggagttttaacaattatttcctaaacttggatccgcgtatgtacccaatgatggattatcttgataggatagacaaaatagtttggaacctggataaccatgtgtctttcttgaataccattagagtggatctgtaaagcccgcttagtttaatttggaaattatcagtt

SEQ ID NO: 114769 - DNA, 3756 bp, Cannabis sativa
atatgtatatagtagtaaagtacttttaactggtattttgatgctcgggatcccgatccatatggttattagtatataaattattaaaattaatttctgagtttattattatgaaatacgggcgttacattttcagcttccagtctatatttgcgaccaacttgaatccatgatggctaatttttggtaaggattaaacaaaaatggttcaaaaatacattggcgggcttggcacctactttgcaaatcaaaaaatgaaggcggtatgggttttcaagtctttaaacattttaatcaagtcttattggcaaaacaagcttggcgcctattggaaaaacaagattctctccttggtaaactactaaagcgtcgctacttccctcataatgattttcttgatgcgcatcatggtcatagcccttcactaacttggcaaggaatcatttggggcagagagttattattgaaaggttttagatggaagattggtgaaggaagatcagttcgagctgctatagatccttggattccaagccatgactccttttttccttttcggtattcaggccctccaattggagttgctgcgaacttgatttctgaagatcatcaatggaatgttcccctacttcaccaatggttttctccgctagatgttgatcaaattttgaccttgtctttaagctttttccaatataatgatactcttttttggcaccaccatttttcgggtggctacacagtccaattgggatacgatttagctacatcaatagctgaagctcatgacagttcaagctctagttctcattcttcttggtggaagttctattggtccttacaactaccacaaaaggtgaagatttttacttggcgagtcattaatgacgtactaccagttgcaacatctttggtcaaacgcaagatcatcactgattctacttgttcggtttgtaaatctgcttgggagtccattggtcacgcgctttttggctgcaaatatgctagatttatgtggcaaaatacacaaatgagtttcaattggagtaaggcttctgctatgtacaaaagggtttatttagtgtatctctcaaccatttacagcaaggaagagatggaacaaatcatttgtacactttggtctatttggacaaaaagaaattgaattattcatggtaatatggttaaaccatctgttgtacttgctttgctgtcaattatttaaaaattttcaaaatagccaagatcaagtaccatccagcttctagcccaatcccaaacatctccccgtcggcagctgttcatccaccatgaaagctgcttactgaaggtgatctgaagctaaatgtggatgtcgctcttgacaccaatcgaaatatcataggagttggggatgttgttcgagactcatatggacgggtgattgttgcacttgccaagcctttaattggaaatttggcttcacacaaaatggaggcaaaggcaatattttatagtcttaattgggtgttgcagatgcagttacctattgcaatagtggaacacagatgctttattggtgtcaaatgccttgagaactcttttttctgctattacttctttcaaagatttaataatagatatttgtagccttttattctttttatctcaagtgaatgtagtccatgttaggcattcaaccaataaggctgctcatagttttgttaaatttgctttaggggtggatgaagcttgcttttggataaaaaatttaccccgcctatttgctcagttgttgtaaatgacttgtcccattaagttataataacaagtatgtattctcaaaaaaaataccgagatcagatattgtacggatagtattatccccgccttcgcctcatccccacttcgagtattgaaattgtcccccaccactgccccatcaactgccaagtcggggaatccccgtcccattaggggcaggtccccacgattactcatcccctgatataaattttcatctctaatcaggaggtatatacttatggtaacaatcttatcaccaaaaatttaccttataatgttaatttggaatatatttccactagataactaatctgttgaacaaaagttgtaatctttttagattattaatcttttgtactaaatgagtgttaaactatttctaatgggagatataaaaattatgctatatttgacacaaaaaataacttatgatatatttgcatcaatttttaatattatactccaatatacaaatacaaaatttgatgttgataacaaatattataataagtaaaatatttaatgtaattcataatttgcaaaataaattcttgaaatacataataacattttatggtccaatgtaatttagataaatgttaatttagattctatgtactcataaattcttaaaaaggtcctctagttattgatattgtgaaaaatgacccctaattataattttagtcatttttttacgaattgtataattttgaaaagattaaaatacctcatttattattcttattttttaatttgtttattcactttttcaaattgttaaataattaattagttatatcaatataacttatcaaaaataatagcatgatggttctgataaacccaaactaaggatttcggtaggtctgttggcctaagtgtatttcatgttcatgcactcttacttctatccatgaattttagttaaatcccaaaaattcaaatttttaaataattttgttatatacttaattatttatttaatagttttaaaaaataaaactgaataaataaattaaaattgagaaatgaataaatgaataataataaggtatttaagccttgtcaaaattacatttgactaaaattataattaggagaatttttttctgcactattttaataattagaaggtcatttaaagtgtttatgaaaaataggtccaaacgatcttgagttaaattataggagattaaaattatattacctcttttaaaaataaattcaatatataaatacataaaaattaattagcatattaaattataaataagtttaatttataatactataacaccctactaaattaggcacgttatagtaattttaaattactgtgcacttatttgctaatcaaaagatttactaaaaaatgtgaataattaaattttataaataaactttaatatataaatacattacataattcgggatcccgttataaatttataagcgttttcaaaatactataactacaaaagttatcgcctagcgacttaacaaaacaaagcctactgtcccgaagatctgaacactccaggtctaaccgccctgatatgtacaatcttcattaactcgagctcactactattcagcctttcctttgcctttatctacacatataaacaatgtatgtgagtcgatagactcagtaagaaaaatataaacatatcataagataaaccggattataactaggcgcccatacactcaattacaatcctatcctgcgtcccaggcgtactaagtctggaacattcgtacgacaaagcctaatcatatatctgttgatatcttagtgcaattctatttacacttcaccaatatcttgatatgctaatataatggctactgatatgctaatataactacatttgaaaagcagagactgaatttaggattaattgaaatgtactgatagttttatgttagtgcaagtgggagtttgttgggctttgtaccctaaat

SEQ ID NO: 114770 - DNA, 2042 bp, Cannabis sativa
acaatttgttgtgactaaatatgttttttagtcacaataattgttgtgactaaaactaaattagtgacaatttgtatttaaataatatgtttgattacaagtaactttttttgtgactaaaaatcacatttagtcacaaaaaaattatgctctaactaaaaaattgtcactaaaaatatttttttaagtgctttcttcttatgacatttagtcaagcaaaaaccaagttttccatgaaaggacaaaccatatagatgtgaggctatattttatcagagatgtattaattgggtgaaaagtgaagctggagaaggtggccactgaaaacaatgaagcagacatcctcactaaagccctacctagctagctacatctaagttctatcactgtctaaagttactcaatgtaatggaagtttaggcagtatacaacctgtcgtatagctggttagtatttgtgtatattactagtcaaggtagagatttgttagaattcgtgtgcctatgtaatataccaacgaagcaactggttttaactaactttttaagttatagttaaaactgttatacatgtaggtttagttaagtgtatactcgggcattagtccctataaatatttatatgcttgtaatatgtagtttgatctaatcacttgtaaaattcagatttatagtaataaagaaagtataattcatttctgaccatgttcttttaagtgtagttcattgtccttacagtttgttttctgttgagtgctttagaggagtgttcttgtgtgagttatgaactctcatggtgtgtgagattgagctttgtgaatctccaacaatcaatactttatcgacattaacatgtcatttttcagcttatggctttaatgaccggcaatgcatgctatgtcatcgaagactttttaacaacaattgataagactaaatactttaacaaccattgataatgcatatggaggaatcatagcacttctctttatttttcttgtattttgttggactagttctctttaattatttggtgcaagttgtgtttgttttttttttttggctaaattagtcactactagtcccacctttagacgtacttataattgctatcaaagataatatatgataatataggtgggaatacaacttatatataaaatttaaagtccactttgtataataagaaggataacttattctaattacaagtttttttttgtctgatatcatgtattcataatttatggccaaatctaataattatgatttttgcctcctgaattttgacatgtaccaaattataccccctgaactttttcaagttgttaaaaatttcccctaaactattgagattgttaaatttaaggacttttgtcttatttcattcaatttttctaatatagcgattgtccatatatatactaaattgtgcccctcaaactttgatatttacaaaatcatgcccctagactatcatgtaccgaattgaccccataaattttcattcacgtcagactttctttactaaaattggacaaaagtccttaaatatctaatatttttttgaataaaatttagcaactttattaactagcaatcgttaataattaatagaatacacttcgttagaacaatcttccaactgaagcatacgacctgtagagaaacaagaatctctggctaaaacatgagccagcttgtttgcagatcgtttgacaaaacacaactcaacattatttaagaataagagaagagtacgaacatcatgaactaaaaggccaaaagaggatgacaaagtaatttagctttgcacggcttgaacacaaactaaactatcagtttccaaaattacttgtccccacgaatgacggtcaatccagcttaaggcttctttgatgcctacaattttagctatttcaggttgcacctgccccatctttctcatcgtgtaagcttccaccaaattaccgttggaatctcaagccacacaaccaaaaccaaacggccttctcgctcaaacaaagcgccatcaacattaac

SEQ ID NO: 114771 - DNA, 3175 bp, Cannabis sativa
gtataagagtcattcattccgtgagtgtaaggacccaatgaaggcttgaagcggggacgttatagcatggcagcctcaaattttattaattgaccacatatatataaatcaagagaactatcagaaaagataccactaagatgtcatattattgtaattcatttaatgttgcaaatttatactcatatatacttttattttaaaaatttgtttgatttgtttattcttattagctaattaaagagtattaatatatttttgaagtagatatgctaataagactaagttgatttttgcaccatgatttgatggttttgatgtcttttacagtttttgtactatttattatggattgcccctaatttttagggtaattttgtagtatggtcaataggcaagagaaatgatctattttgtgctcataacttcaacttcaacgacttttcagttttgacaaataaatatttcaaaatttttttaaatctttctatttaatatgaattattttaccatcgttctttcacattttttagttatcattaaattatgttgtaataaagttttatttattattatcttgtaggttggttttgtggagggcctaagattatagagactttatcgataagtttaatttttatataatttgttgaatattaatttttagcagttttgaattattggagtgctagtaagttgttactagccaaaactctcaatttatttagatgaacacaactatcttccatggaagcacctagtctttgccgccagtaaaggaagcaggttgcaaagatttcttgaagcaaattgcactccttctcaatttctcactgaggaagacaaagtagtaaatcgtgtcaatgtagagtacaaagattgggatcagcaagatagaatcttggtctcatggcttttgtcatcattgtcaaagaagatcttaacaagaatggtggggtgtgaaacaactgcttagatctagagcactctcaaagtatattacacaaccctaaatcgagcaaacattggcctatatagaacctttcctcgcaacacgaagattcataactctcttggggactttcttctcaagatcaaacgaattgttgatactcttgcttccattggacactagatgagaccttaagaccatatcgaagccatcttcaatggtctaccaagtgattatgatgttttcatcacctctgtaaaaacacgattggatgtctattcagtagctaaaatcgaagctctcttgatggctcaagaagtttaattggagaaaggatccaaagaactggacatcagtgaactagaagccaatctggctcacaccaaaccatatcatggtattctcttctcctttcatttctcaaaattcaactaactatcctagtgccattaccaaaaatgctagtagcaactcccaacatcctcccctgtactctgccacaagtgctttaccaggttttggttcttttcccagtttaataaatggtcgtgcttcaacaccaggaagaggccaatctcttataaatcatggtcgagactaatattctacttggggtaaaaaaatttcagtgctagctatgccataaacttggccatacagtcactcacagcttttacaaattcgataagtcttttataggacctgccactttttaaacctttcctggaagtgcacacttagctgagatgcctcccttgtatgctagccctgaaactgttgttgatgcatcttgttaccctgattctagagcaactcaccacctcactcctcgttcccaaaacatgcaatacaacaaggattacaatggaaatcactaaatccacatgggagatggatcaggtttggctatcaacaatgttggtcagtcatttttcaattctcctttacattctcagcagcttgttttacacaacttatttcatgttcctcacataacaaatgatttgctaagtgtttctcaatttgcacaagacaataatgtgtattttgagttttacccttttcactattgtgtagaagtacacgactccatgaagaccttgttggttgggaagcttgacaggagcctatatcactttgattccattaaatttgccatctaaccaaaaatccagtgaagcctccatctgcaccatcctctcccaaccctgtaattcgaagacctatagtagaatgtaacaatcatcaaactcatgttcataattcccaattctctctttagcataatagactaggtcatcctagtactaattaattgtacagtatgccttaaaatcttgtaatatatatgtaagcaataaaactgagattagatgttcaaatttgtttcctgcttcttgtttagggaagcctcacaaacttcttttttcaaattctaataatgtctatactgaaccattataattgcttcattctgatttatggggtgttgcacctgttaattcctccagtggatacatgtactatattagctttgttgatgccttctcaaggcacacttggatctacatgcttagaaccaagtgtgaggcattaccaacctttattactttcaaaacattggttaagcttcaattaggtatcaaaattaaacaaatccaatcttactgggggagaataccaagctttcaccaatctcttacaagaacatggcataattcatagagcctcatgtcctaacacccatgaacaaaatagagaggaagcatatgcacatttttgaaagtggtttagcacttctagctcatgcttctttaccacttaaatattgggatgaagcctctagggttgctgcctttctcataaatagaatgcctactccagagttacatttcaagtctcctcttgagattttgtttaacatacaacctgactattctactcgtaaggcctttaattgcttatgctatccaaatcttagaccctataattgtgttaaactccaatatagagctataccatgtgtcttttttggttttagcatatcacatacgagatacaaatgctttttcaaagatggcagactctacatctcaagggattttctttttgatgagaatgtatttttgttgtaatttcagcggaaataaccttgaggattcaatcataaaatctgcaatgaactcacaactttgacagtaaaatgaacataaaccaattaat

SEQ ID NO: 114772 - DNA, 2054 bp, Cannabis sativa
acatgcatataattcccaattatattatatgtaataatatatataacacatcacaattttaatcttaaacattatattatataataaataatataatatttggtgacccacacttttgtgcgtgtcactaaaaggccaaattgtagtagtgacattataatttcacatacaactatatatctagttaaaaactctactcactattagaaatcaagtatgatagaagtctaatattttacatgctatctaaaattaatattttttagtaacattgtttgttgctttagagttgttttaaagttataaacatgttgtttgatttctttgtttttttaaacatgttattttcatgttgtttgtatgttgaactttagtggttaaaatttgtagattccttgaattttatattcagttgtttttatgttgttgttaaatatttgttaacagttaatattgtttttgttgttactattcagcttttataggtacatatattaatattgtttttgtactgttattattcagtttttttatttgttattatttagttgtttaaataagagaaaaatttatatatgtttagctttttataggtacgtataattttgagttagtatacatgtgttttgtaattatttttaagtttcttttattttatttttttataattattgatgtcttgtttttatttttattttgttgtcacaatgcattgatacatatttaatttgcatattaacatggtgttgttataaagttatttgtttgttattatttagttgttcaaacatatatattaagattatgtttctttaaaggttctggacaatatttattgatgtccaatgatttgcatattaatttagtgttattgtgtagttgtacttttttttatcgaataaaagtcaattttttaaatatataattttgagttttttatctatttatttgattattgttaatttattgttcgttgctatttaattgttcaaccaagagaaaaaatgaatatatatacgcttaatttttttataagtacatacattaatattatttttgtgtagttattattcaattttttgtttgttgttatttagttatttaattaagagaaaaaatagtatatatttaattttgtatggttaaatatacagatcaaaggtagtttatcaaacttaaattgcacccatcttttactgccatcaactggtatgtgccgcccaataaacacctcacaatcaattggaaatccaatctttgcacgtacatatccatttaagaatatttgttgcggattattccaaagaacatcttcaacccccagccatattccccaaacgcaaacgcgcttaacattattgaaagtaagagcttttagtgggaaaccttgcatattttaacccagcttgagattttatccaacctcgcgtctctccattgtccactggttggccattcttcgagcaccaacattcctccattgaatagccaatgttgcttctctaatatcttctttgcgtcgactctgctagcaaaagacaccccaaaacacttgtgctctttttcttcatcaatagccttcactttccactctccaattgctttccacatcctattaaatatggttctgaatagcctcgtatttacaatttattttgagacatttctcccaatcaaagacttctttctgaactcaactgtttgtgcctcattaacttcccattccttttcttgctccattcctagtttatcagtcaattgcacaatcttatctaccgtactttcagtcatcaccgtagccattaaaccgaagatcaccaacagatcaatcataatgcagagtcacaaagaccatgaagagtcactcagggtcacaaagaccataaacatcccttatctataatctataaatatataaaagtgtcaataatttttgagctttacaagttagattattttttgagaaatttgcggctaaacccccctatgtttcaattgttatacacttaaccccctattctttattttttatggtaaaacccccttaagtttta

SEQ ID NO: 114773 - DNA, 1525 bp, Cannabis sativa
agggtccaatctgtaacttttgcaaaatacaggatccaaaatggtatttaccctaaataaaatttgaaaaaggaattttgcgctggcaagtctaaacatatccagtgataaacggtagtagtagtagtacgacttctttttttcggtctctcatctccaataattatcatcatatacaattttatttcatttttgtttttctttttaactccattttagtttttcagatgcaacatgtattgtataacattaatttgtaatagtcagaataattagtttggaaattattcgattttttcttttttgtgtgattgaagaatattgttgagtagagtataaataatcttggtcattaatgttatatattatatatattaatgtaatattcttcttgctcgattctcaatatatatataccaaatacaaagtctcgaaatccaagaaaaaataggctggctagcataatccgcacgcgttaacaattaatttatagttagatcatcacataattaatttaagagcatggtacattattgttcaatactttcagtatatagaattttataattgattaataatattaatttgtaaattttattttctttaattatataaaattcaatacttataataataataagatgacaccgaaaataatattaaatactaataatattttttaataattctcttaaaacttaaacaagcgctgagaccaatgcactgtgtttttcgttctacttttcaaacatctcatattaatgacaggtatttaaatgtaaaaaactctaattatatttccagcagtattgtctaacactttttacagttaatactttgtgattagttaataaatttttttaaaaattattacagcacccaatacttataataatgataaattaaagggtattaactattaaacactgatattacgttttaccatttcttctcttacttaaattattggggttttcttcttctttctcaattttgttgttattattggatttcactcctcctctggcaagaaaaacttgtctttatttacaaggaagtcagatctcaagataatgaaatatcttttaatatctcttcttccaatttcgattatgaagattgaagatattatgagatactgttaaatgggttgactatatgatcgatatgcacgtataaatctcttttcagatatatatataatgtgaataggtaaatcgcttaattaaattggttttcttattgtaatgtttaacatttatatttattctatataaagtgtaactatataacagaatttttaagtttaacgatatttttttacatttttacattaacgtaaatattctttattaattttagggactattttatttttatactttaaaatagttttttttatttttttttttgcatttttatagaattttacataaaaaccttattgtagcgctgcaacttaaattgcaataaaaaatcgtatagaaaaccatattgtaacaacgctgcaaccactttagaaact

SEQ ID NO: 114774 - DNA, 1353 bp, Cannabis sativa
atatataagaaaatgtatatataaataatatttatttatagaaaaagagaatggatattagagagaagagaagagggggagtgggaagtggagggagcaccgcagattccgtggttccaggcttgcactccaatccaatccaattaatcatctcttccacaaatcgttgagccaaagtaatggccttttctctcttcctttcttccttccttgcttgcttgctttccttcacaccctcttaatctgcacccccctctttctctctctaactctcattctctttctctctctatacatataattagtatatatatacatgtgtgtatgaggctgtacttttgcagtatcttttcttgaacaatacgtgtagcttcactatagaactgtaactgacacgcgccttggaaagttctccaaccatcacaagaaagaacatgctatacatataatacacaaatatatatgtatctttccttattattattttatttttattcctttcccttattctatggcgttggcgtttttcaactccttgtgttttaggaaaccctcttgtcaaaattattatttgcatatttatataataaataaataaaattactaggctagtggctggaaatatatttattattaattataatgtgtatgtatggggtaatgatcagtaaattattatttaggagaatagtgaatattaatatataaaagtgattgtttagacaaaactagaatatattgacttcactatatattatcactcaactatttaattttaaataaaaagaatgacttaagacactaaaagtatttcgttaataccagtactaatttaaatataataatggttaatcataagtgtgtgaaagtactaatttaaatacaatattgatattttatggaattagtcagacaatataggtgacccatgtggaggctattttacaatttcagctacttaataccagtaccacacttaatcagacggcgctaaaattaatcacacacatatctatctgtatacctttatattccttaagcttacatcatatataatatgtatatacatacaataataataaaaagaagctcagataaatttcttgctaagaaagcaaagatgttgtgatgacatgtatgttgtttgtaataataaaataataatctaaaattagaaatgccgctagtgataataagtaagtaacaaaaagaggttttattttttttattaacttatgaattaaattatgagaagggtaagtgaaagtgaaggtagcacgatgataacgtgtacccattaagctgtaattaaatttagagattattagattagattagattagattaaattat

SEQ ID NO: 114775 - DNA, 2637 bp, Cannabis sativa
ttgtcatattttacaaatattagttattatttgtttagaaaattttttttaaccaaacgtaagcataaaaaatcaaattttcctttgataatatatgatcccacataaataaatgtaaaaatattgagatagaatcatagaactcataattcttagcagagtaggactaaaatttcctattatatatttttcttcctttgctcccaaaaataccgagatttctcattaaattttagttttaacatttatatcttttatttcctttcttatatatatccctttcatatattctttactaaagtttacaaatctctctaccattactatggaacttcctttggacatatttctatatgaaatattatgtagagcatcgctagaaacagtagcacgttgtagattggtttcgaaagaagtaaatgatgccacttatgaaagttatttcacacaactttttcataaaagaaccaacataacttcgggtattcatattctaagtcaaaagcgtagtaattactatactaactatatctccatacactcttccgcaaaattatcattgagaaaatttcttcctcctaatattcgaatcgaagcagccaccaaacaaggtcttctcctttgtattgatcgttcatgtcatatcattccgaaataccttgtttgtaagccaacaacccaacaatggcgaactattccgaaccccaagacccgatttttcactcaaaaaatcatgatgcttactataggatctaatcctcttcgatacaagattattagattctcttcacgtaattttggtggtgattctatcaaatataaatctaaaattcatcttgccttccgatgtgaagtttttgattctaaattttgggtttggaagcttttagaacaaacaataagtttgcctagtgattatgaagagtctattgactataggtcaatgatttgtatatcaagatatatatatgcttttactaccaagaagagattatttgtgtttgatatagagaatgaaaagtgggaatttgttactttggattttggtgaagcatgcattaatgctaactacaatgataatatcagttatcaacttgtggagtatggaggaaaattgggacttctttgtgtgtttaaagatgatgactttatgtaccacttattgcaactttggactataacaaagaaaagtggaacaccatggagttggagcttgcaaaaaaaagattgctttgaaatttttgaggaaccctattctactttagtcaaatttctcgacaatcatttggctatgacaatgggattttataaaatcatatttcatgattttatgatttccatctcaaagactaaaatggagataaatactatgttgaacaatcaattttttcaagttgaatctgattggcttcctgttagtttataattcaaatgtaagaagattttgtatttagttatcattatttttatttttatttactggtattagtttttgttgaaataattatttttttaattatgttttttcttgtaagattttcttcattatgtttattattaattaatatagtaaaattcgtgaattatttgcataaagaatggaagctatgtatgaaagtagtttttatgcaatttcatctatggagtttggcactggtatatgtcatggatattttttttctttcattctttcaaatgtatgaatgagttatatttttcatagtcagttatgaattacagtgatatgaaaaacctattacactttacttgacagtgtacttgtatttttaacagagagagtcttgtgataagtaacttgatgaccacgaaaaacaaacaatatacttcattgaacaatttgttggggaaggatttcaaacaaataattttaacgttatatgtttccaatattcatttattatccttttgccaaaaaaatcaaaaaaaactattttcttaaatggaaaaatgacaatttttcttggaagtaaatatacaaaacggattactagatttaattagtaatgaactataattataatattatttgagaaaatatacatacaaaattacaaatttaaatgggtatgcgttttttctttttgcagaacacggttacttttgggaaatgatcacttggaaaatagcaacatatttgacacatgcttgtatttattgaaaatatatgagcattgttattaggcaccagtagtgcctagtgtttttgcgacatgtcacgttgcgattagctagcgatactctttaaaagctattatattaaattatatgagacccaatacttagtcggaccaatagcgatattgacatatagaagggtgctaggcaccactggtcacgtttagcatttctcaaaatatattgatgatttaagttaagcctttcttcttcttcttcttttttgttgaaaattccagttaaacctttcaggtcacatacaatacaactgataccatcaatctccactaccaaaaatataaattatcattaaactacaagttcatagaacagtaactagtaggggtgggcatccgatccaatccaacctttttttcttcatccgatccaatccaattagtaattggatttgaaaaatcatcatccgatccaatccaatta

SEQ ID NO: 114776 - DNA, 1848 bp, Cannabis sativa
  modified_base (1532)..(1535): a, c, t, g, unknown or other
ataaataattttggcatttataagattgaattggaaaatatagtattattgaaaaaaagaataagtagttgaaataaagtgacatatttttgctcggaggttttctactaggtcaaagagttggctgaactatgccacgtgtaagggccacgccatctgtgcaaactttaggataacaagcttagttttaattcttgcagatttttttttgatgaatcagccatgaaattcattactccaaatcacttttgtacaagctaagagcaccttacaaagaggcctcaattctaactatttacaatgtattttaactagataattacttacaatgatccaaacaaaataatatcttttttgctgtattttttacggcatttacacatgaaattctagttctcactatttcttgagtttgttgcactaatctacacgggtttgctacttcagcttccagaattttccatttctattcgaccagatcatgtaaacgagggctggaatggcaacagagtatacatctttcttgaacctacttgtttttcatctctctatccatcttagaatgccttgcaaggaagaaattgctgcctttcaaccaacccattccttaatctgctgtaggcactgttgcaagaaagtgcattcaaagaacaagtgttgagttgtttcagcaactgaacaacagtacacaattcacatcatcagtaattttgaacttgtggagcctctcccttatttttagcttgtctaacattgctatccaattcaaaaaactatgctttggaacatttaatcgaccccatatttccttacttaaataacagttcccttgaacttgatttagtaatttatagcctactgcaatgttatatgaaactagtgagaattatatagaatctattcataccttgattctctctttgatttttacaattattatggattattacttagttacacttttatttataaaatcctttgattaacaaacattagcatagtgattagaaaccacgtaacgtaccatatatattagggagttacaagtggcttcgttggtcattgtgaaacttattttaactttggctgcaatccaagggtagcctttacatcaactagatgtaaataatgtatttctctatggagatttacatgacgaagtgtatatgactatccctaatgatacaaatcaatgttgtatgcaaactatgaaaatgtatttatggtctctaatcttttagaaaatggtgtgaaaaattctcaattgttttaattgaggaaggcttagttctgctactaatcactcactgtttatgagacaacaattttatcatctattgatttatgtaaatgatgttattttgaaaagtaataatttgaaagagttataagctctaaagataaggttagagattttataataatagaagaaaatcaagatattacaactctattacaatataatacaatgatcaacaaaaagattaaataaatgttacaacacataatatataatatatatacactatatnnnntatatataagaaaggtagaagagatgaaaagattatctaatattatataacagtacatatatataatatgaagaaatatatatatactcactcacaaccttgagtgtagattagtggggatcaccatgacttaaacaaggtattacacctttgtccgaaagcttatttcccctatctctctcatagaaatagttttgggaattatcaagccttttagggttttctaacaaagtgctttcttgatagaaaacttgatcatcaaaatgagcacctcagacctctttatatagtgtttaggatatcaccatttgaa

SEQ ID NO: 114777 - DNA, 2371 bp, Cannabis sativa
agtgttacctcggtcccccttttgttgtgtttcaggtacttcctccgtcggcaaggtatctgggtgcctcatcgggtttcggtctactatttcacttatagttgatcttcgatccacctattccttcccattcttccttctgtttccatcggcgctctctttacttgtttctttgttgtttactgttttcctaaacttaatctacagacgctccatcatctttttcatttttgtagtaagccttttctgttcagctaacttcgcatgagttgtctctaagtctttggtcactcgcaatagattttggtcatggtcatagtgatatccatccttgtaatacccatctctaacatagtcgtcatcctcaccttcttcatctcctccttcaaggttttggccatcattaaggctgtcaaacacgttctcagtatcctcccctcagttctcggcgtgaaccgtaccttcttctctgacgccacctgtttggaggtcagaggcatgggagtcagcctcttccgtaattgtgttcagtgtcgctttcttactggtattcttttgcttgttcaccatagctgaagtgagacaacaactaattggctttcttcagctctcaatgaaagcaccaaaatatttaacaagatgttctaaaacagattaataagagcttaaggaaatacaaaatattaaataatagataatcaaattttttacgtggttcaagtatttatggcccttagtcgatgagtaaatagtattagccttctttggcaactatttgagtattacaagtgtttacaatggcaatctctatattccttttgtttctctctaagaaagttctctaagaattttagcagaatttttgtaagtcaaaattgttctccccttttacataaaaaggggaggtatttataggcccataggtgagcgagggcataccctcttacctcactagggttccttacttagcacgcaaatgaggttgtgcaatactacaagaccatctgaccgttgatttggtaagtagctcttccatcatgcggtgcttaatggacgcaggttatcacgtgaggatatgggcacgtgtcgttcaaaggtttttcctttaaaagtaatatcccagacaagtcgttggataataagcattacagagacacgtacgcgcacaactatggtctaacgcagggaataagatctgacttggtgtcaaatgaggtgtaaccgtcaaatgtatctccaggttaggtcacaaggggcttcttggaagtgctactcaagacctcttgaaatacccaattcctaagagctccctgaaggcatgggctttgcatatgctttcgtgtaccgaaagcgtcaggttacagcttcaagaatcgattcttccttcacaacggatgcgctctcccagataccctgatcccatattaaaagaaaaaggagaattcgagatattccaatttgaattgatgtggcacccttttgctacttctgtgtagaacttatctgggaacaggaataacactcagtaaaaagttaaaaaaaataataactaaaaaataaatcaacctcacaacaatcttaaaacaaccaaaaataacctcatgacaactataatgcaactaaataaacaataaaacaaccaaaaaataatttattgtttttactaataggcatttttgtaaataaaaaaaattagggtaataaaaaaatttatgtattcacgtggtattgtagttttttttttcaaaattttagtctattttatagatatttattttatgaatctcactatgttattatatttttgtatggattcttaatatcattcaaacaatatgtgacagtgatgatattatatattggagcaattttttgattagagttcttaatattattcaagcaaattatatggcggtggtaatgtcattgaagcaattttttgtttggtctacttttaagttttgatgaatttgattgtattatggcattgagccatgctttatgatttagccttattacttaatatttcaattatttcactatttcttcttcatgatatctcattgtttagttgtgtgtatatttgagagtgaataggaaacttaattagatgaattatttctattattttttactccaattattatatcaatgaaatattcattcttcaaaaaattaataataataataataaataaatatgaaaaatgtatatatcctcactttaatcgctcattttagaattagttattggtttctttttattaggattggacttatattgggtttatttttattttgggctttgtttaggtttttaccactttgtgtaaataccactttttcccattttattggataatgagaaata

SEQ ID NO: 114778 - DNA, 5299 bp, Cannabis sativa
  modified_base (3916)..(3920): a, c, t, g, unknown or other
  modified_base (4045)..(4046): a, c, t, g, unknown or other
tctatagtcatgagacaataaagtattcgtctcaacaaatgttgctttccttaaacatgattatatgaaaggtcacaaaccacacagtcaagtggttatcgaggaaatcagaaataagcagatttttgaaccatcaacttcagtaccatcagttgaacgaccaacaatggtcaccactattcatgaaaaggaaactccagtacaccattgtagtgggtgggttttgagacagcctgtcagctatgaacatgaggcacatggcttgtctctgatatagacaaggatgatccattgacttacaaggaagcaacggaagaccctgaatcatacaagtggaacaatgccatggatcaagaaatggatcccatgtgcaccaagaaagtctgggaatatgaaatcccacctgaggatgttacacccatagggtgtaaatggattttcaagaagaagagaaatattgaagggaaggtagagacctttaaagctagcctcgtagccaaaggctacacacagcgagaaggtgtcgattatgatgaaattttctctcctgtggcaattcttaaatttattcacattcttctttccatagctaacacttatgattatgagatatagaaaatggacgtcaagactgcttttttaaatggcaatcttaatgaaaccatttatatagaacaaccagaaggatatgtgctacctaaggaatgtcaaaagatttacaagttgtttaaatccatttatggattgaagctagcctctacatcttggaatattactttaaataagactattacaaagtgtgactttgaacaaaacaaagacgaagtctgtgtatacaaatacattaaaggtaatatagtgttataccgagtttttttttttttatatattgatgacattttacttattggaaataatatagaaaggttagccaaaaaattctaaatgaaggattttgaagaaataaactatgttctcgacattaaaatctataaagatagaaagcagagaacattagcactttctcaaacaacttatatagataaggtgctagaaagattcttaatggagaattccaagaaaggacagctatcgtcctaacatgaaattactctatgcaatgattaatgtacaaagactcctcaagagatggaagacatgagaaagtatccttatgcatcagcagttgggagcttaatgtatgcaatgttgtgtacaaggcctgacatatgctatgttatagggattgttagtcgttaccaatcttatccaggtttggaacactggatagctgtaaagcacattctcacgtatcttgtatattgtaaagtagagttaaatactagtggatatactaattctaatttttaatcatacaaagatagtcaaaagtcaaaacctgggtcagtattcactcttagtggtggagctgtagtctggtgaagcattaagtaaactagtattgcaaattcaaccatggaaggcgaatatatagcagcttttgaagctactaaggaagcaattttgttgaagaaattctacactggtctagaagtagaagaaaatactagtgctctactgtgataatagtggagcggtggcaactccaaggaaccaataagccacaagagaggcaagcatattaagaggaaatgtcatctactaaaagatagagagagttgatgtgacaatcttaaagattgtattaaaatataacctgtcagatccattcacaaagatgctaccagcgaaatcttctatgggtaatataaataaaatgggattaagggagatgcccaattttcttttaggacaagtggaagattattatggtttatgtcatgaaaaacctgtaaaaatatttcaattaataaataagagttaaacattttttatatatatacataaatattaaattattaataatttatatattaataacaaaaaatttattattcggttgtgacttgtattgtatggagaattaagatcacttagccatgaataaaataatcagcaacatattaaagttatgaaatctttaatcaatagttgctagtgtgattcactaatgcctattattcagtgcaagtaatcttgattcagattactgtcgtagccctttagcaccttaagtactcccttgtactttaccattcaaaaccaaagaataagatgttcccctcacacacaccatgatccaagaaataaatttacagggaagacaaaaaactttcaagaaactcccaatcatctgtatcataagctttatttagatcaattttcagtaagcatctatgagagattgtcttccttatgtagcctttgagtaaatattgaaaaatcagaacattgtaagccaacactttattctttacaaaagcaccttagttactatgaattatggtaggaagtattgcatccattctcttgcataataacgtagagatgcatttataaattatattgcaacaagcaattggactatagtccattgctctagatagggtgctaactttagaaataagcatcaacaaagtattatttagttgatccaaactcatacttgaatgaaagaattgtgtgactggtttcgaaatttcatgtccaatgtccttccaaagctctttaaaaaagcgagactcaaacccatctggcttcaacctcttcattattggaatagagaacatatcttctttaatatctttctcaatgaaagatttgattcaaataagttgtttctctaaagaaaaatttgcaccctccttcataaaatggccctatagtattgagttagtcattctctttttatccatgaaacttctcaaatgagacataaaatattccacaactattgaatagtcatcaatattcatcaccatcaatgaatgatgctatcctatttgtcctccttttcttcaaacaagcatgaaaatatgctaaatttttgtctccaaacttctaccatgttaccttagatttttgctacaaataacttccatacattttagattggcttataaaatcttctctcacttgtttctcttgttgtagcagcaatctagaggttgggtctctttgcaaattctcatgattctcatgaattttagctcttgataactcatattgttgaaccacatcaccaacttggttcttgttgaacttttttttagaatagattccaacactctctccttgaattccttgtgctcacatcaaagattaaaaaacttgaaaaattggtaacccaagttccctattttcaagttttttatctaactcttgttcctattgttcctattggaaaaatatactttcaaattaggatgaagatccacccactcttcatttttgaatactctatctattctagaacagatatgtgccccttgattgttactccaagcatagtaagacccctttgaatttcatcaaccaaccctataatcctatccaagttgtggcatccatcaactcactagaactaattaccttctctccaattatgttataactcgaaaaccccacatactagttaaggtgaaactgacatggctaaattactccgacctctccacaataagtgcctttcttagtcatacgaattttacagtgcatatactgcttattttctgctaatacatccattgagacaaataccttaagcaaaaatttaaaatatttaaggtaataataatttatttgtttcagtgcaattttattaatattttcttaggatttcaattaatgaaataaaattaattttttttaaataaaaagattaatgaaattaagataataatatttattatttaagttattaactaataaaagttatttaaattcttgggaaattaccctatatactattattttaaaaaaaaattcaaaattacggtttgggtttctaaagtgnnnnnagcgctagttgcaataggggtatctatacaattttttattgaaatttaggttgtagcgctagttgcaatagggatttttatgtacaattacgtaaaaatgcaaaaaaaaaaaactgttttgaagnntaaaaataaaaaaacccctaaattctttttatcttgatttatgctgttaaagtctcacattattaatgtgtggacagataataccatatataagatgcatgagctacttcttttattgcccattaattttgagatggaactccatgcaccttaaccatacactcccaaattctaaaatggtatcaaagccaaactaaactctaacgagtatccgatccaaatccaaaaaacaaatctaaaaagacgaactaaaagagtcgtttgtgattcggggatagtgagccaaaaagagcttcttgtgatcgagccgtggaagatttgtgagcaaaaaaagcctctatcttgagaggatgttaaagtcccacattgctaatatgtggacagataacaccatatataagatgcatatgttactcatctcgttatgaattagtttaaagattgaatcacatgcaccttaactatacactctcaaaattctaacatatgattttatttttaagaaaagtaacattagaattagatatttttgtaattaaaatatgaacattaagacattataagacattatgttagtgtctttcttgaagggttttttatttatttaacaaactttcatattgaaaagaaaactcccattttcatcttgacctatatattaaacttactttattgaaagagaagtgataattataacctcttatacaatttcttagtaaatttctattcccaaaatcacatgccagaatattttttttcaaaaaaatatttatagtggtattcgttatagttacaatatcattcatgtaaatttttttaaaaaatctaaatagtttaccgtatcagaaatagaattcttgatattgtgtaaacctctttcacttgaaattgtttattaatattttcaaataatgtacattgacatttgaattcaaaaacatgaatttcaaaataaaagtttgtgaaagccccaagcccatgtaaggatgcacattaggctgtggtttgactgggttcgaatttttgggtatcaaccatcaggtgtaggaaataacattaggaaatttgaatatctatgcattaattgggggataattttttccctaattgaatacatatgaaaattgaaaatatgtgacaattttatctaaaacccaatactaccgctctcataactcagccccatctctctcttccccatctctctctcttcgtctatctctctctctctctctctctcaaccaaccgaacc

SEQ ID NO: 114779 - DNA, 3703 bp, Cannabis sativa
aatgaaaatcaagcgtaaaactgctccaaaagacaccaatagacgagatattgctaactttaaagacccgaaacataggttaattataacctaacacttagcaagcttgcactcactcacggcctaacccaaaaaacagagatccaaaaccaaaataaaccaagaaaatcgaaccactcaaactctcgaccaaacccatgaaaaatacttactcaagaacacaaacattcaaaactaaaactcaatttcaaaaccaagaaaaaacacaaaatgagttagggtataagaaatacaaaaagtgagaatattaaagaaggagtcaccaaagtttgatctcggagttaacccaatgttaccagctacttcttcgtcaagctacctcaaagcttgattttcattcatcatcaacaatttacaaactttgatttctctcctagtttctctcttttgttttctttacatgaacaacaaaactgagctacaagggctctctctttctctcttcaaatctcttgcggagggattttctcactacaaggctgatctaaaaactataactttgaaaaaagaagcttgtgttatgatctatctgagctttgttccttttataacattttatttttgatctgtgatgtccctttgtgacttgaaaagaagtccaacccgcaaataagaaggcttttactacttctaccaattcagcctatacatatatagaaaatattaccgagagtaaatgtaacctttaccatcaagagtacttctatactcatgttcttccatcgagacacataaccttccaaaaatttggccctttcaaaagattttctcctctaattgacatgaagagaagagctaatgccatgatgtttgagattgatgcatgggagagaaatgggtaatctctgttaagtactcaaaatcttcagaaggttggattgattatgtcttgccaacgagtgtatgcggacactgacatcgctaatgaatcttggacaatgtcactcgagccatatgatgaggatgcttgatgtgcaactgccatcttctctcagactgtgtcagaagaagtgaccttagtttcaagtaacacacagtattcaggaagaatatttatgttcttaaatcaagaggatggagaagttacctccactcaaactgctctagagaaggaaggggaatcaacaggtggttgatgctccatgatatgcagttagctttgctgtttcatttctcttttattgtactaacctcctatctttttttctttgtagataatatgagcttcctggcttctatgacatcttgttctaacttgaagaggaaagttttggtgctgaaggaaactaaacctctagtcatggaagtggttcagggcatccctgttatttctactgttttgaagaagaaggtcaggaagaggggtaaaactgttgatccccctcttcttggtcaagactctaaaaggaaaaggtgttgatgagagatctctgatcgacctctctccagatgaagctgagcatggtgctccaaactcagattcacgcttgatggagcagctgcatgagcagggctcctgacttctcactgatatcttcaggataatttttttgtcttgtctccttataacttaactttcttttgtttatcatcacttaatattgttctcttgtctttaggattgtgttggttatgcttacaccgtggataatgaacacaagaaggtggttgagcttgctaagaagctcgagactacaaaagatcgtgttgttgctgcagaagatcatgtgactactttgaaggggaagatcgattctctagagagtgagctgactagtcttcgagaatggctagtgttggcaaggctcgagagagtagcctaaagaagaacttggcagctgctcaaaagaagactttggatcttgaagagtcttctcgtcttgcactggatgaacaaacttcagtagctgctgatcttagagaccaagtcaaagtcttgaaggagattgtgactgctcttgaggatcatgctctttttgatgtcactttgtatgatggcttatgttcttatgccatctgtagagcttggtctgccaatagaggagcaaagtcattcagttgaaagggcttcccagacttagaggtgcccaagtttataaagcaatgtgatataaaaaaaaatgaaagtttgtaaatggttatgaaataaaaattatttatgttccattcaaaaaaaattatatatgtttgataaaggtgcttaaaattataaatattagatattaatagtttttaatgttgttaatgtcattgtagaaatggattagttaggatttttttaattattgaatgtaattaatatattcgaagtgttattaagaaaatgtggagcaattaattaaaagaaatcataaatattgacagctagttgaaaaaaaatcactaacaaacaaaaccacaaacaaacaaaataatttaaccaaattttaaaccaaaacctactcttttatagatagtaatagatgcttaaaagtattattgttactaagcacccaatttaacgtaatactcttattagtataattaagtatttatttttatataatttaaaaaaataatttttaaaaaatatcgctatatttcatataataaatataaaaaaaaatgtataagtttttttttttaacaaattcattaattaactactcaagtaattgacaaatttgaattctctcttaatcaaatatcgtacgaggtcttagtcaagaagttgattgtaaattgtaataatttttgtcaatgagagggtcaattaagcttaggacaatattaattaaaatgaaaattaattagaaacttggtcattttgttaaaaatgtagtggtccactggaatggatagtagctgtgagttgagatttgagaatagtaggccatgtagttgatccaaaaccaaactaccttgtatatatttaggactttgattattaaactaggtttagtcaaattatataagatccagctgagatttcgtgcaagaaatttacaaattttattacttatttaaatatatatatatatatttgtatattattattaggtttggttcaagataatgattttttttggattgtagggtcgaaaaagatgtcatctattatatatctaaggaccaattatagtatgagtgtcattttttcttctagattatctaagtatcttttgtttttgctaatatttgaaaaaagtaattttaagttaattttttaaatgattatgtgcatttttatgatattaaaatgatctaaataatatagttaagtacctatttaaataaaataagcacacatactaaaggcattgtttgggaaccattttgttttttgttttattaaattttacttaataaaatcttgtagtattttcatcgtttttgattaattaattaaaaaattaattttttaatggttaacgaacaatacctaaatgtttgaatcttagcattgtttattattaaaaaaaaaaattaaaaattgatagacttttaaaatgatatagagtggagcggaataattcatgaaaatatttggtaaaaggagtaaattcaatgatagatattaataactgtaataatttataatttgttagaaaaatgtactgttatttctttatatattaaaagtgtctatctaacggcatttctt

SEQ ID NO: 114780 - DNA, 6442 bp, Cannabis sativa
  modified_base (4865)..(4870): a, c, t, g, unknown or other
cctctcctcacgtttaggtgttgcacgtggcgtgaacgtaccttaatatgtactcgtctgcatgctttccttgtccctttgattcttcgtctaactactcgccaagtgttgttcatttcagttagggacttcgggagttgttgcaatgatcaaacgtaaggcatgcacactaagtggccctcgtagaatgcatgtcgagtgactcttggtgcattcataccaagtgactcttgttgcatgcatgccgagtggctcttagtgcatgcatgtaagcgaatctcgatgcaagcatgtcaagtgcctctcgatgcatgcatgtcgagtggcttttattgtatgcgtgctgagtggctcttgttgcatgcatatcgagcacttcttgttgcatgcatgttgagtgactcttggtgcatgcgtaccgagtgactcttggtgcatgcatgccgagtgaatcttgttgcatgcatgcatgtcgagtgactcttgttgcatgcatgccgaatgactcttgttgcatgcatgataagtgacgagtggcgttgtggccgagtggctgagaggccttatggcagagtggtcggccgagtggttattgttgcatgcatgctgagtgacccttagtgcattcatgctaagtggttcttgtttcatgcatggagagtgacccttgttgcatgcatgtcgagtggctcttactgcatgcatgctgagtgactcgtgactcttgttgcatgcatgctgagtgggtcgctcgtgagcatgtcaggtggccttgttatggctaactctagacgtgagattcattaatctcctagtcaatattgactgatcctgagggttagcaagtgctaatttttggggttaacacttgcccctagtctataagaattcttttaagtgttcttgtagactaagttcgatgagctttcctcccatctttctgtttcgtggctgcccctttaggtgtttatgccttgaggtcttttttctatgacccttaatgggagagtgttggctctagaagctatctctattccttttcatggtagatacttgtcatgtggagggaatgttagcctcttgagctttctcgacctcttttatgagctatcattttgtgtgggggagcgttttgccacttgggctttctcaacctcctctctagtgtaaccttttcatggagggagtattgactcttagagtagtctcgacttcttctcggttactcattggatgttagggagctttttgcttcttaggcaacactcaacctttttaggatttatgatttcattagggcatacacgttaagtgaccctagtagcatggtcgagtgactcttagcgcatgcatgccgagtgacccttattgcatgcatgctgagtgggtcttggtgcatgcatgccaagtgcctctcggtgcatgcatgtcgagcggctctcggtgcatgcatgccgagcgcttcttgttgcatgcatgctaagtgactcttggtgcttgcgtcccgagtcactcttggtgcatgcatgtctattgaatcttgttgcatgcatgtcaagtgactcttgttgcatgcatgtcgagtgactagtggccgcgtggctaagaggccttgtggctgagtggttgttgttgcatgcatgtcaaatgacccttggtgcatgcatgctaaatggctctttttgcatgcatgctgagtgattcttgatgcatgcacgtcgagtgactcttattgcattcatgccaagtgggttgctaatgagcatgtcgggtggccttgtcgtggctaactctgaaagtgagctttgttaatctccctagtagatcttgactaatcccaagggttagcgagtgctaatttttggagttaatagtgtcagtcaaactatcaaacaagtaaggtatgttcctgacttaaagagaaatcttttatcaattggcatgtttgataatcatggttacactcaaaattgacaatgatacactcaatatttcaaagggttctttgatctttgttaaggggaagttaagaaatgggttgtactatctagttggaaatgtagtgattggagatgcagctccagcagttggtaaggatgatgttggaaacatcaagactaggcatttgaggcttggacatgttagtgagagcttataaaaatggaaaaacaaggcttgtttcaaggtggactgaaagggaaattaaaattttgtgaagaatgtgtttatgggaagagttgtagagttgaattcaatacttgtgtgcatacaacgaaggagaggttggcctatatacactcagatctttgggggtccttccagagtcaaaactttgggtggtgctagctatttcatcagtaatatagatgattaatcaggaaaagtgtgggtgtttctgttgataagaaaagatgagcgttttaacacatttgtcacatggaagaaactgattgaatatcaggccaaatgcaagattaattaagaagttgagaacagacaacggtcgggaatattactcaaaccagtttgatgaatcttgcaaagagcatggaatagctaggcatttaactgtgtgaaacacacgtcagcaaaatagacttgttgagaggaagaatagaactctcatagagagtgaggtgcatgctcaaaggaacatgtcttgaacgatcattttagggagaagctgtaaaaacaacttgttattcggtgaatatatgtccatctgtcccattgaatttcaggactccacattgtggacaggtcaagtacctaagcttgaacacatgagagtgtttggatgcattgcctatgcacaaattaggcaggacaagagcactcaagtgcttgtttttaggctatcttgatggtgggaagggctataaattgtggtgtttagaacctggttacaagaagtgcattattagcagagatgtcgtcatcaatgaagaacaaatgatcatggtaaagaagacatatattacttcagctcaagaagtagggagtagcaaacctcagattgaggtggacttaatgtccaaatctgtaattgatgaaaccgaagacgatttagatgaatctacaaccatagaagatgctcaaacagccctgagaggctatcaattggctagtgacaaaaaaagaatggatcaccaaagcactagataagtatggatatgctgatttcacatcattttcactatcagtagttgaaaatcttgagagtgcagaacctaaaaaataacctagaagccataacaagaaaagatggtgcaaaatgactgcaagttattcaagaagatttacacaaaacctagattatagtcaagagaccatcaaacaagagacttataagatgtaaatggattttcaagtaaaaatatggaattgcaggagtggaaggaacaaggtacaaggcaaggttagttgcaaaaggatttatacaaaaggagggcattggctacaacgatattttttcactagtggttaagcaaacatcgataagagtaattctttccttagctacagaatttgatcttgaggtggatcaaatggatgtaagaaattcattcatgcgaattcggaagaaaagatctacatggagactctagaaggctatgagtatgatgatccatataatgtttaccttttaaataagtctctgtatggtttgaagcagactccaagacaatagaacctgaggttggatgaattcatgatgaaagttggctaaagtaattatgacacttgtgtgtatttcaataatcatattttcctcttattgtatgttgatgacatactaattgttggtaaagatagaacaaacattgataagtttaagtctcaacttaagagtgagtttgagatgaatgatctaggtgaggctaagaatatgttggggattgagataaagtgggacataccccgtacaatcatgttaagccaaggcagcaacctcaataaggtaatggagacatttgtcatgactgatgttaaactagttgaaactcctctagctcagccctttaaattgtttgaagagcaatcccccaagactgagacaaattgaagaaagatggacaatgttatgttgctaatctagacactagaagatccttaacaggatatctgtttatagtgtttagagattgtgtgagctaaaaatctaaccttcaaaaatttgttcctctatcatcaactgaaattgaatatggcagcaacaaaggccataaaggaagtcatttggcttaaaggattcacaaatgtacttgatattaagatagatgagctgattgttcattgtgacaatcaaagtactattcaccttatgaagaatctcatgtttcatgaacggttaaagcacatagacatcaagctacattttataagagatatcattagtagtaaagatatttcagtctataagcttcacaccaatgagaaactgactaatatgttcaccaagagtgtaacaagagaaagtttaagcatttgcctaaactttctgaatattgaagagcactaaaagtcctctattttttagaggcacaacaggtggaacagtcaaagttttaaaagaatataatgatatattttaccacgtgactaaaataggtggaatttgtgggagaatttagtaactaggtgtactgtcatctagtgacctgttagatggaataggtttgtctagtcagctcctaagttagtttttttaattaaagtacccctcatattgagttacctatataaggttttgtgtactacttctttaggcgatgatatagagaggaatttggatgataattatgcttgtaatgagtgaggggattgtaaaagtggatgtgtgtgtttgatcacatctctctcannnnnnttgatttgtaaggtgcaagacaccattattgatgagattaactttgtattctcctctgtattcctctattattgaagatcgaataaagctcagccaaagggcatctcttcccagggattagtcaccataaaaagggtaatgaacctcgttagatcttgtttctatttcatttagtttattttgtaattatttctagttaatgtcattattgggattctagttcttcagttcttgttttatttgatttttgataggtgttaattgaccataatataagtaaaattttaatggtgattgtcatatatacatacatattttaagtaaaattaataacataaaatctaattacttattcaaattaaataaaaatactaattagttcaattgaatgttggattttattgaatttttgaacagctcatctaacatccgatccattaatccgatcaatatctaatgtttgactattagctgtaatttgattgggtcgatttatgaacacccctagatgcataaagcctctgtaagcttctactgggtactatatgtattaatggctaataggaatatttattatcaattataagtaatatttaaaagacaataaaaattatattagaaaaagatggatgagatgatcagacctttcaattgctttggtaagaagctcaagctcatcaattgtaccatatgcatcataaatatcatcaatgattgaggcgaaggcaatgactttggctaaaagttttcttgctcgagagtatttcggctcaaaatatacacccaatatccaaaaatacaattccaccattctatcccttgcaaaagggaatttgtttgcaaagtcatgttctttccaccacctaatatattaattaagaacaatttaagttaataacaaccgatatacaaataaaagagatccatctttggagtgtttcatcaaaccgcctgtaccgtataaaaaatgcgatttgaaatcctttgcggtgcagttgtaatttgtatttttgtcaaaccgcatggtacggtgcggtttgcagttttaaatttaataattgtggttcaaaccgtatatatattacaaagttacaaatttttataatatgatctctatttttttctttcatataaggacacatatatataatatatgagtatattacattattttttagagacaatttaatataatgacttaatgattagtatatatgttatgatattaaaattctaataagattttttttatattgttaaaaatttattagattaatttttaaatttttaaattctaattagtcttttttttttaatcaattgaattaaaatatactaatataacaaaaattaaacaaatatatatatatatatatataaatacctcataatttcactaagttcctttttgtggaaacattgaagtagattgaaatctaactttgcaagctccagcaatattttgttatgagaggcatccttttcatagattgagatgtaaaacctagcatgaagcctctctatggtctttcttagaggcctatgcaaggctatggatatttgatgtgataa

SEQ ID NO: 114781 - DNA, 2881 bp, Cannabis sativa
ttgtcatttaacaaaacacagggtccaattggtaacttttgtaaaacagaaggtccaaaatagtatttacccaattaataatcacgaatgtaacaaaatcttttaaacattgtcatctacgtcgtgatagaatatttattataattataatgtaatagacaatcacatgaaaaaaataattataatttcttgaaacctcaacctactacaatcttgtcatatatatatatataagccctgtacgctgatgttagtggggttgacactaatttttgtttgcaccacttttcatacttttgcttttctttccaagtgtttttgcatttatagccaatggaaaatatactatttttatttttatttttgtcagaaacactatatcatagagaatgaaaagctaatattacaataagccaaggtggattgagaaaacctccaaccaacccaatatacatatacatccactattgaatccatccaaaagaagaaaaaaagtttgctaacatggtttggtgtcttaccaatagtgtttgttggtgtacatgtactgttcatggtataatttcttttcaacaatgaactacaatgtgtaaattagtatagcattatttggagtattatgtcccaattgacaattggagttgtcttgtattcattgatagtattgggcttaatttattactcattttaatctgggtttataatttcttactcagtcgacttaataagctaatgtgtatatatgggctcttctcaccagccatttatggggtaagagtagaggctaaaaatatgtgttgagttacaaacttacaaccatagttaggtcaaaaatcttaaattagctattctaattttaatttttacatagtagtataggcaaactgaaccagttaatgcgttgttctacttcaatacatgattaacagctgaagcttcatttataggaacatggggctgattagtgatgaacatgggaatgggaatagactgaaaactatctcaaccatcaccattcacaagtatatatagttttcttaatttgttaccaaacaattcagaataaccaagttcaaatccaattaaatactttaattgattgaaactgaagtaattagataaatgttatatttggtgtaattttatttagaaaaataaataaataatatataaaccttaaagttttcagttcaaaaatatttacaaaaaccctcttttcttttttttttttggaaaagttgaaaataatgtatttaatcgtccttatataccaaccatcatgtataactgttacaagcttttaagaatgatttattgactttaattcaatggcattttgctacaacattactcatgaaatcgttgactataattattatataatctatctcttttttgttttaatatatagtttagtgtattaattgcatatatcagttattgattaccaaagcttcatatatataaagcaaaagcccgatcaccacatcaacgacctattaatattattcttaacattgcgttaaaggaaaattctcattacagcttttcttaatatgtacgaactgaaaagtataatatataaatatatttatatatattgtccatatgccatgtttctagatttaattattaacaatacgtgtacattatgtacataaattatatctcgtaaccgacgatgaagctcaaaccacgaaactgatcataattgaggtcaatattgtgatactaatcgtatcgaacattatttattatcatatatatgtaccactaccatatttctacacaattattctttcttttaaatatatgtatttataaaaaagaaaaagaaacactctatatacttcgacttcaaaactaaatataaattttgcataaaattaatttttttatggagttttaaatttctttagtaatgaaaaggattgcaaactattcgacctaaaaatcaatcaaagttcatttagtttgacttaggcatagattaaatttatacatatatataaattaaattatttgagtacatgttaataaaagttcaagtgtaaaaattcaacatataaattatatgtattttttaatgcatggaacaaataacatgttaatacacacaggtttgtttgtgtactcacttttctaatacacatatgttaatacaccactataaaatattttaataatcttttaaaatatttattaaaataaaataagtaacatcacaaatatactaaacactataattgtcatttaacaaatctcaatagtaaataataatcataataataaagaaagaaagaaaaagggtgaaaagaaaagaagtaagagtaagtttttccgtgaatgtgaggtgagaaagggtagaattaggagattatattattagtctacattcattcacttgtattctcctccaatcaaaatatgccattaatttattcacacaatccacacactgctcagtccgtgtctcatgatgtgttcagatgtgacgtagttcaaaaaataaataataaaaataactgtaactgtaaactttttctcccattttctggtctatatatctgccctaaattaaaaacataaatatttacgtaaatattattttacatttttttaaaaaaagatatgttattataaattatatagagtcgtttaccacatcagaaaggatagccaagggagattcctcaagtcaaatataattattatcctccgctaaaatatgtttcgatcgctaaaccatgagcaacataattagcatctcgtctaatatgactgttgagaaaaatgcacaaaccagtgactagtaaacaccagtaaccagtaaccatttcctctgttttctctactagccgttgtggtcctactctgcctc

SEQ ID NO: 114782 - DNA, 2693 bp, Cannabis sativa
  modified_base (482)..(489): a, c, t, g, unknown or other
  modified_base (2635)..(2662): a, c, t, g, unknown or other
ggcatgcaaaagccatgccgcggcacctgggttcaaaacccagaaaccagcaagcattttcacgaatttcaacatccaaactcaaccaaatcatgccaaaaaccaaccaaaacttaaagtcaaacaatagattttctaataatcatatagggagtttagagtacattttcaagcattaaaatctaacaataaaccccatatttaatattatcaccaataaataaaatgccaacattcaatcccaaattatatttgggcccaaacccagtttggcccgaaataccctgttgtgactataccgcgccaacctgtctgaacacacctaaaatggataacacaggcacactatataataatatagctccataagcacacaaataaattaatttcactattttacccttctcgggtcacaattactaaaatgcccctagctccccaacggggtcttaacatggcataaatcatataaattctcatannnnnnnntatataataatataatttctcaaaaatacataattatctaattagggtttcgctaatccattttataatcctagggtgttacaacttcactctttttctcaagttaataaaacaaaaaagggagtaggttattaccattttcacggggccgaacctctaaaaaaatctggtgctctttctaccttgttgttttttgatttctattatttattttatctaattattttattgtaattcactgtcgttggctagaatcgaggtcaacaaagctcaagattgagcttgaaggaagaagacgatgaagtcctctctgctagggttttggggttgaatcaaaagtgttttggattttcgtatctgttgagacagttttttgttatttcggttagcttttctttttcggttgtaagttgaggttctcctttttaaaggcttacctccactgctatttaataaattcattccaatatttttcttcaataaaaaagattcttctttttcttaatatggtatcagagcaagaaagataagctttcctgtccgatccttcagcaagttgtgtcttcttctccagtgaagctttgtttttctcaatcaccttctccgactgctcttctctctttactgtgtccattgagaccttccaatggctacagacaatgatcaaaccagagtgcctactgccattacagatccttacaatccttctgttcaagctaatcaaggccttcaaatcgcatcaaccaagaatccactagaagatcctgcaagtccgtactttcttcatcatggagataatcgtgagaatgcattggtgtctcagcctctcacaggacaagataattacgcctcttagaccagagcaatgcagctcgtgatctctctgaaaagaacaaaattggatttctcgacggttccattactaaactctctatttctgatcaaaatatataatgcttggaatcgcaacaataatattgttatttcttggatcttaaattctgtttcaaaagaaatttcatctagtattctttatgatgaatgtgcttctacaatttagaacgatttaaagattcgattccaccagaaaaatgaccctcttatatacaattcaaggaaagatcttatgaatcttaaataagaaaaccaaaccataagcatgtattttactagagtgaaaactatatgtgaagaactaaccaattacaagccttcatgcacatgtaacggatgtacatgtggaggagtcaagaaactccaagatcatcatcacatagagtacattatatccttcttgatgggactcttagattcttactcacaagttcgtggaagcattcttcttatggaccctttactagaagtaaacagagtgtttcatcttgttactcaagaataacatcaaagaggtactgcttccaattccaacaatcctaactctgctatggccttttcttttcaaggtgacaaaagaaggaaccaaaagtatgacaatcaagcaacaaaatcacacaccctccaaggagaaacaaacctttttgcactcattgcaacattcttaaacatacaataaataaatgctacaaaatctatggctatcctcttggatttaataagtaaaaaaagtctaaagatgatgcagcaaatcaagttcaaactagtgagaaaagcaatcctcaactgtcaacggctcaatatcaacaactactgaatttacttacctcacaacaaaatggtatgaatgcccctgatcctagtacctctatagataacacaagtatcatcttgtcacataattctacacttcccctgcataattcttggattattgacactggagcaacaagacacatatgttctaatgtcaatctttttcaatgtatatgtaagataccttcaactaaactcatactccctaacaatcattgtttaatcgttaatgaaagaggaaaatttagtttaaagaatgacattgttctaaccaatgttttgtatgctcctactttcaaatacaacattgtatctgtcagctatctcactaacagtgcacctatctctatgtatttcacttctaattgattcactatgcagaacaatgtcagtaagaagacaattggaagaggtaattgttggaattattttaccnnnnnnnnnnnnnnnnnnnnnnnnnnnnttattaacatcctaaataagaactttctaaa

SEQ ID NO: 114783 - DNA, 3687 bp, Cannabis sativa
tttcttctaacttatgcttactttaatacagagaggttgataatatcaagaagcctttcactcctcctagagaggtccatgttcaagtaacacattccatgccacctcagaagattgagatctttaagtcattggaagattgggctgatcagaaccttttggttcaccttaagccagttgagaagtgctggcaacctcaggattttctccctgaaccgtcatctgatggatttcatgagcaggtgatggaacttagggagagggctagggagcttcctgatgattactttgttgttctggttggtgatatgatcacagaagaagcactcccaacttatcaaactatgcttaatacattggatggagttagggatgaaactggtgccagcccaacttcttgggctatttggactagagcatggactgctgaagagaacaggcatggtgacctcctgaacaagtatctctacctcagtggacgagtcgatatgaggcaaattgagaagaccattcagtatctgatcggttctggaatggttggtacctttgttctttattttctctattgttaagcctataaaaatgttcaaagggcctgtcttttacttggactgatgtctctttgttttcaggatccccggacagagaacaatccttatcttggtttcatctacacttcattccaagaaagagccacctttatctcacacggtaacactgccaggctagcaaaggagcatggggacttgaaattggcacaaatatgtggtaccatagctgcagacgagaagcgccacgagacagcctacactaagatagttgagaagctatttgagattgatcctgatgggactgttttagcatttgctgacatgatgaggaagaagatagccatgccagcacacttgatgtatgatggccgagatgacaatcttttcgataacttttctgctgttgcacaacggcttggagtgtacacggccaaggattatgcggacatattggagttcttggttgggaggtggaaggtggagaagctaagtggactttccggggaggggcttaaggctcaggagtatgtttgcgggttacctccaagaatcagaaggctggaggaaagagctcaaggaagggtgaaacaagctaggagtgtacccttcagttgggtatatgatagacaagtgagtctctaagttagtaggacactatggttgattcaagggaaagtgaagtgagctattgttactattattaggttctttttctatttgtagatagagcagcagttggtttgggcagttggtaatgtttttttgtttttgttttttccttcttttctttttgttgtcatgaatgaatggaatgaaatggaatatgggggtaatctttggactgatcttttctattaaatagttttgtgctatgtaagaaaataatgatcattttgttttatggcaattttgatgatgaccaacttgatttttatcctattatcataccactttgtgcatctttcttcttttttcttttttcacttacagtaatgccattagtttcttaatcaagtcttgtgaagtgacattttttatgattatatttgtagtctgtatttgtacaaaaaaaaaaaatcagtttcttaatcaagtctatgaagtgatattttcttaaataaattggtatattccatctcatactaaatactaataacactaaagtgaggtcatttatactgttcaaaaattatttctctattttcaattcatttacgtcaatcttgttaaagaatttaagctttaatacagcttgttcagtagagtaaatgttatttttttttttaattattaaagagttcatttttactttttgctctagacttagaacgagttcctttactaaaatgtccattcttgatacttgatttcttaggcattagtaagttaagatctgataaaaaaaatatatatataatcacattataatttagactgtctcatcaaaaataaaaataaaaaacttgtttttccacattttccatttcgaaaatcaaggtctttcgtacataaaaacttcataattattcactaaaatatatcttaaatttctgattacccagatcttcaagcacccaaccacagacctcaaaaccatctttctcactcaagagatactgaaaatgatagctttaaagataagcaatttaccaatttttaataattatttcaagaaatgaaaacccattggaataaaagtagaaaaaaagagtagttctaattttaaaggagaaattgaagattaagtagattgaaatgtagcgacttgttcgaggccataatcaaaactgaattaatttgataggcacggagaatcgcatactgagtttgatatcgccaaccttcaatgcaaactgcgccatcttattattattcgacgcttttgctctgcaaattggctttttctatttttattttcatatgtaaatgttaatacgaaaaccctagaaacaatagaagaatgtaaaggaatgaagaagaagggtttaaggtgcttatttatagcacttgttggatgaaaccctaccttctatgatactggcccaggcccatctaaaaacctcaacttaggtttgggccttcaacgctgtgcttgggcttttgtactacaatgtaaataagttgtcatgatttaatattgattttgggataggaattttcagaaaaatgaaatctaaagattgaactttcaaagttgggatgatgtttcgttgtagtaggaaatgttagataattcacattttgacttagcttttataagcaaaatagaaagcttaggcaaacaagaccaaatagaatgtttagtataacttttgaactacaaatttctatatatgtatgtatatattaatgcatagcacttgaactattctattgtaggagtagtaggacatgaaagagatgctgagaagtcaaagtactacgtcgatttcaataatagctcaaacacttgaactattctaatgtagactatcattaatcaaccgaagtattcatgtcacattaatattccattatacaccacaaaactcaattatccaaaaacaaagataatgtttacttggatggattttgcaatttttatcattgaaaaaaaaagagtgataaatacaattttttagctaataatcacaccgagaatatatgctagaatatataaatatatattttaatttattattatttatagttttttttttttttttttgaaagaaagggagcccgctaagaagacaggaaatcaatgatattacaggggtcatctccaatctaaatggctacttcatctaaccctagagtccggtgagctagcttatcagccagtgtgttagcctcgcgattgatatgagagagccgagcagcagggaactgagataaagtattcttgatttgtttaataatgtcaccaaaaaccgagatatcttctttatggctagacagagcatcagtaatggctttgcaatctgtttccacctaatggactaaaaagtgctcgttgatacaccactgaagcacggagaggagggattttgcttccaaggttgggaccgagccttctcctgagtgcggttgggcaatggcagcaactaccagaccatcgctgtttctaatgatacctccgaagcccgctttccgg

SEQ ID NO: 114784 - DNA, 1846 bp, Cannabis sativa
tgaaaatattattatttgtcaaaaatatgtaacatttctttgaaaagtataaatctagatattttaattaattcttgtaactccaataaaattaaaatatttttaatgtgtgtaaatgagagagttacacatcttaatcttgaatttgctgagttataaaattggagatattttgtgtaagaatattagacatacaagatgaagcatatatgattgatatgaaatgccaaataatatcaaaaattgaacatatacacgtatgaataaataaattgaaatatttcccgtcattgatcctttcaagttcaatctcacatgagctttagatgtacaaaagaaaataaaacttagttagtgtggatattcgagtttctaagctctctctaactttcttagatatagatttattatttttcacaaaatgagtagtgagtttggggactagtaccctatatttatatgtgggatatactctatcaatatatcttcaacaattccgaggcctaaatgaaactctttagccatactcaaaacaacttaattcaaatagtatttacaacaacaatattttttgaactataaattataatacttaatcaatacaccctaatcacaatcaattctaaatagttattttccaagggttatagaataatatcctttacaatcaaataaatttaaaatcataaccattagaaacaaattatgcgacaagggcttgaaataaacactattatataatattcaaagtgatacttcaaaggttaatcacttattaagaattcacatatattaataattttaaacatacacagactaagagagagtgcaaaactcatatgcttagttttaatacttataacctgttacacatagtacaataatgacatgaaagtcatttcatttgaataaattccaatattttaaaataaaataaaacaaaaagcattcttagaatttagacataaaacacagcatagacaacaattaaacacataataattaagacacataaaacttgattaggtagactttttttagattaaccaaaatgtcactaaggagaatgctaatccaatattgcttttttattaagcaatattggtcaaatctacctagatagttgctctactatagctgaaaaagatagatttttcaagccacagaaagtaagagaaagctccacatatgacaagagtatgttaatgatctattatcacttacttattattaatagtttctcacataattttggttataaataactaatgtgcctaattttcattggcagcagaaatatatacaatgagataagagtacagaagagaggattcagaagcaactaaagtttattaaatagtgttttcacttactaattttgatatagattttttcttaatatatgaaatttttgaagacaagtgtacttaatttgtattctacagattttaagtgttcttgtataattactattatatgaaaaattactacagtgcaaatgtattcaataatttcaatcagtttttcctatatttggaaaaaaaaaatacaaattgaggaaaataagtaaacatacacagattaagagagaaagtttgagaaagttttgctcagccttattcagtctgcatttactctaacttatttcaaaatgccaagtaatatagatgtttcggccataaataaagtcctcccagttcagcaatagatcaatattatgtgtaatagtgttaggtttataaaatatattatatttcccttgttcttttgggatttagctaagataaaagttcttactgttttgtgtgatgaatgttagacttttatttgggcttacattaaattt

SEQ ID NO: 114785 - DNA, 2636 bp, Cannabis sativa
ttattaccttattaattttttttagttcccatcaatgggtattacccattaataagtgttccatatatatatatataaaattttaaatttcttaaataatcttaacatggaatgagaaaaactgcgaatgagaaaatctgggcgggaaagagtcgaatcgataattaaaaaaactttgataattttgagcttcttattattaattaagatatgaaaaagaatgcatcgtcgtctctgcccaatgtttttccccatctccactccattactgttaccagttccgccgcccaactccgacgaccacatccacaagacccatccctcgataacacgttgaaatccattaaatacgatcaaccatgtatcaaaacgccatcgcttccacgcactgatgaaaccccaagagagcgcttgatttccatcattaaatcatgctcttccaggacccttttgctccaaatccatgctcacataatccgtacgtttatcgttcgagatcacgccgtttctctggagttcttggctcgctctgctctctcgccctttcgtgatttgcactactctcgccttgttttttctgagatttcgagaccgtctgttcttcactataatgttatgatcagggcctactccacgagtgactcgcccgaggatggattttatatgtataaagatatgagaaggcgagacccattgtcatcgtcctttgctctgaagtcttgtattagaatttcgtcgatttcgggtgggatacagatacacgcgaggattttgagagatgggcttcaattagatagccttttgctaacaactttgatggacttgtattctagctctgggaaattttgtgaagcgcttaaagtgttcgatgaaatgcctcacagagatacagttgcttggaatgtattgatttcttgctatttgcgtaacaaacggacccgggatggtttggctttgtttgatgctatgcagagtgaagaatatggctgtgatccggatgaggttacttgtttgcttatgctccaagcctgcgccaacttgaatgcactggagtttggtgaacgtgtgcatgcatacatagaagaacatggttacgatcgtactaatttgaggaattcccttgtatcaatgtattcaaaatgtggatgtctggaaaaggcttatgaagttttcaagggaatacgtaataaaaacgtggtttcatggagtgccatgatttcaggttttgcagtaaatggatatggaaaagaagctatagatgcatttgaagagatgctgaggatgcgtgttccacctgatcctcagacctttactggtgttctatctgcttgtagtcattgcgggtttgttgatgaaggaatgatgttttttgatcaaatgagcaaagagtttgggatatcacctaacatccgtcactatggctgcttggttgatctattaggccgtgctggtctgcttgataaggcatatgagattataatgtcaatggatattaagccggatccagaaatatggaggaccttacttggggcttgtagaattcatggccatgttaaccttggcgaacgagttgttggccatctgattgaacttaaggctgaagaagctggagattatgttctgttattgaatatttattcttcagctgaaaagtgggacaaggtagcagaagtgaggaagtttctgaaagataaagcaatacaaacaacaccaggatgtagcacaattgaagtgaaagggaagttacatgaatttgtagccgacgatgtcttgcatccacaaaagggcaaaatctatgatatgctggatgagatcaacagtcagctgaagattgctggttatgcagttgagatatcgtccgaattgcataatctgggagaaaaagaaaaacaatgtgccctcacttatcacagtgaaaaattagccattgcttttgggattctctcaactccacctggaacaacgattagggtggcaaaaaatctacgaacttgtgttgattgccacaactttgcaaagattctctcaggcgtttataacagagaggtgattatcagagaccgcacacggtttcaccattttcgagacgggcaatgctcttgcaatgactattggtaggaacattcaaagctagaagataacactgaaaagtggaaacgctgtatccaaatgaatttgagtagctgaattcagttggttggctctctaaatcaaggccaagaagacgttaagtatgcacatcataacagagtagtcatcaacaattactttttggtacttgatagcattctactgttgggtttcagatgagaggagttaattctttgaaggtgattccaatctgcatcctggtctaaatcttaaagagtaatgactagtttaactgtacccatcaaagaatttctctacaatcaaggtcgctgatttggtattgggttctacagttttggtgatttatttggttgaatccagccctgctaaccaaatgtttgaaatgagatataatatttgatttgtttagagagattttttttgggaaatttgattttctatacttagaaaatcaaaaaatttgatttctaaaccaataatttaaaccctaaaaaaactatacattttttttcaaaaccccaaaa

SEQ ID NO: 114786 - DNA, 1506 bp, Cannabis sativa
tgttttcttttctttatttgtagatataatatacatatatattattattattattattgtaagctatattgtttggacaggtggattaccgttgatacctaatttattttagttaaaatgtttgttaatcagaagaaggaaggaaacttcgagctaatagtagaatgatgataaaggagaattattagtactatggttgaaaatgaaattcaagtttaatttgggttagtgacttataacttcttcctaaccaatctcccacgtgttgattgatatattctactctcttactttaatttgaaatgggtgtgttcgtatatacatgtaatattcaaactaagtttttttacttcgtattagtattcataatttatcaaattgtctacaacaatggctttttttctagtgaagaagaatgtatatacgatgatgtttggcatgtattcgttctagaacttttttaaaaagatatatttcctttcgagtttttttttattattatttttgtgtttgtgtgttaggaataggaagcacacattcacaacatttttaggcattatatatccgaataaaattatgagaaatagaaaaggaagaaaaaaaattgttgaactcatatcatgaacaaaaaaacatttatcaatcgtagaaactgatattttagaaatactatgtactgaatttgcttatcatttaatcataaaattggcatctcccttacaactttccggagatacataatcatttaaatttttttcattaagatcatacactaaaaatacatattaaaaaaaatagaggatgaagaatagtttttagaaaacaatgtcactgttaaaaataataataccataatgtttagatgcacatatcattactaatttgctaacatagttgtttagatatgtgagatataatttctaatgtcattgtcatattagctttttgggattaataagctaaaagcctaaaattatattatcggagcaaaagtctatgtttacctctacatttcaaaatgttaatgattttgattatatacaatgttttagcctttattatttacttaatagtcaaaactaaaataaaagatttgaaacttaaaagatttaaaacctaagtactacaaaatcgatcataaatcacaattcacaactttattatggtagcatagtaaaaaaaaattaatcagttttttatttttaaaataaaaatagtaaaaatattttttaaaattatattcttgtattcactttttacttttttaattaaaagttaaaattttgaaaacacaaagaaagtcacttttgatatttttttgatcagttttttttttctaaatcaatattttgaattccgactaaacccggactggtcccaaactcggccccagcgcaccgaacccgacccctgattcggacttagcaccaaacttagacccgacttaaataaaatcaaataataaattttgtgaaacatgttataaatattaataattatgtggat

SEQ ID NO: 114787 - DNA, 2076 bp, Cannabis sativa
taatcaatctcttattttagtccttgtattattttataatagagttgtaataaatcttgattttcttccattgttataaaatctctaacatcttccattcaacataagcgtgtaagatgtaccacataagaaagccaaaacccaattgatgaacttttggggaaaacacaaaccttttagaagattggccacaaaattccaatccacattatcataagccttgcttaaatctacttttattagacatctagcggagctactcaatcttgtataacctttaaggagatcttggaagaggagagtgttgtggaccaagactctatttttgatgcaagaacatcgttactatggatcaagttggaaaaaacttcactcaatcgagataacatcattttttaaatacatttttacaaggtgttacttcagactatgggtctatagtccaccgctaaggaaagggtatcgatcttaggtatcaaagcaataatagttatattcaaatcattaggaatctttccctctttgaaaaaccccaagatagcattagaaatctcatctccaatctcaaaccaaaggcctttaaaaaattagctccatcattcggactcagactcttactagaatggatactaaaaagagcatcacagacatcctttttagagaagggcattgtcaacagaagttgttgccggacattgagaacttttccaagccaagcagtcactattaatagttcgagtgtctgaactttttcttcccaagaagttcctgaaatgacacacaaaatgttgaatgacttgatcgtaagagtcgaagagctgcccatcttccatataggatgtgatttgttctgatttttcttttcttgatactagcatgaaaaaaactagagttttcatcaccaaatttgagccaagtgattttgctagtttgttgtaagaagctagcatatctttttttggctattaaaaaacaagtttgggcctacttttctgcaacctggagatcagtattaagagtattagccactagatttgattgagccttaattaccaattctttagcaatttgaaacttcttaggaatatcccccggttcccttctattaaaactctttaaacagtgtttgaccccattcaatttaccaatgatacatctcaaccctctcctatttatctgcctattccagttctaaagagcagaggctttgtactgagggtgctccaatcagtaattaaagaattgaaatggcttgatacctatattcctaattttcacttatttcacaatacaataacaaaatgatctaaaaaacttcccaattcattactgattcagtatccaaaaagacatccaaccagttttcatttttaaaaacacaattgagtttagaaaaaattctattttctagtttatgtttattggactaagtaaataaagatctcgaacatttcaaatcatcgacctgccccctgccaacaaacattgagcatcctctatgtcattcagggacacaatcttgccccctattctatcttcaacataaaatgtagcattaaagtctccaagcacaagcttggtagaagggctacatgcctaattggccttaaatttactccaatattccttggtcggacccatgtaatcacattcttcaacctctactgtacacgatttaccacctgtttacaattatgtttctgtctatagagttgattctaggtcagactgagaatcgtgtaatacctcagattgcagagcttccttgactggctagatcgaaggaagctcaactgaattaacatggacgatgatcctaatgtcaagcttctgagattctattttcttccgccccatggagagagagagagagggtcttgcacgcttctttaatatcttaataacatgagtatattattacatgagcaataataagtttaattgtgatttttcttttttgaaaatagatattattaatcattagcaacaaacatcctcatcaacttgatgagcaatacaataagaaaagggattatttcacaaaaacataaaaacaacaaaaaatttacaaaaata

SEQ ID NO: 114788 - DNA, 3976 bp, Cannabis sativa
atacaactaattatataactaaaatacaaattatgtaaaaaataattaaatatataactaagtatacgtacgtaacatttatctagtatatatatatctatatatatgatatgaatgatttgttgtgttacctgttctggacaaggttccatttgatcacaatagtattgatctatgatgatggggttggtgacattgtgcatttctatgttttgaaatattatgttttctccataaccagaaccaccctatgcatatacaaatatacaatatcatatcatatatcatatatataattattgcttaaagcatgccatgtttcataaaagcttcttctacttttgatgacaaagctaaaaaagaaaaaagaaaaagacaatatataataataattataacaataggatgattctttaaaataaataaataataataataataaaaattcacctgccaactctttattctaactccattagtagttcccaacattgttaccctatccactgtcacattagagacttgagattctgtattattaggtcctaagctaccaatactgcataaataaacataatataaattattaatattatatatatatataaataatatatttaaatcaaaataaattattttaattaattccaagaccttattccatgaccagggccacaacttatatctgtagctataacattacttgatccatttataatagaaatacaatcatcaccttcaaccaaaaaaacaaaataaaattagaaaaaataaatagatattattatgtgagattttattaaagatatgtatttatttaattacctgtttggataatattattcattaaatgaatattttgtgaacctctcaaatgaattccatctgtgtttggactattacttggtgcagttactaatagatgattagctttgacattatcacatgaatcaaagaatagatggaatttttgtgaatctttgaaccaaatattggtcacatttagattcttacaatcaaagaaagttactgcctataattaccaacaacaaaaaaaataaaagttaatatttttacttatattgaaaaaaaaaatattaagttttcgatacttttgtgtaaaatagtaaaaagggtttaagaacttacaattggtgcgcgaacacaagactgcgtacaaatagagagagaaaagagaaaaattagtacttaacaagagtattgttgcttagctcgaagaacaatttattaggtcacatgtccgtaaaatgaatggacggtcgttttacaggcatgtgacctaatagataagagttaacttaatcgaactaagcaacgttattttttatttttttattttttgtaatgagttattgcgaaatataaataaataggaacatacaagagatttgaagacagtgcaagattttttccaccatatttttcctttaccatcaaaagttccaccaccttcaactcttaagtttttcacacttacaaacacaagccaatgccacatatcctttatgtactcattttgttcagttgaagcttcaattgttccagccatctaatacatatacataatatatataattagcaatgttgtacttgtattatttatatatatatagggacacgattttgttccgtggtatactttcacggaatgtattccgtggtacattagatggggctcagtgtacattaaatgagtgtcagggtacgttactattttttaaccttaattactcctaaatcaatctcagccctcagatcaaataactccctcatctaacagctaccatacatcacggaatataatccgtgaaaatacaatcacggaacaaaatcatatccctatatatatgagatatttgccacataattaataaaatttttgagtttatagtaagcataaatccaataatttattttagcagtacttaatattagtaataatataatttttatctaattttattagtacagactctgttagaacaggacacgtgtaaagcttagatactaaaaccatcggatctggaaggaaaagtagaatgtcagttgcttctaaatattctttcaacaaatttcaaaactaagtctagttataaatttaaaaacatttacagagtctgtactaatataactggataaaaattacaattttactaagtacttatacccctaaaataaattattaactcaaaattttgagtaattataccgcatatatatatatactaataatgttaggagtaaatagcgatataagtactcaaagttctaaatttgtaagtgatacaaattcaatgtttatttttagcgtcataagtaccaaatatttgtaaaactgtaatttttctttaatatcatcgttgtcttaaacatgacacatataagacccagaatctagatcattggatctagacaaaaacatatagtatgagttacttctaaacattcttttaataaatttaaaatgtagcctactgaaaatttacaattttactaagtacttatccccctaatataaattattaactcaaatatatatactaatggtagtaacaaataagtaactgaccttgaaagtaagcagagaaaatttgcaaggaccagtgaaattcattggcccaagaagataagtccttttctttgggaccaaaaagacaccccctttggatgaacaagccttattccaagtcttgttaaatgcctatgtaaatgtaccaatcaatttcattgtcaaaatattaactaatattatcccaaaaaaaaaaatgaaaaataaacaaataaaagagttacctttctgtcatctgttccatcacctttggccccaaaatcatctacattaaagacctgagatggaaacccatgagagcttgagcttccatggtggcttgaaagaggtctaagagtgttaatggcaaatgggttcttagggtttttggcattacagaagtgaaaacaagaaaaggtaagtagagttagtagtaagggaagaaaaagattgaatcttttcatttttttgaatcagtagtacataaggcatgagaaaaggttggtttctttgtatatatatataataaataattataattttatatatatttattacaaaccaaaaaagttggtaaatttggtaaagttttcaaagttatgatattaaaactttgatacttatatcattattcattcactccaaaaaaagcactatctacatattatttatatgttttggtattttagagaattttgtagtttaatttttgtattgtttaaaaaatattgtaaaattttaagagatttaaaaatatttaacacgttaaaactagaatttaaataattttattacacgcgagattttttattttatatgtttgtaaaatatattgtttgaatcgtgttaaattttttaaaatttcttaatattttaaataactacaatgtaaacgactatagaaaattcaactaaaatttcttccaaataccaaaatagatagtccattattagtgggtagaattttttaaaaactttactattactttttccttttcattttttattttttcaaagttttggatttttgaaaaacatgaatgacccatgagagtaaataccaataacaagaggtaccctacactcttgtacaattattaacaacatttatattcgagtatttttcaaaaaaaataataaaaaataaataaataaataactgcattttttttataacctaattttttgttatgagtgcttaaaagttggttcttttataataagaatttttattaaaaaaacacggactccaaaaattgtaccttactccttacatatattccacacataccgaaattaaaagaagagtaaataccattttggaccatctgttttacaaaagttactaattggaccctgtgttttgttaaatgataaattggaccctgtaatttctaaaatagtaca

SEQ ID NO: 114789 - DNA, 1863 bp, Cannabis sativa
ttcaactttttgagatctgcctttcatggatgtaaaaattgaagtcaggacattagttttatgaaaattaaattggattgccagttgaattttagttttgtagtagtttttttacacttttttttataaatttgaaagagctcctgttttgattgattttggtcgtcttctcatctgaagtcgttgaaattaatggtggttctctttctggttgaattttcatttcagttgcattagattgttgcgtagttgcacaatagttgttcaggaagtatagatcctggattgaaggtgtgtgtaatttttttttttatttgagctgtacatttatttatttggctagctgaaagtatttttgtaatattattttttttattattattaaaactgaaaaaaaaaaaaaaaactctttatttttctcctcaccaatgaaaaataatcaaagaggaaaaaatctaaaaataaaaaggaaaaaatatgtaataaagaactaatcaaagttggtgatggtgggtggggcccatattatccagatagaatgtggggagccggactggaagagggaggtaggagtgggccgtgtaatgggtcaatggttttccaagtccttaaccgttacaatggaaacacctaaaagtccacaggtagtgggcccccaccttagttttcatttgatagaatgttcttctcctttcattctcttccacgttccacaatctcaatctcaatctcaatctttttgatttttgttcatcatatggtctatatagataaaaagaaaatgttattctccaatcctttctttaccaaagaaataaaaggaaaaaagtgtttagcacgtaagattttagactagacttcttttaaatctatttcttattagttattatatacaacccccaccaacaaaaaataaataaataaagaaaaaaacatacatgtatattctttttttttttggatggaagaaacgtccaaattaagaccatgtttgtttgatgaatgaatatgatagaaagattggttgtttgttttgttgtttaatggaaattgggctaaactagtgggctacatctgttattgggctacctttggagtgctcaaatgtgctttcttaaattattttctaataaataagcaataggaatcatgtagtcattgctaactgtcacgggccgcctatttgaacaccctcaaataggtgttaaggtgctgcacgggtgtttcgctgcctgaaaaggtgagcctgtgacactaatcaagatctcctattaaaaaatggtatctcatactatgtcaaattaattaaaatttgatacatcaattaattttttatttatgaaaaaattaaacctctaattgagtcaacaaaaatagttaaaatatttaatataaattagattaattgatgtatcaaattttgattgatttaacatagtatgggacaccaatttttaacagggaattttgattcgacattattttacaattctttatttaatttattgaagttagaaaagagaaaactttactaagagagaaaaaaatagagaatttttttagaaatgtcattaagagtaatgatttgtatttatgtttattttatttttaatattaaatttataatgataatttattttttttaaatatgtcctatacaataactatcatatactatagattaactcaaaaggataatttagttaatttaagcattccgattatattttctgataaagtaaacaagataaattattattattctttttccaaataattttaataaaccacatattataaatattgattctgattattcttcatttattctaggctaattaataattttttcccctgaacttt

SEQ ID NO: 114790 - DNA, 2690 bp, Cannabis sativa
taggtccacattaataattttatcgcctataatgtacttaaatgggtatttacccactaaaagttcggttgtattttttcctctctattcctacttcaacaacgaaaaaaaaaactgtattctccacagctacttatactatatttagataggtccactcccaatgaccattgaataaggcttaataaataaacaaagaaaatattatcaaaaaataaataaataaacaaagaaaataagaaacaagccaatgagcatctttgatcttttcaactctgttccattcgaagaatcgtcctcacgtaactctgtttccaaccaaagcctgcaggatgccattaaccagttcctcattcctagtatggttaatacatccttatctttggatgttttatctgatggtaacaggtctggtcactcctctcctgctcattctgtgacgtcttccactaattttttggctggtattccaagtctcccctgtcctttgccgactgctcctatcatgaccacgtttgtgatctcaagtgttgacaaaggcaaagttgttatggtttcagaatgtcctcgcatcattttatcccccccatctttgaatttgtctggtgtcaagcgatctttcacaaggcagaacgttcaaattggcaactctgtcagggaaatgctgaaacgtgctacagcagccgtggaggatgaagatgtggcagtggttccttcaatcgaaatctctgaagatcaggcgggtgttgctttgcaaccccgcccagaaaaacgagtctattgagctggaatgctcgaggtttggggagttctcgagcattccaaaacctttcccttttggtaaaacaacatcaacctaagattctttttgtcatggagaccaagcttagggctggttctattgctcggtttaagactcatctctcttttgattttgcttttgaagttcctaggaggggtttacgagggggtctttttcttttttggaatgatgttgttaatattaatattttatcctactctagtagtcatatagactgttttgtacaaatgactgataatataaattttcacctttcttgttattatggatccccttatatttctggtaaattggattgctatactttgcttaatcggttgtatgatgttgcaccctcttctccatggataatcattggtgatttcaatgattatcttggtcttaatgataaatcaaccagcactaggccatcttccactgccatggtttattttcaatcttttattaataagtattctctcacctccatgccttccaaaggaaaccgattcacctataagcatggcaagactttcgaaaggcttggctgggctgtagtaagtaagaattggcttgatctttttcccaaagctactctaactcatctcccttactttggatcggatcataggtgccttaaagtcttattcactgatcctagccaatctcataagcattactctggttttcgctttgaaaatttttggctctcggaaccagatttttcccatgtgattcaatcgaactggcactctcctcctcataataacagcaacaactccctttcctctttcctttctactcagtccaactgtgtcaacaaaatcaaagaatgggggaaaaacaagcgtcatttcaaaaataccattcaaaatctccagtctgccttagagaacacttactcctcccccaccctcacttctgctgatcttcagtgtgccaaggccatccaaaatgaccttgacgttgctctttacaaagaggaaatcttctggaaacaacgagctcgtgcttcctggctcaaggctggggataagaacaccaaatttttccatcatcgtgcttcttctcgtcgtagacataataccatttctcaaatcactttggcagatggtactactacacatgatttcaacctcatctgccatcattttagagaattctatgtctccctctttacttcccagggcacggatttgactgccattaattccatcctccctggaatctcccacactctcaattctacccaataccttcttctcagtcaacctttcacccctgaagaagtccactctgctttgtttcaacttccaggagacaaagctcctggacctgatggtcttaatgctcaattctatcagaagaactggactacggttgggaaaaatctcactgaggctgttcttgatgttcttaacaatcaaaccgatttctcttcgatcaatgacactacgttggttctcatacccaaaaggaagaacacttcctctcttaaggattttaggcctattagcctatgcaccacgatttataaagtcattgctaaggctattgccaataggcttaagttagtcctctgcgacctgatttctcacaatcaaagtgccttcctttgtgatcgaattatctttgataatgtgctcattgccaacgaggtcatcaatgctataaaccactgtaaatgaggcaaagttggctgggctgctttgaaacttgataagggaaaagcttttgatcgtgtagagtgggattttattcaggctattctaacccattttggtttcccttcctcctttgtctctcttatcattcggtgtctttcgtctgtcacttttaaactttcaatcaacaatacccttctccctcctttcacccctactagagg

SEQ ID NO: 114791 - DNA, 6690 bp, Cannabis sativa
  modified_base (27)..(64): a, c, t, g, unknown or other
  modified_base (4852)..(4854): a, c, t, g, unknown or other
ataaactagattatttattgaatctcnnnnnnnnnnnnnnnnnnnnnnnnnnnnnnnnnnnnnntccactataaatatgaaattgaactcttagtttttatagaattatatttactgagttttactgcaatgtccattgatataattaattccaatgagtagccctccttgtgtcggttagtaattagttttggtcaaattaacattttacccttctaattacttctttatcctttagtaccgttaattcactagtgaaagtataattcagatccaatataaatttgtgcacaatttttttagttctagaattaacacttaaaggaaaccaacattcgatacattaggaaagtcaggattctataattatagatcatgttcctagccatccatattattatattcccaaaacaaaagttataagaatcatcttcaatgagaaaatttaacgagtgaaccaaagaaactaataacactaataggagttcatgattactcaagattcaagctgatctactattaatcgtctttatagtaaacgacatgtttgataaatacaacttaattatatatcgatcattgtcatatataatctctattatatcagcaccttcacttagatgtcatactatatcagcaatctgaatctagattgcttgcaccgaataatgggcatcaatgaatggtattagcaactattgattaaagattctaaaactttaatatgttgatgactattttatttgtagctaagtgatcttaattctccgtacaatacaagtcacagcctcatatatgaataaggaattttttgaaatttatatataaattattcaatatcaaatattaataatttaacattcaagcatatatgaaaatgttcaactcttatttataaacagaaatatatttataatatttttaggacataaaccctaacataccttgtagttgatttacaagtattgtgatcccctgcatagtgagtgtcacaataacctactagtttccaactttaacctttcttgtacacaagaatcatagtctatcgtacctttaatatacctaagtattcaccgaactacttctaaatgagaattatttggattttgcatgtattgactcatgactccaactgaataggaaatatcaaggcaagttaaggtcaagtagattagactacctaatatctgccaatacatggatgcatcctctaaatcttttccttcgtgcacacacatttttccatttggttccatcggtgttgaaattgatttacaatccagcatcctaaacctctctagcaggtttatcacatacttttgttgacaaataagcaacccttcttttgtacgattgacctctaatcctaaaatgtgtttgagctctccaagctctttcattaggaggtagactgaaaaattgtatctcgtttgacaaatttctccttcaccatctccagggatgatcaaataatctatgtataccaacatcaatgccaactttccttctcaagctttaacaaataagctagagtctagatgtgccatcttgtaaccactttggcttaagaatttagctattttctcataccatgctcgtggtgcttgcttcaatccattgcagacaaagttaggaaaagttgcactttcaaatcctcttggttgaatcttgtaaatgtcaaaatccaaatctccatgcaagaatgcatttctcatccatttgccacaagctccaatttttgttggccacaatttcaagtagaactcgtatagttgtaagttttgtcactggactaaacacttcatcatagtctagtccatattcttgagagaagtcacgggctaccaatcgagccttatatctctcgattgacccacctgaacgacgctttactttataaacccagttacaagatatgggttttacatcttttttattttggcactagatcccaagtctcgttttgctcaagtgtttcaatctcttctttcatcgttgtcattcacttaacactttgtgatgcttcttcaaatgtcccaggctcttttatagttctttcttcaactatggttacattggcatatttggatctggttttcttgttcttgttgaccttcaaagttgaatttgcgagtttgaatcttctacttcactaggtctaccatcttctctttgttgttgatctataccagtttgccaagggctttgtgtctctattcgatcaactttacttccatttgaatcttctaattaatctgaacctagttgaagttgagcaatatgctcccccatcttctatactaacctatcttcaaaatcccccgagaggtaacaccttctgaactgatgaccaccaagatgatgcttcatcaaataacacatttcatgaagtgtagcatttccatccctttctttggttattgtatcccacaaagatatattttatagctttcttgtcaaacttattacgtaaatggtcaggaacaaatagatagcatacacagtcaaatacatagctttcttgtcaaactgtaggtttcgtgttctgcattctcaaagggtgaaataaattctatactttgttgaagaagtttgttgatcacaacaattataattaaatcgtcgcttttgcccaaaaccttcccggtatattccatgtagcatactacgataaatttttgcaagatgcctattttttctttttgctacgccactttgttgtggtgtattggcacaagtatattgatgatgtatttgacactccttcaagtatcgatataacttatttgaactatattctctcccattatctatatgcaagcaacaaatcttcttctacacttctcctttaattatttctttgaattctttaaactttgagagtgtgtcagaattttctttcataaaaaacccacatatatttagagaagttgtcaatgaaaatatcatataacgcatactaccaattgatggttgcttaactggcccaaactcatcataatgaactaattctaatggttttgttgctttaaactttgattgcacatatggtagatggtgtgctttaccatactgacatccaacacatatcgtatatgtttgcatatcaagttgaggtagccccctcaacatcaacttctttacattcacatttaactttgagtagcgaacatgacctaattgtatgtgtcatagatatgatgttttattaatcctttctttgtccacatatgtggactctactgacaacacatagactgattctactcatcgtctttccattgctagcttttctaagagttagatgtcatgatacacctttatatcttggggaccaaacataaaaatgtggcttaatattgttagttgagctacagatgacgaatttttcttcatttctggaacataataaacatcttgaagtaacacctggttagaattatattgagacgtaactgtagtcttatcaacatgggctatcgataatcttgagctatcagtcgtcaccactatactacttccttactcaaataaattttgcaacatatttttatcacttgtcatatgatttgactaccctgaatctacaatctaatcatttttgtagtcaatcttttatgatgtcattaccatgaaagttaattcttcttcctccatagtaagaaatactttagtatcccaatcatcttcatgctctttataggtagaggtcacagtattacttttagcaaactttttcttgaacgaatagtcttttgccacgtggcctatttttccgtaattgtaacacttgctatcaaacttttttccatgagaacgattcttcgaagctccccattgatgagtcttcatttccttggagatgctttcttcaccatcctttttagatgcaccattattgttccccttttagttgcttttgatagtgtagagcgcttcctcttcactcttcaatgcaactcctcttatttgcatagtcatagcttcttgaccagcaagcaaattttcaaactcaacaagtgataattgtgttggccatccttgtacagcagcaacaaaccctcaatatttgagtttcaaaccatggataagtagtttgtttatcctagcatcgcctatggatgttattggatctaaaacagatatttcacaacatatcgctttcatcttataaaaatattgggaaaagatcatgtcacgttgcgccttcaatatcaactcattcttgagaatatgtagtctcgtatcattcttctttaaaaagagtgtaacataggtgtctcatgcttctttcggtgttttagcatcgcgtatgtgctccaacatttattcttcaattgtagtcttcaaagcaaacattgttttgcctgctttaattttccacttttacaagatgcatgtcaattgtgtaattcaccaccactgacaatttctcaaagatcatatccttgaaggtaagactccatacatgttacccatgtggtataatttgtactgttaagctctttgattcttctaactacctgaagatcactcattacgctgacaagagctcaactacataaaaaaacttactttaacaaatctaacacagaatcaaatgtataattctaaatttaatatcccagagaagaaattcacacagaaatggagccgcactccaaaatttatttaattaaaaatacactaagataatcctcaataataaaactacaacatatatatactagtaaaaagctacgtgttaggcacgtatactaaattttatactaggtattttatttaaaagtgatacaattaattattgaagaaaaaatattatgtgagattattattatgtatatcttannnatgtaatttataattttgataatttaaaataaatactggatgcaatatattagcatttaagaaagcttgataattttactgtaatatgttcttaagattatccaaaaataaactaaatattcatgttcaaatactaaagaaaacacaacttaaatgtgtataaaataaaaaaaaaattaaaaatcaatctctaaattgttgataattaaaaataaaatcaatctaaaagttgtagataagaaaaataaagatactcttaatgggtggattttaatcttcctttgtttcgacatagacaatagtataatgtttgtattttgcacttttcattctagctaggtccgcatataattgaatcgtccattttttcgtggataaattgtatatggtagtatcgacaaagtggcggtgttcctgcaaatagttgtttattatcatttaagatgatatgacatagtgtgaataattaatttgattaaaaaaatctaattatgaaaggcaagtaaaattattttatgtatttaaatgtacacctctgcagtgtaattcattagttgggcagtagtacatgaaaatatttttccacaatatctgcgaacaagacaacagataggctatgtgtattgtcatcaagttcaaaattgttagtattatttttaattttaacttaattttaataacataatatattttttaatttgccgtggtgtaggaaattcttcatgttcgcatgttggtttgtcacatttgattttttttccttttgattgtataattcaatttttgtatgacatgcctcacatgacatgtaataaaaacgttagacagtatcagttatttttattgccgcttcaattcaaaagtttttttttctacatccaagtcaaatgtgttaaaatagtaggatatcgtaacaaaagttttttaaagtaggtattgtagtagtatttacatcattcagttgtagatttttcgtcaactctgaaatatggatgttattcactatttcgtgtaatccaacagaaaattttggagaagattcatatgtcaagcattttgacaaagaattttgagttcaaagtggaaggaagagatcgttgttttctaatgtgaggaccaaatttatacaatataccttctcttttatatatatttttttatttatagaaaacgattttttatttggataatattacaataagtatcagtagtacgatttttacctatattttattagtgtaatcttaacctattacattaaaaacatatgtatacatacataatgtgtaatatatatacatatccttttctaatctttttacaaagacgaaattaaccgaacatgaaaaataataaaaaaagaacactaaccttagatgatagaaactctgaagtaaataaaatgcgcggtgacaaattgattgtagcaacaatcccaataaacgtaatgaacaaaagaagtgaaaccaatcctacaataatagatcaaagaaacactaatatattaataaacctataacatagatggtggcagaaaataaaagaattgtgagaattgtgagtgatggattaatttttacctgcaaagctaaaacgaattattagtcgatataaaacaaactaatatgaaatatatagcgattgtattcttaatcgtcatctaattagttataaaatatcataaaatatcccactttaatttctaactacatgaaaaattaaagtacttttaaaaaatttaatataattttataattttttttatattttacaatttaaaatcttagtttttttttttttttgaacaaaaggataaatttattcaaaagaacagaa

SEQ ID NO: 114792 - DNA, 3659 bp, Cannabis sativa
ttatttgattaaatgaaattttcagttaaagaaaaacatgagtcatcgatctgagtggtatccaagtcactccatgcactatttacatatataagtctatagcacatcattattaataatacacataatattaatttttttctgccataaaccctaacttcgtcaactccccaaattcataaaagaaaagaaaaagttaaataaaaatactcatttttaattgtatataatgagatatatttattaattaatttctacaacatcaaattcgtataatttttttagtattttataaacagatttcaaaaatattggatacaatgatattatgaagataattaattcataaagaaaaatacatacaattttatatgacagatcatcaaacaaggtttcagaaaattccaaaattattaacgtgaacttttagagctcactattatatttcgatctacttatcaataagagccttttacaatactcaaactgtaattataaacaaggatgcagccaaacctcatatatataattatttggctttgcctatacggaaccaaaagacaaagtgagaatcggtgatctataattaattacggaaatgaaaactaagagcgttgatttcgtgtgtgagtatatatatgttttatatggaaccttccttgattttgaatactgagcttgattatatatgtacaaacattttttaaatacccaaattgaccttttcaaatagccagactgtttgattattaggattcctacactttattataacaccattctttattattgtttttgggaataatgaagagatgatggtgttgggaggctacccattttggtattttattgctattatacacgaatatgttattgttcaatcattatgaaaaataaagctagcttcgtaatcaagtgaggaagagatttagaaaagaaaattaattatgcaaaaagccattccacttttcttttctggatactgaaattcctgcgtaccttttttgttgctcttttatttttttcttaaaaaaatgtaataattaatggtaatttaaaatgaaaacggtgtattcatatagtgttaagcaaatatatattcatattattgtatgttcacatcaatataaatttattatcttacaaaaaaaaaatatagtgtaagattgataatttatataatagtatcattagaaacttgccaaagaaaaatatattttttaaaaaattattactattgttttttttttaattaaaaacttatttattactatgtaaagatatgcaccttcctccacatgttccccaattaaaacaaagcttaagctccccaactacccacttgactcaactcaactaattgctaaaatcactttcaaacatattatgataaatgttttttgtgtcattaatcttgaacaaattttcacctagaaaaagaaaaaaaatatttaaaaaaaaacatttaggttggtacaacagaaataacatagagaaataaggggtaataagggaattaagtcaaactccacagcacagcttttgcaataatattactcttactcgaacccgcgtacacggtacagccctatgttctctgtcctcttctggtggaccccactccacctgagttcacacaccttaaacaacaatgcaccaaccaacccacgctacccttctctctctctctctaaaacaaagataggagagagaaaaccatgcgttacacaacatttccaactcatatataaaccctactcccacacccaccactttcaaaaatcacaaactgtctctcattctcaatctcattcattttctctgtcgtttttaatctttcactgtcgttttgttttactactactactacacacattacaatgccgaggaaaagtaatgacgtggcagggcgagcctggaacatcctccgtttagcgctgttatgggcgaggaaaggcggagtgtttaaacggcgtttgatgacggagctccgtttgttaccgaaactcatgaagagtatcggccacgacactcccaaggacagaatccggtacggcgagcgccagctatcgttcgataagaccccgattttcccggccataaagattaacggatcttcgtcgatgagacacttccacatcccttgcctgaacccgcccacagtagatttcgactacgactttgacggtcaagacgacgacgtttattacggaggctattgtaaaaataacagtaataatgatgataaagaaaatgatggtggtagaaagagttttctgatcaagggtggagatggtgatgttaataaggatgataatgaatttgtaccgtacgatcaggaagagaatattgattcgaaggcagaggagttcataacgaagttttatcaacagatgaaaatgcaaagacagatttcttatttgcagtacaacaatgagactattaccacaactcccagaagaagcatttgttaagtttttattgttattaatattatttttgggttgaggagggtattattgttatgtttttattattattgcggcattttgtagatatacttcattattgttatttttaataataatgataaaaatgtagagagaatgaataatgtttttattttttttatgttcaatcgtgtttatgtttcgtaaagatcaaagtctccaacagaagaaattatgatagaaaaaggttatgatttggttggttaatttggtgttggattggaattggaattgcactgacattattttgtttttggttgggacgttaaatttgacagctcatataataatatatatataatatgttatttgaaatgttaataggatggtcaccttccaatttaatataaaatgttactcattttaatttaataaaataggtaaatagcattataaatacttataattttatgtttgtaagtggcataaatcaaatgtttatttttagcagcataagtactcattgtttgtaaaactataaaattcttccagtttcatcagtacaaattttattttgaatttattaaaagaacatttagaagtaactgatactacatattttctatctagacccaacgataaagaatttaggcattattatatgtggcttgtttaagacaataagagagtctcacaaaattagagaaaaactataattttacaaacattaggtacttatactgctaaaaataaacattgagtttatgtcacttacaaacataaaactttgagtaattattattatgtcattatttaccctaataaataatataaaaaactactaataactacttatagactccgtttgacacaatttttaaaaaaaaactaaaagttgtgataaaaaagtatatgttaaacagttcaaaaactgcttattaaagaatttatagagaaactatagttaaaggctaaaactgatacaacctaactttaaaaaaaaatggttaaaaaaactctataatgaatttatttaaactaaaaatatatatttacttatttaatatatattaaaaattttaaaataaaagaattataataaaataaagaatatttaaatatcttattttttttattagactttttcagttttaactaaaaaaagtaacaatattataaaaatacttccagctgaccaaataaataaat

SEQ ID NO: 114793 - DNA, 2249 bp, Cannabis sativa
tttttttgaatgaattcaattctaagaaatagtataaaaagaggggttaagggtttaatacaaaagtatcatattcacatttttctcatcatttccattacttgctctctctgtctctgcctcccaaaaacacaaaaatgtctcctttttgctttatggtgtttctcttttacataagcatggcgtttggggctaacctccgaactggttactactcaaaatcctgccccgatgccgaatacatcgtccgatttggcatgcagaaagctatgttcagagaaccccggagcctcgcctctgttatgcgctttcaatttcatgattgttttgttaatgtaagttttttcttgattatttactttaagatgtaaaaaaagagtgaaagaaataaccattttttttaataaaaaaatttatgtatatttttttggttataagggttgtgatgcttcgatgttattggatgatacaccaaccatgcttggagaaaagcttgctcttgcaaatattaactctttgaggtcttatgaagtcatcgatgaaatcaaagaagaacttgaaaaagcctgtcctggtgttgtttcttgtgcggatatcataatcatcgcatcaagagatgctgtcgctttggtattatactaataacttttttttttcactataaggaaaaaacccagatagaaattggtgttatctcacactctaaatctcttatatgctcaaaagggttgtttataattcatttgagagttttgttacatcttttattaacttatcttattgtgtatattattttttactctgtttcaaaaccagtccggaggaccacactgggaagttaagctaggaagactagacagcttatcagcaagccaagaggcctcaaacgacatcatgccgagtccaaggtccaatgccacctacctcataggtctcttccaaaaatacaacctttcggtaaaagacctcgttgccctttctgggtctcattcgattggtcaaggtcgatgcttttcgatcatgtttaggctctacaatcaatcgggtagtggcagacccgacccggctatcgagccaagttacagaaaagagctttacaagctttgtcccgaaaatgtcgaccaaaacataactggaaatttggatgccactcctgagttttttgataaccagtattttaaggacttggtttctggaagagggtttttgaattctgatcaaacactgttcacttctgctgaaacaaggccgtttgtgacccatttcagcgttgaccaacagggtttctttgacgccttcgttgaagggatgattaagatgggagaccttcaatctggccagccaggggagattaggaggaactgtagggtagctaatcctagttccatgaacaaattaatggagtattaaacacaaaaaaaataaattaaaaaaaaaaaacatatatatgctagagtctgatgcgatgatagtgttagtagaagaagaagtgtttgtgatttatggtatagaagaagttttgtgagaatttttttttgtactttgaaacttctctttatcaattgtagtgtcaatgaatggactatggtttgcatttgcaatatagataataattgaaaaaaaaaaaaccaatcttcttattttcagaaattttttgtctacaattgaattctaaattatgactcctagagggaaaaacaccctagattatgatcacagaaagagtaacaaatgtcaagttggcgaaaaagaaaacgcactagactaaagagtgttccattgggatactccacagtccacaacctcatatcttgacaattaaacccataagataacgatgtcatactcatatcaccctatgatattttacataggtatagtttgaccttttatttcttaatacaaaccttaggatattttagtgaagatatgatatgtgcacacataaattgtacacaataatgtgacacacttaaattaatgacttgtcacatatgtatcacatttgtatgaattatgtatacacctatcattattatttatatagaaagggcaatcatgtgcctcacaaattatgagcaatactttacactttgtttttgagtggaaaatttattccaattatataatatatattttttttttgtatgttaaaaatgagatatttattgtaaaaaataaaagatcacaataaataatatcaaatattgcaaagtctttttttggcaagttagttgacaaaatatttt

SEQ ID NO: 114794 - DNA, 2118 bp, Cannabis sativa
ttgagctattgtgtggattggattggatccaaaaaatgaaatccacacttaatacggattggatgttgtttgaccaaaaaagtacagattggacgatgaacaaccatgtatatatacacacaaatatttcattttgtttaactattgatgagtccttaaagttaaaatggataatcaaaattttgagttctacaaccataacaattaaatcctcaaagctacaccaaacacaattcatcatcatcatcatgaataacaaagactgaaaaatactttatttcaacaaataggcaaatctaaaaataaaaacttattacagattcacaacaactttaatacctccaaattcataaagatcatttatgcttactaaagcaaatgagagatagtaatgccaattattagtggtgcatgcacttccccacctactaaaccataaatcaaattaaattgtgctcaaaaagtaatgtaaaaatattatatagagtgaatttttcttatttttgtttgagcattgccattaggcatcagtagtgcctagtaccttatcgatatgttgcgttgcgattgagtagcgatacttctaaaatctattatattaaattacatgagacctgatactaagttggaccaataacaatattgacacataggagggtactagacaccactagtgccctttagcgtttctctttttttttttggataaaaagactcatccacctgttgtgtaataatatgttatgattgaacccaacccaaccttcctttatgtggttcatcagggttaaggccgatctaacaaaactttctgtgctataatttttggttatcggttactagttgttgtttttactttttagagcatatatagtatattttgtaaccagttgctaaaatgtgttagttccacttaactacttaagtaacattttttttaatgagcttagtagctcactcatatttaaaatatcatattcagtctattcagattatgttagatatcttgtggctagtggacctttaactaacttattaacttgaacattccaagcatattagtttatttttctaaagaaaaagagattacatggtgtaaatcttttttttactcctttagtcattttgaccattctagagatcatatgtcagttataggggttttataccttagcctttcttaaatgaatcatcgattttcactccaaaaattcttaccacacaaatgacaccacctacaacaacaaaataactttcaaagggccaaaccttttttaagagaatcttttaagtatatacgtaattttgaaattatttataaaaataacaaagctaatttaaatcatatattcttcccatcaacacaattcttattattcttctacttattgttattgtaatagcagatttactctaacaatttatattctatttcaagtatatatatagaaatttattctaatttttcaacatacatgtgataagttctaaaacatagcagacactaagaacaaaaactctaattattattgtggaaaaattacaactaaaagtatagaatcatactactagactttaaacaattaaataattagcaataacaaaactaacaaatcacaaacaataattggaggaaaaataaagatgaacagagtaagaaaaaccaaaatacaattaaggtagtaaaacaataaaaatcaacaccaagagatatatactggttcatgatgtgacctaaggctctaattcaattttggaaaaccactaaaacctctttattgattgaacaagaacaggtacaatacagttgagatcgattctctaaagagttctctcaaagtgtttcagctttcacactcttatccaagaatcttcttcatcaacagaagatgctttttacaaaatccaaactctctctctctctctctctgatcgtcgtatgtatgaaattataagagttggtagtatttataggcttaggaataagatcctaaagttggtggctacaagaaacaaggctgttaagttagtaaggcaatacttaatgttgaccgaggttttcggcaaccaataaaataataataatttagagaactgtaagaaattaagagagagatt

SEQ ID NO: 114795 - DNA, 1248 bp, Cannabis sativa
ctcagacttgatcaaattcagtcctctattaatcgccatgatcttctcaagctatgatatatgaataattgaatgagtttatgagtggtattaataattagtgatgatgaaacttattaaattactcttatgaggttatgttatgtatatataataattcaatatttatatatataaatatattctatacttactaaatcaactcattgtatgttcatgaattttttttttattattatttttttttaagagaataaataattttaatatttttaacattcttgtgtccagttattttttagtttttttacaggacatcgaggcccctacaatattgttatcataataaagtttaatcactaagttcgagatacattagtgtggtttctctatgcttaagacactaatatcggtatcttgactgagcaaagaagacgagaaaaaaaagttacttctctaatagccctattgctaatttttttttctttcttgtaaatgtatttttaaatattgtttgcttccttaagagagagaaggtttcaaagtttttgtcctttatttgttttaatattttggtagttataattttatcggtctctaaaaaactaagttgagagttattaattcacaaagaacataattatagccatattttttttaattgtataattattgccaaaccttactataaaattaataattactttatgatatacaataacatttttaaatattatgaattaaaaaatttctttgaagtaatttaaagttattatattaaaataatttcaatctatcatccgattcattaaaaaaaatactaataatatataaaattacatgcaaacaaagtttaattaggcctctaagctaacttcttttgtttcgagttttcttcttttttttcttcctcattaaaaaatagtcaaggccacatttttttaattgtataattattgtcaaattttactataaaattaataattccttcataacatacaataacatttttaaatattatgaattaaaaactttctttgaagtaatttaaagttataatattcaaatatttcaatctatcacccgataaattaaaaaacagtagtaatatttaattacatgcaaataaagtttagttaagccttcagctagcttctttaaatttgagttttcttcttctttttctttctccttatttttaaaaataatcaaacttcttgatcaataacttcccaaataataagaaga

SEQ ID NO: 114796 - DNA, 6550 bp, Cannabis sativa
tgtcagggatggaaattgcactcgtgagtatggagccccaaggacactacttgccctagcgtgctcgccctgtttaccttttttattcataattttttttatttaaaataaatgggtctcctgtgggtattacctgccccacctccgagaatatgtgggttggatcgcggggatagatattaaaatagttaacgaggatggaggagcactaatcctcgcctattacccgtacaattttcatccctagtgatcagtgttttcgtataggatcactgtgtgtaatatttttgtatttaggtgtatacacacatatattatttaaaatatacaaatataatacatgtatatatgactaaccaggatacccttgagattaatatgaagagaagggtctttattatttttgtcatggattagctcagccagctcaggaacatattttcctgttaataataaaaatcattttcaaatatatataatgaaaaacaaataaataaattatatatatttatatatatatacctgcatagctctccccagctatgtaaaatgaatggtttttgtaagaggggaactttaggaaccattcatggaggaaagtataggcatcatttgctgatgatgaatatcataatataatttatatataaaaaaaaatatcagaaaattattaatataaataaacaaaacttcataatcaatatagtgattaataattaataattaccagtgaattcatctccaagattttcataatcagtggtggtatttgagtaggaaaagcctaccccaattggagattccaagaataacatgttggcctctgatcatcacacaaaaataaaaattatattaattaatttcaaaatttaattcatatgattatgttaattaaaattaaatatcgaatttatgtattttaatttaataattattataaaataagtagtaatgcatactagtttacatatagctaaagcataacattgaaatattattctattattttcaatacttatatataattactttaaatttagataattaataatgaattaagtaaatgatattatttatttaatttaagttgaattgatttgagtagtgattaattgagtgggttgagaaattaacctttattccatgaagctggattaaattttagggaatggccattagtgtccactatgaaaggaccaatctcttgtgttgctccataccccacagaagagcacccaggacctaatcataattaaactattaattaatttaatttgttgcacctaaagaatatttaattaaaaaaaattaatatttgtatggtaatcatgatatataatattccattatgaaaatttatttatttatttttgtatttaatagtaatatgtaggatgcatgcatgactgtctaaagataaggcaacatgaaaattaattataataccaaaaaaaattatgattaatatattaagttaagttgccttttctctttcatatatttattatatatatatagtaattaattttaggattaatattaaaatacataatgacatgacaattatttttgtaaacccaagctaatcttgcaaaagagaagatcataaaaaaccaacgaataaattttgtaaaatttccaaaaataaattataaatttctaccgaaagcaaaatgaataatcatttgctttgaagcatgacacacgttgtgtcatgtgtcatgcttcataaaaagttatagaacaaagaaaaaaaacataggctattgtgaatatttaattagatcagaaattaattttctaatataaaattaatagcatatataaattaagatcatcatgatcatgaaaaaagaaacccagttgagagtacatattaattataattagaacatgcatgcatggaaattaagatattatatacatagatatatagatataaatatagatatagatatagatatatatacctccattgagccaaagtaccaaaggtttttggtgaggaagagaagaagcctcatagaaccaataaaaaagagctctcccatgaattttgtggacagtgataaatccagcatagtgtctaaaattattatactcattattattattattatcatcatcataattctgaggttgtccaggtaacttagtcacaagatcgtcttcataattattattaatattattctctaataatttctcatgatgaagatgatctctagaccataatttccaatccctaaaccctaaattaacactctcaacaaattgcaaataataagtactaagcaccaaagttaacacaaccaactttgacaccaaattgatcatcatcatcatcatatattttttggagttataaatatatatatatggctatttatatatactcatcgcttggtatatatagtggatatccacccaaccatgtcactattaaaaaaaatatttttagtcacattgtgtaggacttttagtcataataaaaagttacttataactaaaatatcatatttagatataagttatcactaatttatttttagttacaccaaatattgtgcgactgaaactataaattgtaatttttgtaactaatacctttagttatagattttttgatcacagtataagaatgatgatttataattataacttttttacttttaattacaaattttgttatgactaaaagttaaaaaaattataatgagttatacaaaatatatatttattaaatgatgcttttttattatacttttttttcatggatttaggtagcttattaggtaggtaggtatatatatagtcatgagtttatagagtagtactattattgcatgaacaatcaaggtttagtggtatatctcctttttagtcatgtgggggttcgttgaatcatatctatgactaatatcaatgtctaccatacaaaaatataataagaaaaaataaaaaataagaaaaaaatgtaggtacttttagtatttttgatatatagataagtttaattcaatttttttatatgacggtgcatataatattttaaaaaatcaaatagtttctatgacataatgtatttcaagtaatttgaatcataaatagacaaacgtgaaagtagaagggctttcagcaacactaaatatttaattagggtctagatgaatattatttgacattattttatggttggaatataattttatttttgcttaatttttatgtattctatttaattcgtacttaattgcttttaattgtctgatcaccaattaaatgtctatgattttgatgcgagattttagaagtgagtgtcaattatatatgctatagtgaaataaaactgaatttcgatataagacgagaatacctgtatggtttagatagcttataagtttatgtgtttaatgtctgttgcatgtttaacttattacgagagtagaaaattagcatgtaattgatgagatttatatatctgagaaaactataaattaccttagtaaatctgcttttgcatagaaatcggtaataggaagacaattatattaggtcataatcaataaatacaattgaaatcgaaactctaataactttaatcatggttaatttttctgttgaattacttgctttttaatttcattgtccttttagtgtttttaaatttaattttttcttaattttgaattcaccaaatagaagtaaagatttgattttaaagtacttatataactacaattcttgtgggatcgacctcactcctggtgagtctattacttattactatacgtacacttgcatgttaaaaataccacaacatttatctatctgaaaaatattaaatttaggaaaagagtctgaatatatgctttagttacccataagaatgttattaagggtactttaaggttcattactgtataagttggtataccatattgtagtcagtgcaatttaatattaaatctcgtatgttttaaatttattttatatattgtaatatattataatatatgattaattagctagggtttgtgagtcaattgtttattatgtatttggttagtagaagttaggtcttataaccacttgaataatcccaaaataataatatgtggaaacataataccataagatgtatgggttactcttcacatagttaattagtttttcgatggaatttcatgtaccttactatacagtcaccctattctgctttctctactgcctttctacattctgacatgatatcagaactaaataaaactctgatgagtatctagtctaaattcaataaccaattcaaaaagaagaaccaaaaaagtttcttgtgattctggaatagtgagctaaaaaagatcattgtaaaataactaaaataatcgtgtgtaattcggagatattgagcaaaaaacattatttgtgattaaactgtcaaaaattagtgagcaaaaataataatcactatctttaaagagatatcaaaaaatctgaaattaataatgtgtaaaaatataatattataaataacatatgtgagttaattttcttacgaattaattttaaaatataacaccatatcataaactcactttattatactttctcgagcattgttcttctaacaagtgtttattatccactaaaattttccttttattatcctattatatatatgtggtcaaattatattagtatacgtatcctaatcactccctccaattactttttgtttagtatttctttaaaatagaagaaaaactaatccaatacttatattcaacatgaccccatttttagtcatctaatttataattaattgaaagtcaaagataaggtggagattaagaagactagatcactcctctttcaccatcttttgttcagaaaaaaaaaaaaagagcaaaaaaattaataattaataacaaaagaaaaagtacaaaacttagggcatatatataaaaatagagtaccattttgaatcctgtgtctaaacttagggcatgtttgatagacaagataatatgttgtaaggatagaggcaaaacagatgaaaattgaaaaattaagacaaatttcgagaaatataatataatttatttttaacaaaaaaaaaaaaagagaggctagggaaaggccgccctagtatgcactcgccttaatccttccaagtttaggattattttctcgagttttttgtttaggtgtttacaaaagattaaaagttgcttgaatataagattttgattaaatagtataggaatcaaagacaaaactcaaagaataatttttttttcatccatattattctaatcaagatttataattaagtatcaagaaatctccattaaaataaattttaaaaaaaaaaaaaaaacatagtgaattaattatatttgtcttctttgttaatattaatattttggattttgtgtttttgtaaaagttaacattggactctttaatttgttaaatagtaaattggaccatgtattttctaaaatagtattaatagtaccctaaactaattcttttgtaaaataaaacttaataataacctgatatagagatgctatgacaaatttgttacattttttctacatctattcgtgttaaaattatcttcaaaagttaaccatattatgaaaattattgaaaattgagttcaatatcctatttatactattttaaaaaatactgaattcattttattatttaataaataaaaagtccaatcaacaatttttataaaatacacatccaaggtattaatccataaaaatatatgtatcttcttgatcaagtggttattaatacctaattatattaattattagataattaatatgtgtagtggctattttattctacctatcaataataataagtacgtggcaacaattctattatattttggtaaacattcatatactatatggaaatgattatatatcatgagtactcattcttatattaactaagtgggaaaattacaatgccaacattagttgaattgtatatataatttataaatatatagagtaatttatggcgtaaatatataattaagtttaatttttagtgataaataaatatttaagtttaattttttacaataataatatttaaattatattttttaaaacttctgtaagtacttgacaattaagtgtcaagttaatgatcatatgacatatttcctaattaattagttcaggttattaaatttttattttttatttaaaaatttaattaaatacaccaataaaaaaataatacgtgaatattttaacacttaatggttaagtactttcttcactacaggcacattagtgattcagtcacttgctctttatgttgtcaggagaacgaatctaccattcatgccttgtttcgatgcaaaaggcccaggagaatatggcagctatcatctttttcggttcaagattatttaactcataatatgtctctaatggatcttatgcaaaaaatgtcccaggttttgtcttcaaaacaacttcagcagtttatttgtatcctttggagc

SEQ ID NO: 114797 - DNA, 1759 bp, Cannabis sativa
aaaaaaaaaatcaagtcccataggtatatcgtagaagtattttcgctcacaaaactatacagatacatgttacatgttcatatttgtctgtttgtttgatagttttatatggtattatcaggtacattcagcttacaaaaaagctctgttaaaatttcatccagaccgagcatcgagaactgatatccgccaacaggttgaggcagaggaaaaatttaaacttatttcccgcatgaaggagaagtttttatcaacttcatgttgctgaccaccaccatataattttcttcgtgttcaatgctcacaaattttccggtcacttgctactacactatcacatgtatagtgaggcatgtgcttttaatacagatttgtaattgtttactattttattttagtcatttacttattcaaaaagaaaagagaaatcaaggtaaaaataaaaataatgtatcaattattgtttggagtctaatttgtaaagaagtatatgtagttagttaaaggtagactatctcagttgatcgcacatcaaattcttatgattgattcaatgcacataagtcaggtgcatgattattcttaaaaatgttctttgctattgaacaagattgttttgtacatgctgtaattttatgacaattgtcaaagtcaagttttacatatactcttttggaatggttgagttggtcggaagaaagaatacatttatttttataatttgtaatcttatttaaaatattataattatttttttttttaaaatttgaataatttatatattttaagaaataagatttaaatataatttatttagcaaaagtattaataacaataagtataagtgcaataaaattatatttctacaatttagaatttataaaaacaacatataattattatttatgtgctaaaaatataatatgaatcgggacatacattgtacaattatttatttgaattgcatttacagttctctatatttatatatatttttgaataggaaatataatttttgccttgcaaataattaacagtagaatctgatatgtatttatactaatagaaattaatatcttgtagtaatattttgtagaaatgattttttttctcaatatttatatggtcatgaatattttgttccacgtgtgtaggacacgtgtaactttcactagtttgtaactaaacaactatattgttggtgggtaaacacttactttgccatacgaaattacaagttctattaatataagataaagagcaactgtcaataaaaggaaaggtgctattacaaaaagaaacaaagttcaaaagcattcaataggaatcctttctaatgacagtgttgataaccatcctagagttgctctccacaataataaacttgtggctttttgcttgcgccacttctaatgctaaatagcaagccgctgcttttcctgatagagcatcaaaaaactctaaaagtttcgttctaacccaaaccacctcaccaagatagttccttgctaccacaacgatacacatgctcttcaattcaactctaacatcacaatttagcttgagccaatcctgaggaggagggcgccaagcatccaccactgccagggaggagagtgaaagatggaagcacaataatctacataagatgtacgaatagacccaatgcactgagatatattatccagcctattattgtgtaccttatcgttgcagacccgccaaatggttgttggaattattttaccaggatttagat

SEQ ID NO: 114798 - DNA, 2816 bp, Cannabis sativa
  modified_base (2760)..(2771): a, c, t, g, unknown or other
ttttttttttttaaatattaatgaaaatctaatatgtatgtgttatcctaaaatttgcataaggtgacgtggtcctctctaggtgacaagtgaatcatttttgagtctggatggcatatacctcccttagtatgtcgcccgattaaattactcataagatactgcttatttgaagaatacggtaaagttgtcgcgcatagtaaacaataccattcaactagcgacaatttcacggccactttgcatatgtagcccaaggtaaatgtgatagagtgccttaaagatactttattcctttatttgtcaattaaattcctattttcatggaattttcacacgtaaataatgtaattgaggaaagtaactagttttccttgtttattctttatttttttgggggaaacctaatgaatgtaattcttccttataaatagtagagctatttcactatttagggatctgaaatattatttttgagagagcacttacgctgctaaaatctctgtaagctttcgagagagatcaagaacttattgcttctcttctcacgagcaatataagtaaaaagggagtaagctattaccaccatcacggggccaaacctctataacaaatatgtgttcttattttgatcatttgatatttaaattctattgcttctaatctctttaaagactctgggtcgttgactaaaagagagatcaacattttagtgctttcattgagagcaaagaacacaatcgttgttttgattcccttcaaaacacacgaagatggttgtgacaataaggaggggtaatcccaataaaataattgatctaatggctacatatcctaatgtgtgaactccagcaaatcagaaagatatagtgaggacagatcccgatccaaccatttttcagccttcaaggggtccccagacggcagcttaggactgacgacccttttgactagattcacaccaagcacgcaaaaaacttgaatatttagtactcatgccgagtagactagtcaaagtactaaaaatccatttgttggagatcctcgagtggtcattggtaatgatatcaagctataaaatttatgagcagctttacggcagatggaagagcatactaacactcttcactgtgatcaacaagacacctgagcaaccgtgaatttggtcttcgagcagcaaaaataccaattccaagagtggatggatcaatggatggagattatgagacccagtaagaggcaattgacaatcgctctaggcaagcgactgtgctgattaggcgagcttattagttaactggagaataatcagtggaagatacttcagttatataggatccgaacaaaagtacatacgtctatatccctaactgaccatagtatgggccaagagaatgctgaccaacaacactcatcagacccaaggtaatggaccgtccaatctgaggccacagaattgaactgtggagcacacactagacgagcaggttttaccagtctattatattgttttttttttttgaagaaaacttttattatatctttactactatatttcttcatttttattcatgtgtatgttctattgctacacagtaattaacgctttttagaaggacggtgtagttggtctttttgctatcaaggttcgagatattgttaaccaatataggaaaccaatcaaaatttcaagagttgacattagagtgggtaatttagttgtgctatcagatgctctcacaattgttcaaactttctcaatcaacaaaattcttctagattggtattttattactttttttcatttaattttattaaagattataaattatattgattaatttgaagttaaaagatgtcgcacataaaaaataattttctatttgatgatagagtttgattactacaaatatttatcattgtcaaagtagtttacacaaaaggtaaacctctcaatgtttctttcttctaatagagaatctctgtaaatttattttgaaaatttaaattcatgtatgattttttatatcacttcaatacattgatttatatatttctaatttagtatatagtcatgaccaattttatgtagttgtgtctaaagtcatcatagaagaaggataaaaatgacgatgatgagctggaatacccaatatgcacaaaaaaagtattttataatattctctttatcatccacaaaacaaaaattaatatttttacaatattttaattaaaactcctcattttaattatatattttactaaatcaatagaaaaagataaatttaaatatttgattatggaataaattagtcttatggattatgacctatcatttcatcattacaaattaagatacaaatttaacatccacataatttgttcaacattttatctaaatatttcatattgaaaattttttacttctaccatttttataagtccttcatcaaaaatagataatgttgtgcaatcctttttatatttgtcatcctacatacatttttgtaaagaagaagatatgcatttcaacaactatacaaaacaaaatataaaatctttcataaataacacataaatgatttgtaaattgtttatttttactcaagaaaaaaaatgcaaatagttttttacataaaataaaaattacgttattaattaattacaaatccagtttattaaacttaaaagtgttattattttcatttacttattataattccgtagttcttaaataagaaatagtctaattttagaatnnnnnnnnnnnnattaaaattaattaactgagtatgcaagcagtattatctcaacta

SEQ ID NO: 114799 - DNA, 3392 bp, Cannabis sativa
aaagaggtaagaatttgaaaatggatgcatagcaatcttactataaaaagaaaaatcattttgtcaactaacttgccaaaaaaggactttacagaaataaataattcaaagagagaacaaaacaacacttagagttttttatgtggttggggctttagacagccttagtccacgagtcgatattattatgtattttagctagaaaaacttttgggaatacaatgagtatattgttcaacccttaatccgaaggattctgggagtatttatagagtttacaggaattacagttagtttccctttccctctaatggagagtttacatagaaaatacacaagttagggttgtattcgtgaggcccagcccatgggacaatgagtttgctgactaggcagatttaacatggtcaagttgtcattaccatgttctttaattgtgggtaattaattgtgaattaattgcttcatcttcattttaggtagtttccccttttagcttgatatgatcttttggccgagatttaaggagagttaattccttattctgtgcaatttccaggaacacattgtctggccttccagaagcgagcaattatgactgcttttgagtacatgctatccttggcagaagcttgtctgcgtgaggaaataagataccttcttggaaggtcttgttagacttgggtttggcccaggttaccttctttgggcccactagtgggctttggatgctgacctagaatccacgtgtcccttaccagaaatgcagataacatttactcccaagcttctagaatactgtgtattgtggacatgtggaggttaaaagtaatatttttatttctttccaggtgctagttgatcgcggtaggtggacttttgtcttcagctttgggaagcagtcgtggcagtcatctagtggtggaggagtgcatacgtttaccgaagacttgctttccaaaaaagcttttattttgatggctgtttattattggtgcaaaaaaataagaagagtactttcatcattgatttgtgcctcagttccagggggcattaaatgcttgacatgcatggttgttggactttcgaaccataggataagtttgtgcttttggagagacgatctggatcgttcatttttcttcacgtggtttaccatttcgagtgtaaatacccctaaaagctacgatttaccaccttattcccattttaaagtttcattcacccaagttcaagctttcttgagagcaaagtacggtgaaagattttactagagagtgagcctagattttcatgatctcctttgaattacttttcgcttgagaaatcattttctaccaaaccatccactcccagtgatcaagtgttttcagaagagtgacctggcaaatctcgattttaattctgaaattgattcattgatttccttagccaaccatcttcgtgaaaggtgtgcttgcttgcactatctagattcagtgaagatcacttgggcaccttcgtcttcaccaccaggtatgagtttgttcagtttctcacctttgattatatttctgagtccactgtagaggttagggtttgcatattttttcttcgagtgaaattaggatttcttaggcctttggccaatgttaggtttatttttatgcatttttagagttcattttagtgtgtttttagtttttttattactttattatgcaaatttatgcttggtttttgctattgtatattaggagaaatttttggagatcttcaattttggtgttctgcaagcctctataagcaaaaatgagaaattataataaagaaaggaagcttcttttagcttggactgattcactattgcctaaaattggtcaaagattgtatttttaagctccaaaatttgtggtccagagtcaagagtgatcactttccaaaaataaattaaaaaattctaagttttgaatgctgatgctgaacgagctccgtttgtgattgaaaataaaatctagagcctcaagctaaattttaactatgatccattcaattttagaaaaacatttctgaatgaaagttctatatcgttcttttgtcttttcaaaacatattgaatcatccaattatgagttatattgagagagttatggccaaaatattatcggtcattgcagtaggaaactgaaaacgggaaactacaaaaatcaacgaagaaaagaggaaatcacttgtagtaccgcgaccttggttttttttttttttttttggaaacttggatttttgcattataagaggagggttgatgacaaagcttggacactattcgaacttggaggtaaatttggagcataggaggacgactaggagcagaagacaccattgcaggactccaaatagtgttctttctcatctatcattatcttttatatttttaattgaatttttattgttttagaatgactcttatgagctgattttcttttaaggattattatgtgaactgcttgagtttattttatgaattatataattatacaattttttcttcttctctttatgcaattccaaacaatctattttaattttgtaattattaactgatcatccttaattgttatttatgaatttaaatcaaaattctaaaaaagtgatatttaaatatgttatgattgttatatatgtaaattgatttagaacgaaagtacctaggttgtttgtatgattttactagttgctatgtgtaatgctaatacctaggctatttgtatgattttactagttgttatgtttaatgctatctttgtgattaaacttactatagaaatataagaagttttcatatagattggatttataagtcttaaccagattataaacttcttaactcaatttatcaattgaataggaagaagagacgttgggtaattacattatgaagtaaaataaagaatagttggagatcataataatctttgtctttaattatgatcaccgacctagagggtgaaagctccactttaaagggacgtcttcaagagtaggaggcttgacatgtaaaggctttggtgcaagcctttgtccattcaatatataccctctagtagcataaggaagccatgatagatctcctggatgctgaagatagggaggagcttttgccccagctactggcactggaaggcggacaagtcaaggagcgcacctcagggatcgagagtagtcaatcctggaaccaccatccctgcatgtgagcacatggacaactctgctcctccgacctctgaggttcctatttcaactgagtttgcgatcccggagggccaaactcaagatgctctatgttgtgaaaattatgtacgcaagtatacgtagtcacaatagtaataaaatgataagtaagatcgtctcca

SEQ ID NO: 114800 - DNA, 3408 bp, Cannabis sativa
  modified_base (760)..(764): a, c, t, g, unknown or other
  modified_base (835)..(836): a, c, t, g, unknown or other
tttgaattttgcacttaattataatattttctttaatttcaacattttgaattgtgatcgggtcgttgattagggttgaaataccctgtagatagttaatataagtataaactacaacatttgggtgatatgaaaagtgactgataccaatctaagtcttttgactaggaaagtcaataagagcattaccgattagtgtaataattgatcttagaacatctcgtatggtaattggatcgttaattaggtctgaaatactctataattagtaaatgtaagcttagaatatgaaatctgggtgagatcaatggtgatcgatactagtctaagccttttgactactaaagttaagaaaaacactattgattagtgtaattgttgatcttagaacatctcgagtggcgattggaccgttgaataggttcaaaataccatgtaattagtctatgtaaacataaaatataaaatctaggtgagatcaatgatgacccgtactaatctaagcctttaaatactaaagtcattaagaacactattgattagtgtaattgttgatcttagaatattttaaattgcgatgaaaccattgattagggtcgaaataccctgtagatagtcattatgagcataaactatgaaatttgggtgataagaaatttaaaatttgctaccatagactgtttatgtgtacactcttgtacacgcggtatatttatataggtacagctaatatttttatttcaaaatttattttaaaatnnnnnaaaattataaaaaataaaaaataaaatatttaaaaaatattataaatgttttataatttttaaataataannttaggtgtaccaatataaatgtgctacgtgtataagagtatacacataagtagtttatattggcagttaactgtaaaaataaatgacaccttaaatttactaacagttcactcgtttggaggattttattttaccaccaaaatttaagtttagaagattaagtacaaatagactaataattgaaaatactacaaaaaaatgcctctttcaacttactcctttctttctttcttattatttttttttttttgaaaagataacttatgttatcttaaagaaaaatgactattaagttgggcataaaaaaatattatatttgactcaatctttcactattttttttagaaaaaaaaaaaaatacaagacccgtcacgcatgcgtgacttcatcggagtccattttatataatgtatattaactagatatttataagtatttatctattttaattatacataaataaaataatttgattctttattgctttttcctcaaagaaatagtgaagtttgaaatcatcaagaatttaaatctgataagacttttttttattatttttttataatttgaatgtgatatcaatctgtcattttgatttgattatttgaatttattttgatcatatttgtttgatttataatttgtttgatgtgtttgtgtttttttttttttgttaattaataaagataaataaaaatttgtggtaaaatggaccacaaaagatatgttacaagatatagagggttaaataatagttttacatcaaaagagataccgtgatgacattatatttttttggataattacgatgtagagatgatgctttgcgaggaaatgcatttcattagcgaagaaaaaactgacaacaaagtagagataatgtgaatgtcgaaagaatgaataaatactatataaagatttaattcttttttaaatttgactattttcttatttatcgagaataattgtgtttgagtatgttatgtttaaatgtttagagttattctttcacatcaaaacacgtatttttctttaaaaataaaaatagaaattactttaaggaggttttttttttgagaattttaaggagttgttctcatgtaattacaatattttaaattattatttttactgtattaataattttttccttttatattttctgaacacttcaaagcataactgcgcgaagaccggatatgttatctagttcaaatctagacctaatttagggctatttatatatttctcccatctctctctctctcacccattatagtatacaatagtggttgatattcagcccctactagtcaaaggttatattgaagatattttggaagactgcagtgagatcaattggtaattgagaaaaattaaattcaggctcatcacttttccataccttgttacaaaaaaagattcaaaggttagagtgattgaatggaacaagtcaattaattttattgtgttcccaatataaaatcgtaatcttaatggatttatttcattattttagaaaaagtataatttaggttgttggattattaatttaataattaacatacataatagtaactaaggtcctgttaaaattatttccattaaaaatatcatgattacgtcttgaccaacaatgaaaaacctagtatcacataaaataggaagaagatcgaaaagagtagaaaccaaaatcacgtgaagaagatgaataatttttagatttcattattgtcatgatttaatactaggaaggaccttgctcttttcttttaaataaattatattgagaattcataagactttgttcgatagatagaataatacatgttatggttgaaaatgttaagtttagatatgcatatggagttctctctacttagaataaaactcttctatttttattaagtcaactctttctcacgtttagactaatattgtaagaactcgctatcgctactagaagattagttataatccatgtgagaggaccgatcaaaaactgtggggttaaggatgagtttttctactcacccatagatgcttgatgttctatagaaggtaatagcacataaggctaatgatttgataatggaattaggaagactacgagtataattgagaagatgggatgaagaatttgcataggctcaacataatagatcacaagcatcagtagtgcaatcttaagtacataatgaaatgtattagtttcaaactaaattatgaatgcatggaattgaatttatctagattcagtcttcacacctacttattaaaggaatcatggcaaaaaggaagtagtgtaagctatactagactgagataaagtgtaacgccctaatgctaaggcatgctacagtgctttttttattacagtgttgtctttgctaatcgaagaattttcttgaaaagcgtgtcaaattaaaacttttatattaattaataaactttataacatatcaaactatttacaagtccaaggatcccattttcaaacttttaaaatataatactccaaaatacatattaaccaggtcgcacaacaactacaaaatacaaccccagatgt

SEQ ID NO: 114801 - DNA, 3209 bp, Cannabis sativa
aaatataggttaattataacctaacactttgcccgagtctccagaaatgtgggggcctctaataattacttgtaaatgtctatcactagtgaaggcatcaattggttttgactgttatttggttgtgcgaccctttgttcctggtcggtcttgacatatttttttaagtgcaggttatttttcctaatgaggaactttatttcccccttcaagttattacacttgttattgtcatggctatagtacgtgttaaagagacagaacatggtggtgttcctcttgctcgtgtctttcttcatgggaggaggtttgttatatttcaccatggattgggtcattgccaaaattttttctatatcctatgttaagatggtaaaactagtgaactttgaggcattctactgaggatgttgtttggagttaccactgatctacttttctttccattacctgttggttgccattatttgacatttttccaccttaactcgagctattatgattctgtaaatttagtcctgctcgatggatgtattagtagtagtgatgtgttgttggccatttttctgtccaattgtgtctacatgccaaactgcttctttgagctttataaattcatcaactgggtccaagaattctataatttatcctacggtgagtcttttgatgcctttccataattctcctagaggttcaatacctcttaggattgaagccagtctcccttctttggttaatcccttcactttcgcagcttcattcatgaatctattgatgtaagctcttaacggttcccccagtatttgtttcacttcaatcaagtattctaagtgagtcaggacttgtcgagaagaagagaactgtgcgtaaaattctgacatgaaagaattccatgaattaaacttccttggagctaacttgaaataacattggtgggcggcattcgccaaggtagctgggaaaattctgcatcgtacatctcctttcaccccttgtaagtccatctacattttaaagtatataatgtgagacataggatcctctttgcttgtatacattttttaggttggcatcttgaacttgagtggagatcgagggcattgatttctgttgataatgatgatcctctggtccggtcaagttttagatctatgagtattgcgctggtcaagccttgaacgaggctatcaagttgatctatttcggcttgcactaatggatcaacttgacctgcctattgacctacttgtgtcacatgtggatctcttagaatatgaacggacacataattatctgtattgtttggtagaacagtctgaggattgttttgcctgtttaatcctcttatgcaatttaaatcattcctaagatcgtgcacgtgcctaactgatacaaaccaattctcatggaggtcttcacgtctagctgttatcagcaatgggttggttcgacatatccatcttagatggatattatactagtcatttcctcctacgtaacgagttggaaaaacttgctcatctaccatgtggtccatagtttgactctgtgaccatggattggatgactcattagcttgggtttgcttaatgtgtctagctggatgctcttctggcccatactgtagcccagtgggaatgtaagtatttgcccctagttgtcgtccagtgatctgataggctctcctgatcagtacgggaacctgcctagagcaattatcaatcacttcttgttgggctctcatgatttccatctcttaatctctccactcttcgaactagcatctttgttctacaaaagcaaaatttataactaatcgggtatcttgctgatcgtaatgagagtgttgtcatgaccttgcattgtccccaaaccagctcgaaaattctatagttcagtgtcatcaccaattttgaatattagatggaattccaactctaggggcagtttgctcggtccaagtctagtggttccattttcttacacgcccagagtgaacccaaccagaggggtggttactccttgccctactgtctgtgggcctgttggtggctgaggattacttagatcgggatctgcactgactgggtctctaggatttgtaggtgtctacacattataatccgtagccattggattagtagcttcagtctaatttcccctccatgtcgttacaaccatcatgtatcctgaaaaagacttacaataaagacttgtgtttctttttccaacgactgtgagtcaaattaaagcgattaagaataatcaagtaataaatatgaattgcgatcaagtaaaggaaataccaaaattatagaggttcggtcccttgataatggtaatagcctactcctctttagtttatattaacttgagagtaaagaagcaagaaagccttcatctctctcgaaagttcttataatgatctcccaatattttactcttgaatctagatttctctcgtgtgtttcttctaaatgaatttcctgtccctgaatagtgagacgattccactatctataggaattaattatatcaatttgtttctcaaaactaataagaaataaagtgaggaaactgtttactttctataattacaatgatcaaaatagggagctaagcatgtttccttttcttccttgatattgcgtatccatttcatgaaattagggatattattgtgtcttccaagcatgaagatatatgggatacacctctaaaaatgtcaaactcgtattctctggtcgacatatgccagctgcctacatgatgtagctagattggtgttcttgtacaccctgctcgaatcttcatgtaacgtcctaactattgggcacgttccccaatataattaagaaaccctaatcccctagacgtgattactaaatagaaaagcgcaggaaaatttaaactttaaacaaatatagaatgaaaataaacagttgtaataactttaactttataaccaaaatgacatatttcgggatcccaaaaatattttacaaaatattattacaagtctcgttgccaatagccgacctaagcggcaaaacataattacagaaaatcatccctggtagaccccaacccgcttggtctagtgtggcccgaacatgtacatacatcgcccaactccataactcatggttgatcagagataaatttaccctttcctacacagtagagcacccgtgagccaagcccagcaa

SEQ ID NO: 114802 - DNA, 2063 bp, Cannabis sativa
ttcttttaataaattcaaaacggaatctgtactgacaaaactagaagaaaattacagttttacaaatattagtacttatagcgctaaaaataacattgagtttataccgcttaaaactttaggtacgtatgccgctatttaccttttagaatattattcattatcccaaccaaaatttaataaatgatgttcgttatgtgtaaagattcatcaaatgatcctctctaactattgtccacataatttagctccaatttttgtagttgtaattaccaaatatcaaatataagaagggaaaaacatgataaactataactgaagatctctgtagttactgaaactttgtagtaatgtttttgtattattattattattgaaaatggtcacatttagaaaataaaattgagaacaacaacaacaacaagaaggacttaaattaaaataaataaacaacaacaacagttaataataatgtatggaccttactatatatatcttctgttgcactgttagatggtcaaaggtattccatactttctttcttccctttaatgaaaaaataaagacagttatagacaatctgattttatacttctcaacattatgaaagaaaaatataagtttgtagaaaaatatatatgatcattatatatggttctataataattaatcatatccattgaaaattaaaactaacattaataatgtaaatatcaagtactcatatctagcaaaggggtgtctttctaatttctattttatgaagaaaaagaaactcttcatataactttcaaaacagatcatgcaaatttgatacaaaatataacattgtgttaaatttagtctacaataaatgttatttttttatttattataatgccactaattattacgattaatcgaattctaccaaatttgacattctttatttatcatattaccattatttaaataataaaagaataaaaaataataatttttgtatattctcaataaaatattaaaactcgtcaatattattaatttaaataatatagcacaaacttattcttgtacagaatttaacgcaaattttaaattttctattggagatggtccaaaaaaaataaagaaaactatgtacatgtgattatacagaatttgtttacccaaaataattataaacaactttaaactaaggttggtgaaaactacactcacttgtgtacttgcctgtcaacatgttttataagaacaaggtagagtggatcttgagatgttaactgaaacagttgtagtacaacataagcacatgttgcaatgctgaaatatagagagaaaagaaatcaaaaatagaatcaataacaaaacatgtcaagtgttatcaacaacacttgttaggttactcatgttgcaatgcaactaaaacttcatcacttaatctttgattaccttccaaaacatatcaataaaactatccaaatgactgcacaaatcaagcatgattctttgtaagcaatccaaacctgatttcagatcaaatgagaagacagttcatatccaaaatcacaacacatttgaaactatatgcatgtatattacttctcttatcatcatcattattattattaatttactattgaagaatctgagatcatctttcaagagtacaatataggaaaattctatgtgaaagactgagaacggtggagacataccgatagagcaagaacaagacagtagaaatcgatcagtgttgctaccatgactctgcagagagaaaaaaaccaaacaagagtttttcaaatgaataagatatctgacaagattctcatattagttcattttagagaaatttgcggccaaaacttccttaagtttatttttctttgcaaatttaaggtttcagttagatattactgttatataccaactggattattattgtatcgacttagagattttactgttccatatacacatgtgtatatagtggtcatccagttgatatttaacggtaatatttaactggcgtgtcaaatttgtaaagaaaaataaatataagaggattttgccacaaaaaa

SEQ ID NO: 114803 - DNA, 2081 bp, Cannabis sativa
cagttatgaaaattataaacaggaaaagatatcacttttttatgcatgaatcagataaaagtaaatgtgggaacaatggtagagaacaattcaaatctgccaaaagaaaaacataagatagagtacttggcactactcctattgatttcttcagattttattttatgtccagcaaactaaaacctttgagaatttatttcttgacatgaaacaagttaccatctaaactttctggtagtaagtctatgaaagactaacatgctcagctaattccctagaactaaaaatttcctaaattctgcaatttagtccttatacttaaatcattagcattttcaggtcaatgtggaaattgaattgcttaaatttaagctactattttgatgaaaactccaaccagccatgaattacaagatcactcaagagctataatcgcaaaactgataatagtaataagcattcaagctaaatgagtatgtgagtttatagagtcaggggtaaaacaaattaatagaagttagtattagacattgctaacttacagttcgaaggcgcttcacaccattgcgaccagctgctagatgcccatcttgggcattacttccagaaagggaaaagatagatactggtgagccatcatcctgaaatgtaatcaaaaagcatttaagaacattacaacattaaaacgtacgtaaaatttttgatacatattgtctaaacatatcaaatcagataactgagccctggcctcctctaaaaatgatgaaacaagcagaaagtctcctgatttaacaaacaatctgccaaacagtcgatatgaacacttgacaggcaatcaaaactgcctccacatgatatagttggtaattacgactaaaaacagcctgatcacaattagaaacacttgagattcaaataaatttcccaattacactaatattccaactttataaccaattccattagctcagcaacccagaaatcagataatgaaatcatcacggtttacaatttccaaataacaccagtccaattcttcttctaaacaaaactcaaatcgttaaagcaattgcgaaatgagatccaacaattgaaactccaaagtccaaaacaaaaatgcaaatccggaaggtttccagttcgaatcacacaaagaagtaacaattatgatcacaataatcgcaagtgtgaagcgaaatcctataaaaaatttgaaattgagcaatgatccatatcgaaatgagagattggatcgtataagataagatgtaataccttggaggtgccgcgagagtgagtccaagagccccaagcagaagagtaaggttcgccgatggtgtagggcagatctttgggaccggcaccagatccaccgaccactcccttaaggaacttaaacatttcttcttcttcttcttcttcttcttcttcgggtactccaagactcagtgggagaggaaagagaagagagtcggaatcccgattggaagaacgggaaacaagcccaatgaacatcaactaaacaaacaacgtacgtgtaattacaattcaatccctttactttctcaatttacatagcgtacccattatgtttctaaatttaaaattatcccatccactacttacattctaatgggtaaatgtcattttgagaatcataaaattacagtgaatgaatggcttaagattataagactacgaggtaaattgaaaaatacatattttatttattaattaatcaaatttatttttaatttatatttaattgaaacatatctctttttatttgtattgtacaaataacatgaaggaatcacatgaatagtatattgaagtgacaaggcaaaattagtaaagggtttaaaaaagaggtaaaaataataaactttaaaaaagagagtaaaaataaaagagaacaatataagaatggtataaagtctaatttcctcatcgtatcatcattcaaaatttgtaaagaaatgtccctttttagactatttattatttatattattttttgtgatataaaaatatcaataattttttttcatattttgtattaaagattatggtatatctat

SEQ ID NO: 114804 - DNA, 3212 bp, Cannabis sativa
aactaatttcacttgagaaataggcaaaggattcaaaaattgatatataaaactataaaaatcagagcaacaaatcaaaggattaccagttgaaactcatacagctctcagtattaatttttgagttaaaatttgtagctatatcagtgatatttaatgtagtatttgttatttatttattattacaaagtgcatggtattttgaaaagagaaaaaaaaaagaagtgacaaatgtaacagctagataagaagatttttaattcctaatagtttgggggtgcgatacatagtccagcatattaactttccaagtaaaaattaaactttgtgaatcagggaacaatggcacaatcgatggtcaaggagagttgtggtggaaaaagtaccgtggtggagaattaaaatacactcggccgtacctgattgaaataatgtattcagagaatgttcaaatttctaacctcactttgctcaattctccatcttggaacattcaccctgtttacaccaggttttctttattccgtcattcttcatttacaaaaactgtttattaatttatgtatcaattattaaatatatatatatatgtatatattacattttatatatattaaaattatgaaatatattgcagcaatattattgttcaaggcattacaatccttgctcctgtgacgtctcccaacaccgatgggattaacccaggttaactttctttctctctttctttccgtttcttctttttttagtttgtgaaaagcagattaactttctaatcccaggcccttttatatattaagtgccaaacaattttttattaggagtaaaaacattttcacaaaatgactattaatgaaggaaacgcctaaaactggtacattaaattatgtgtttctataaacgtaaataaataattattttattattttatatcaagttatttatttttattatttattaattttttttattttatttttttgaaatgtcaagttatttatagttaaaccaattttttaacacgttttttttaaaaattcttaataatttagagtactataaacaaaaatgagaagctggactagcacaggagtttaaatattagttttaacgctccaaagtactcataatttggttgtaaatataatgaagaacatcatatgaaatattgagctgataacgtgtctatacatatatgaaatggaacatgcaatagggtactaattcaccattataattgtttaaaagaaaaagccactattttctattatgcttcactagtatctgtgtttttattaagacatagtttactctacttcaattatgaaagggtaccttactttactttgttattaattatgaattatgtgtttgtcctaaaaacaataatatgaactaagcagattcttgcacaaacacacgaatagaggactgttacatagtttctggggacgattgcatagcagtaaagagtggttgggaccagtacggaatcgcatttgggatgccaacgaaacagctcctcatcagacgcctcacctgcatatctcccttcagcgccgcaatcgccctcggcagtgaaatgtccggcggaatcgaggacgtccgcgccgaggacatcgtcgctatcaacaccgagtccggaatccgaatcaaaaccgccgtgggcagagggggtttcgtcagggacattttcgtccgaagaatgaccatgaccaccatgaaatgggccttttggatgaccggaaattacggctcccacgccgataacggatatgatcccaacgcccttcctcaaattcagaacatcaattatcgggatatggtggcagagaatgtgagcatggccgcccgattggagggcatctccggtgacccttttactggaatttgtatctctaatgtcaccattggattggcgaagaagcccaaaaaagtgcagtggaattgtacgaacgtgggtgggatttccagtggggttgttcctacgccttgtgagctattgcctcagaaaacgacgtcgtgtgagtttcctgaagatgttctgcctgttgactatgttcaattccggacttgctcttaaagtgcaaagaaccattagtatttctctttttcttttgttttttatataaaccgaacacgaaaattcaatttcagaaataccataaatcctatactattagcaaagtatcattattttaatagaaaatgtattgtgtaagaatgatttatagacttgatgatgctttttaaatgtacctcattgcttaataataaaacgatatattatataaggcttgtaaccagttgtaacatgaaaaataaaagaaaaaataaaaatattcacgaatgcaattacactttttgtatataaaaatagtgttgactgttgagacttgagaggggaatattaattagggtaaataatagtataagtacctaaaattttatatttgtaatcggcataaactcaatgtttattttttgtggtataagtacctaatatttataaaactgtaatttttctctaattttatcagtacagactctgttattgtcttaaactgtgtacatataaaaacccaaattttaaattattagatctaaatagaaatatgtagtatcatttgtttctaaatattcttttaataaagtactgacgaaactggaaaaaaattacagttttacaaatattaaatacttatgtcactaacaataaacattgaatttatactgtttacaaatttaaaactttagatacttcaattattcgctaaacttaacctaaaaactttgttctcgttctctcttttgtcttgtcatactttgtttgatgcgtaaaccggcttgcatttctataagagtatattctaattattgcaattctaacaataatgataattattgcaacaacaaaaaaaacaataacgataattatgatataaagaaataattacatattttattgtttaaatatattttttaaaatgtattgcttaaaaattagttataacattttatattaaaaaacatataattattatattttaatatacaatttatcatacttattaaaatatttcaaatttatttctctaccagtattattcaatttatgttttcctaaaccatagacatgtgtcacatgttcaaggattagataagaaaaatttataaaaatactagaatttgagttaacttttataaaa

SEQ ID NO: 114805 - DNA, 2808 bp, Cannabis sativa
  modified_base (1084)..(1085): a, c, t, g, unknown or other
  modified_base (1112)..(1113): a, c, t, g, unknown or other
agtggtctagtggtagaatagtaccctgccacggtacagacccgggttcgattcccggctggtgcaaagatatattttgtattatttttaatacccaaattttttttttaaaaaaattaactctctttattaatgaatatatatatatatgattcatattatatattctaaataatcattatttcaaaactgaaaacttaaatcatatatgttaataatgttattatgtacatgaaaaaattaacagaacaaccataatataattaacattacagaagataaaaaaattcactataatttaataattatgaaatttgttttttggttttctttaaaaaatgttagaatttttacaaattgaataattttttgataaaacacgagtgttctagtgtgtgtaatagatggagctttatatggaatatgagttattgtttataaaggtatataagtgtgtaattaattatgatacttgagtttgggcccaaaaggtcaattttatgtaaatgggtgatgacacacacttttgacccaccatacacgtacactgcctcactggttcaatagtctgtcaaatagatagagctggttggtgtggtgtgacacattatttttttacagaaaatttatttaataaaataattatttttatttgagaaaaatgtttaattaaaattgattacttagtcgtatcatttcatggaagacgttcgacaactacttcacacgattcagaaaaaaaagtaattcttctcgttatatttttcagtttactagtctatgtaatgtgattgaatcaataggagaatcacatcttttttatactggtaattctaattgcttgtatatttttggacagtgtcactaatgtcttactgagagtaacctaatccgcaactctacccaagaattttattccataataatattgtttttcttttattttaatatatggccttaaaatacacccaactccatctaaattggttcggtaattctgttatttcagttacattataaacttccttctctatatatatgtctttatacacaaatatcactctttactctctctctctctctnnactctttactctctctctctctctctnnctctctctctctctctctcataatcaagatcaacaatggaatcaaaagaagaggacatagcagcaaattgtgaaagattgatttgggaattgaaagaattgatgaaaaaagttgacaggaagcttgaagaaatgattagtaatgagtcttcattttctaaagacacattttataacatcaaaatacacaatcaaattcaagaaatcttcaaagaaagagtgaatgaattacaaacaaaaaacttctctatttgttgtaattcatcatcacaagatcaagatcaagatcatgataagaataatctcaaggtttcatcaaatgtgattaacaagaagattatgcttgttttgttgaatagaaagattcaaaagctcatcaaagaagaaaccaatcatttggatgagttgaatgagttgaaataatcttatctacttaattttaaggatattaatttcatgtagtaatctcttctttttctttatgactttgatttttataaagttgggttttgaatattcaattcattgttattactttactttcttattagttgttgtttatgttaatgtaaatattaatatgatcgattaatacaatatttgacccttttgccaaaaaaatattggtgcaatattaataaatatattagaaaagaggttttctttttcatgtcgtttgaattttcaaagatattatgtagtttagaataaacgacatgtagttttgtttaacaaaatggtagcattaaaagtaatgaaaatgatgtttaagtttaataattctaattaattcttagggaataaatttacatgcaaaatgacaagtatttttttaatttaaaggtttgcatgttgataattctttatgcataaaagattattctttaaaaatttagacgttaatttttaacagcaagctcttttatgttttaattttgtacatttaactcttttaattttattattttttttcggcaaaactctattatatttatttttctttccaaatttgataaataccaattaaattaatactgtattagctttgagattttattatcacatatacacaagtgtatatgatagtcatacatttagtatttaacaatgatatttagctgacgactcaaatttgtaaagaatagtaaatttaagaaagttttggtacaaaaaaataaaagagtaaaatgtataaaaatgaaaatataatggagttttaccattaattaggacattaaatttgattaaccaaacataccccttccttcaattgaatttcatgttgagtggaatgaaatttaaaacctaactttaatgtaagtctatttcgagttgtttagtattaaaagtaaaattgaaagcaagaaagatggttacttgttgaaattactacattatcctcttcaaatacatattatttcttttatgaagagtatttagaatatttaacatactttattttgtcattttctctattccttccgctttggaagtattagcttttacacattcattgggagaaagtattcttccatctttcttctccctcctttcttccctaccaaacacctaatttattatctccttccacccaaaattacttcctaccaaacaaagtgttactctactccaactcaaactcacatatagggatgtaaacaaaacaggtcgggcccaacccattactgacctgcgc

SEQ ID NO: 114806 - DNA, 5448 bp, Cannabis sativa
gtaatgggttttatttagggcacaaaacccaacacgccccacaacaaagatccagttgttattcttgacattaaagccaccatcttcatatcatcagtaacctttgtcttggaagcagtatccatcatacacgggatatacttcttaaggctttcttctagtttttgcttgatgttagttagggaactaacctccaagtcgaaatccttagctgctatgaatttttttttgaacatagtctgcaaatatctccagttatggactgatcctggcgacaatcttttccactagtcttctacgaattttgtcaaagttagtgagaagtagaagcactttgcatcatcactagccttatccacttgcatcattcggttgtatttggatatatggtccctggggtctattcttctatcgtacaactccatctgaggcattctcaagtgctctggcaattgtgcatctataattctttccatgcatgtctttgtgtcttctacttcgaaattggacacagttcagttttgcttccaagagatcttcttcgtgagcttcattaactcttcaactttgcactccaggcgttgagttttatcatatgaagattctcttccgcaaactaaattattgatatggttcctcaagtcacctctgtgaggtctgactttctctattcttacctttcctttctttgcatttaatcttctccaaagatcatttgtggagagacttccactgttgttatctaatagcggatgcacctcttcagcatcatcactttgactgtagaatcattgtagtgatttgcatccttctaggtagtaggctttttggctttggcatcagatttatctttctgcgcaactctgtctctagaatcagtttggtcaccctgccctgaggcatggtttcctttatttttctattaaggtttgctggcagatttatatttctttttttttttggtttagtctgaggagccttctttgaagttttgcctacttttccttttcctttgtccttatgaagatcataagttccaggacttttaggattagccttctcggtggtgtttgtcctttggagccgtttgtttggttttgtctccagcggtcagtgttgtcattatagctttcattctctacattttctcaatcactagcaaagaaaactcttcttgttgagtcaatttgttttcaactatttgtaatttcctggccataatgatcacatgatctaacacgtctggattgtccttcttttcaccatcaccatcagcaggcatgtcttggtgatcatctttaggcacgtcttggtgatcatcgccagcttcataaatatcattttcttctgattcatcgtcttcaaccataggatcttcaaggattgggtctttactatgttgatccttcttgtggcaactggtcacctcaatggatctttcgtatctcctgtcttagcattaagattagtatagtgaagaccagacatgttttgcgtgagtaccatgattactgaacgtaattaatgatggtaccattgctttcttcagctctcaatgaaagcaccaaaatatttagcgagattttcagaaaagaaattatttaataataaagctaaagaaaatatgacttaagggaataaaataggaagagaacactcagagtttttacatggttgagttgttaataagccttagtccatgagtcagtattattatttgataggctagaaaagcctataggattacaatgaatatgattactctattcttttctcaagcttgtgagtcaagaatttccaacccttttctagaaggattcagtgtatatttatatagttatagaggtcatacttagttactctttccctctaatggggtgtttacaaataatacagtcctttgggcttatcgagtgaagtcccgcccatgaggcaatgattgtatgctgacttagaatgttgatcacactcatagttgttcataccgtatcctttgattgtggataattgattgtgaattaattatctgatcttcaattatgaatttttctattttggcttgattttattccctgatcgagatctactgaaggtaacttccttattctgcatggattagtaaattggaagatacttatgacttccaagtacatgttgataaatcggagccaaaggtcctcccaattcaagctatattccacaaaaacttgcctgggggagtaatgcaggtgtcttcctagaaggttaggtttatatttggcttggcccaatctttgttgtttagggcatactgatgggctttaagtaattgtcttgtgtccacgtgccccttgctggaaacatggataaatctagtgataatagaaaccaacttcgaatctctacactcctctgtaaaacaaaacctagatgtatacccttcattttcaagcacctcaaattcaatgttagacaatattcaagaaatcccccaactgttaacatgaaatcataatacctccatgtttacatggaaactagccctggtgatgtggacatcatttttgacacatggaaagaaggaaaacactctaggagtcttacatccctaatactggcagacgaccatgggaatgggaccctgacccaatgcccaggctgacatgggggactctcgagtgggtatttaaagctcgccaagttttttccaagtcaccatcctttagttatttgaaccaacttggtgcctaaggtttgacccagaacccaagttgacatctaggactagggttttggttttcagacctcatctttgtgtagatcactcaacgaatgcacttagacatgaataagacctaccataagcatgttagaggcaatagaatcaacattggaacctgtttggagcacctgggcacccagcgtctaggttgacatattgtcaaccttgggtacctccaaccacttttctaaagatatttccctggtaattctctccttctttttctgaaatgaagatacaagtactttcagtaaacaaatggagtcatctagtgtttagaaagccaacccaacgcccagattgacattggacatagtcaccagtgcccaagttaacatattatcaacttggggcatttccaacacctttatcagcaaagagttttgggcatttctctgttttcatcaataattaagataaaagtgttatcgagaatcacacaagaccatctaagggccagaagctctaaccagtgcccaggttgacactaggccaggtcctaacacccgcattgacatttaacctagtgcgcatgtttccatcactcagatgcaaattcattttggtcattcttcttatcatggtccaaaatgagggacgagccctcgtttcctgacataagtatcattgatgtgctaaaaccacacctagaaagctcagaaatgggcacccaacgtcgaggttgacactcaacctgcttcatgggaatgtgcttatccgattctagttttgtctcaagcgtctggctattttccatcataaatgagatctacaatttgtggcatgtcaaattcacacttcgatatttcacctttttcgaaaagtggaatatcagcaaactaatcacaaatcgggtggttttgagtctcccgattttgcaaaaaagcaaaacctccaataactagtaaaagacttcaccataaccaagaaactagctaggtgatgtcaatcacttagactttgaaaaatatgattccggcacgatttcccaagtacccagtgcccaggttgacattggtcagcttctcaatcgcaggattattaatttgggtgctacgtgctaaacagccatcagtcaaacaatcataactcggtcaatattactcatattgatgtgtttctaagtgcattggaatgctcattttaagttctttttgcttatgtatcacattcatacctcatttttgaagtttacaaatcaaaaaattgcttccaagttgaagtgcaaatttttccatgaataatctgtaaacgatgatgtgatccgatctctaaaaatcgacgatcaccattcgaaacgaaatttgcgcattccaatcatttgatcacaatcattggtcaagatcactctagatgtaatattcttattttttgaaatattttattattattttaatggacttccttgcctataaaaggagagctccacgagctcatttttcacattctgctaagtcgccataaggtgagagcatctctatctagtttctctctatataatctagaatctcctccttagctaattgcctcataacccttgtgagaaataaaagctcaaagtagacgtagctctattaccatcgcaacatgggggtgaactactataaagttctggtgtctctatttttctacttactttcatctattactcttctcgctaatctagcgagactaggttggacaagttttagcatcaacactctaaaaaccctatctcaatttcttttccctttttggtttgcaaaaaccatttctcataaacattcacataactttgaattctttttattaaaaaaaaaattaaataaaagaagatgaagaaacccacattttgcaacaccataaccggcaattgtagattaatattcaacaaaattcctctattagaaaccaaatgttatctctataaaacccaatttcaatttcaattttttaggagaggaataaatataagatacatcaatacatctctctttctcaatagcagtaatcccaatgtggtgcactctacaaaacaaaaacccacaaatttcatctccaccaaccacaaccacttattctatcctcatatgtgtgccctttttgaaagaatccatactagaatatttctataagggaaatttgaatttctatccatcttttatacccaaattaattccctaaactaatacttataactatatgaaaaataagcatacttttccctaaaccctaaaatacctctctcattattctcagctgtctttctctcttcctcctttctctctcaaatcaaacctaaaacccaaaaatcaatccaagtcgagccacctcctccaccgcacccacccatgattaaccaccggcgttccacccatgattaagcaccggcctacccatggcgatccacctcctccacctaaccactagaccgcctgcctaccgcgcctacccaagacggtccacccaaccaaaccaccagtgaccaccacaaagagatctcgaccgaaccaccgcgaccgctaggaaaaccgaccgaacaccaaatagtcgaactcatttcaaccgaaccaccaccacgtaatgtcagccaaggtaagatttttttatctatggtatttttcattttttaattgttgatttaggttgaaaatgctttttctttatagatttagggtctgtgatttagggtgtgatttagtgtattt

SEQ ID NO: 114807 - DNA, 2275 bp, Cannabis sativa
ttgttctccattcagttttcccttcggttttggagccgaattctatcataaattcatcaatttaattaatcataccaattgttttacaaatttagagtatttaatactattttagatatgtattttacaaaaattattgattagattctctataaaaggtataaataagaccggaatttgatttttgacaatttttttaacataactaacttgaagataaatcctgacaagaacaaatgcagaaaacgtaagcaattttataataacacttctacaacaagttattattaaattttattttgataaaaaatcaatttaaagtactatttaatactattttaaaaaatacatggtcaaatttatcatttaacaaaataacgaaaaaaactaatcaataactaaaacaaaatcttgggtccaaaatagtatttaccataaaattaagagcattgctattaggcattagtagtgtctaacacattctaaacgtgtcgttttgtgattggttaacgatattctttaaaaattattacattaaattatataggactcaatagttagtgggatcaatagtgatatttacacttaagaagatgctagacaccactggtatactttaattttaatataatatttttattcagatgaaaaaaaatcaatattatttgaatttgtatttaatatttagtttaaaaattaaaaaaaaatcaaatatgctaggaatagtgaatagagataagaaatcaagtaagcacaagcggatagcaggaatcgaacccgcaattttctacaatgacactatagaccaattgaaagggatgtagtgcagttcggtagcgcatttgttttgagtacaaaatgtcacagattcaaatcatgtcatccctacttattatcttatgaacaataaccaattaagaatcctttagcatttctctaaaattatatatataattaaaagtgaatgggataaatgtatgaatttgtacttaccacaaatgcaatattagcagcaacaaagtagttagactcaatagcaacggtggcactattccatgttccaaacttctctgctgtgccgtcaaaagtgataacaggtacattattctcgtctccataaaatgtgacaaaggacttagacctatccaccattatatgttcacgataaactccaccaccaatccacactatcactcttcctgtgttcccagacggaatacttttaaccgcctcggtgatcgtcttgaagtctcctttgccgtcttgcctcaccttcacaaccttaaccgccttctccgccgccgccagttccttatcaagggcgaattttctagtatttcccttgtcattttcgtaggctttcatgttgtgatcaatccaatcgtccagctttgattggtccgatggaatgatgtttggtttggctgagattgtagttacttgtatggccaggagaaaagccataatttttattatggttttcatatctaataagctttaatttctgaacaaaaaaatgctttaatttatcgattaatttataatgtatgatttttgttttgttttttttgttttcttatagaagtgttattgtatttatagactcatcatgaagtttttggtgattgtgtatagattttcattaagttggaaattggtgactttcataccaaactacctaaaagattaattttagatattttagtttaattccagggtattttgtataaccagattttgttactagtgtgggttgtgaattgcttatagcaaggattagtggattgtatagtacaaattaacagctaggctttcaatatatatagtaacatatattgtttataattaaaaaccttttaaataaatggttggtgtgtatatatatgacatgttttacggctatgtacatttatatatatatttacctattaaataattatacgcaatttgtttgatgagtattaattatatattaacacaaattaagttagtgatgataaaaatatatagatgaaaattagctaggaagacattaactataagaaaaagctctaacgataaatgtagtgcctaaattaaagccttctttttcgtgcctatatatgtctttatggacacaatatgtcgtgcctacttagtcatgtcaaaaattctattttgacacgacaagtagagatgaaaattgggcggttaatatacggggaatgcaatccccgcccccatccccgctacctatttatatctccatcctcgccccatccccgtctaataacca

SEQ ID NO: 114808 - DNA, 1806 bp, Cannabis sativa
aaaaattgtgactaattataaaatatcattcttatgttgtgactaaaaggttcgtgactaaagatattagtcacaaaaataagcgccatatgtaaaaattatgggtaagtctacatgtacacccctctaaaaaggtatttcggcagatcctttatctattttgacatacagaaagacttttagtcaaaaaaaaaaattatgcatgcgtgcgttataattatttagactacttgtaactttttcagaaaattccgagtagtttacaatgttgaaaataagatttacatattttgttgcatgcgcgattattttttatatgtatgttaagtaattgtttaaaccaaatttttggcactttaaacaattcagaatttttaaaaaaatttactagtagttctaaataattagaacgtatacgattacgaaaaaaatttagtactgcaacagatgcgaggtctaccggaacaactttttacttgagtctgcttacataaatttccaaaattacatagcttttgaaaggcataattacttttgctgaaaaatgggctccatatttatgaaattctaacataataaagtattagacaatattcaaatcctaattttacaagttattaaaggtgtgttattaatttatcaaaagaaaaaaggtgtgttaataatttataaatttgaacattaatttttgctatgggtgcttgattgttgtcacgaaaaataaaaaggcaagatcatatatatatagcatgacaattaagaaacaaaatattggataccaacaaaataatgtattttttttttttttaaaaaaaaagggaaagtaatgtcatttacctatacataatttgttggtttttaaaatctggtatttttaaaaaattgtctctctatatatattttaaagaaaaatttacaaaatatagtttaaatatagattttttttttacattttaataatttttttatttacattttttacaaattttttttatttacagattctcatttaattttttttagaaacaaatgttactttcccataataataactcaaaacaacattattctgaaacaataaataaaataacagtttgtattattatgaaaaaaaaaaaatcaccttatttttccataacagcaacgtcaaagcaatggtttttcgaaaaaaaaaaaacactttaaaaaaatgtaaaaaaaaaagttaattccgtaaaaatgtaaaatatttgcaatttttatatatttttaaataatatcttttctaaataataaaacattattatatatatatgcttgtattttctttctctatacattgtatatatttttattaatatataaaataattttttctttcaaataataataataataatatgtcattttctaataattaagtgagaatttatttttgaagagaggtaacttttagtcttccactcaattgccgcaatgtcatataactattttatgagtagggcataagtcgttctctcctaaagtccaacatagcagcctccttccatttttaatagtaccacgtatataattacggataataatatatagatataaatatatgataaatatgatcaacatataatttatttaaattaaaaatatatttgatgatagttcttgtgagcatatatgcttaagccctaaagactttacagtaggaataattatatgaagtaccatattttttaaaaaaattatatttttacgtttaaagattttgttttacatttttacggttttttataaaaataataagaaaattatataaaagtaacatgaaaa

SEQ ID NO: 114809 - DNA, 2966 bp, Cannabis sativa
aaatgtgctgcatgaagtttaatttattgaaagggatagcaagttctacttttctaaatatcattgacatgatttattaagttgaaaagtagtgtattaaagaagtaaaaacacagaaaaaaaagaaggaaaaaaaaagagcaagtaataaaaactctgcaactcaacttcaacttagttctttctttccttatcataatgagcaagaagttcggccgcccatgcaaactaaaggctaaaacaatgtaaaaatatacaaatgaaaaaacaccacccatcaaaaaattgctattttagagattttgaaaacaagaatcttgtatttgagaccactttgtgcaaaagattagatcacgatgatgtacaacacatcttgttcttttcagggataacttgtgcagggcccggcacgatgatcttcttgccagtaagggatgcagggttaccatttccttggttttcatcagccgcaaggttcttcttgttcacaatgttgaaaatctctgtgagcacggtcaagaaggcgttctcgacattagttgattccagtgctgaagtctccaaaaagaaaagcccttctttctgggcaaattctttggcgtcttcagtggggactgcacgctggttctctaaatcagttttgtttccgatcagaatgatgactatgttcttgtcagcatggttacgtagctcttccagccaacgtggtatgtgatcgaaggtctggcgtttggttatatcataaacaagcattgccccaacagctcccctatagtatgcactcgtcaccgctctgtatctgctcaaacatcatacgaaaagatatgttatgtgaacaaattcattgttggcagaagttagagaatttgttctttcaaagggcttctttagcatacagtaaaatggtaatataacacatattgatgagatatgtgtaaataactagacatgttaagtgcgtctaaataacaaataccactataacactttaatgagatggagatgaacatctcatctgatgacctatgttgagataaattacaaccggtaattttgtaaggaagctaatgagccatgctaaacatgatcacccaacactccatacaatattttaaatttaaacacgaattttcatgataagaaatctttaaaagtgaaatctctaacttctaaatcttctatagaagaccttgtgaaagaccctattatttattctatttctaaaaaagagagactcctttaagttccacaaggataaacaccagagaaaatatctctaatggttccaaattaaataatgatcctagaaagaccaatggttccaaattaaattaaataatctaatgtaaaagaaatttaattaaataatgatccaaattaaaataaaaccaatggttccaagaaagacaaatcaaactgaaccagaaaattaagaccatattataattaatttcatgttttaaattcaaaaaagaagaaaaataaaaaagagcaaaactatcaataaattgcatggctatgcatcgcaaaggcaattttataaaaataatgtatttctaactatgaaagccaataaggtaaggtaagaatcacaattatatctaataactaatacctaaaagttcgatttggagataaatatatattttctaagatcacggatgacatctgtagatgatagccacaaaaatttcctttttcctactaataaaaaccaccaaaaataaaataaaataaaataaaagattcaagcgaaactgattatgcggcactttctcctccattgaggcttaaacaaaacataaaccttaatcttaggccttgccaaaatcactgcaacttttagcgcgataatatcaatcaaagaagctaaaatcagaaatataatatacacacacaattctaaactagatcaattcatttcaaaattaatcctaccaaaacagctaataatgagataaatgccagaagtaaatcagcgaaagaggagagagtttgttaccgttcctggcctgcagtatcccagatctgagccttaacactcttgtgttcgatgacgagagtcctagtctggaactcaacgccgatggtggctttcgagtccaagctgaactcattcctagcaaaccgagccagaatctgtgacttccccaccgccgaatctccgatcaacacaaccttgaacacgtaatctatcttctggctcgtatcgccgtagcctccaccgctcgccattttcacacttcacctttctctctctagaacttaccggagaatatatagagagagagagagattgagaatcctttccagatctccaaagtgttaaatattttgctgttgtgaaagctatactttcgatttaatgaatcttggtttgttttttgttttaatttaatttttaataataaaagataataaatctcaattatgttggaagatggaaaaaggagtaaactttggtgtaacgttttcagtccaccgagatgggactgacgaattaaaggttgccacgtcatgtgatgctgagtacgattctggattgtgacgtggcgtgttgtgattgaatggaaatgatagtaggtgtggtttgcgtaacagtcgaagagaggtggtgtgtttaaacttgaattattaaaaagggtaagggaaatgggtttgggaatgatgtggggtgtgtcagggattattatgaagcgcatgtttgggtgagttgtctgcttggtcgaccctgacattttttatttatttattttaaatagaaaagggaacatttttctattctcttctctacccaacaattcaaaagaaaatcattttcaaactttgaacccaacttaacaatggattaaggtctatttttttttttatatgagttcgaatttaatgttctattataaaaaaactacttcatatactattttttttattttttttttaaaatttatggtttgagtttttaaagt

SEQ ID NO: 114810 - DNA, 1640 bp, Cannabis sativa
taaagcttttttcacattactagtcttcttaacttaatgaacccaaaaaaaaaagggccaaacccaaaaacatgcaagtggagaagagagcataaggggtcagaaatcgtccacatagaaaagccaatcttcttcttttcttcttcttctcttatcttcctccaaacataatctgattaaaatcaccaactacaaacaaacaacaatatcttcaaatcataacaatttagataaatttcttctcttttctctccttctcacatacattctctaatggcttcactttctctccctaagcactcactcccacctgtgctccctccccaaactcgtaaagacttattttcccaaaacctcaaaatcttctccaaatcatctcactctcagttttatggcaccaagctctcctattctacatctactacactcccactttcctcttccaccaagaatgtcgttttcgccaaggtacattacctttctttttgcatattttactagagttgtcacttttgttcatcaataataattgaggggtttttggttttttttattactttaggtgaaaaagggttcgacaccaccaccctttaccttgaaagatcaggatggaaagaatgtgagcctttccaaattcaaagggaaacctgtgattgtctatttttaccctgctgatgagactcccggctgtactaaacaggtgcttatacattatatgaatttatatatgggtaccctttgaatttgaaatgcataattatcatactatgtcatagaacattgccatattttaatgtttggtttggtggcaagctggactctgtcttgtctactattaaagaaatttagtgtctttaatcactgtaaaatattgccaccactcattaattttaatggtgtgctttagcatatagcattgtctgaacggttactattttctacaggcttgtgctttcagggattcttatgagaagtttaagaaagctggagcagcggtagtcggtattagtggtgatgatgtaaactcacacaaggtaatacaaaactacttgattttctttgtcatttgtcgcaacccaaatctgagtcatcaattccacactgtattttaaattgtttgaacttcataatatccaattgtcacttgatatgcgtgtacctgaaaactctagttagatggcaccaaagatatgttgtcttatgattaatttaaatgtagaatgtcttaagctgttcctaagcttaaaactaacaaattgaattgaaaaatacaaagacttgttacttgttagttatatagttttgtgataatagaaaagtttaaacttgtcataatagctactcatgcttgaattcttatggcaaaagtaaatgttcttctgtatgtaggcgttcgcaaagaaatataaacttccttacacattactagccgatgaaggtaacaaagtgaggaaagaatggggtgtgccgggggatctgtttggaacattgcctgggagagagacatatgttcttgacaagaatggagttgtccaactcgtctacaacaaccagttccaacctgaaaagcatatcgatgagactctcaaaatactaaaaagcatttgaatgtgtcctcttgtttaattttgtatcatctt

SEQ ID NO: 114811 - DNA, 3227 bp, Cannabis sativa
agatttaacccctgcctccagcccgtctatggtttatccgaccaaggagtcacacctaattgtaattgacccaaagcccatagtatgcttgatcactcacctacatcaacatagcatagaataatcaccgtgaaaatacttaagtaaaaaatttaaagcaacttaaaagaaaaaattaaaggctaagtatgtgaaaaagtggctttgttgaacataaaaggaaataaatttgggatttaaggctgcctggtcaaccatatgtcttaacaaaaattaagccatgattaaatctcatatgaccgtctacatgtcttaaaattagttgccttaaacaccatgaaaaaagaaaacaaaataagagattcaaatctctagaatgtcaaaaggagtgggaggattagaattttcactggcctagtccaggttcgaaggccagctcaacaagatgatccactataggatcaacattttggctggcaatattagcaggttggccagcaagagcagcatcttaattggaagtattctcattaggggctttagatatctctaattcctcaccctgtgctatcagggatttgagcaactcagggtccatatacccatagtaatcgttggggttttttcttctacaactcgtagaaagtctcaatggctaaaccaccataggactccttcttagcagcctgagtctactttgaatcctctaactttttcttctcagattccatctcctccatgagtttggaaatctctccattttgggaaactagcaaccatcctaggcatttcttttggtcatatagatcgctcatctacttcttagatgccttcaaatccttctctaatggtgttgtggacgaagtgtctgtaatctactgctaaagatcttcaatctgattctcggcaacaaataattatttttttgacatcaccgagcagggcctgctaatcttaaattttcttctttagagaagttggggcgacactagtacgctttagatgggcaaaggtgtgcccaaactatagggccatctgaagacaaaaactacaagtccaattgagctgcacggtaagtagctattaattagttaggggaagaaaagtaacttacaaaggccacaacttctaggatgctagaagctagggactcaatgggatcattgttcgtttcctgtagctgctcatccacctggaccaggtatctgtccagatagttatggaccacctccttagctttctttgccttaagtggaggggatgtcatacttgatatctaatgatccttgctcgatttgttggttgcagggggttggtgcccctccaagtttgtcacaataggttggttggttggaggagagtagggaggaggcgacgataggtgggagtgaacaatgctagactcccctttcgggtagccttggccagagatttcctccaaaagtgtccattggttttctcttgataaaatatttcagcttggaggccatatctacaaaagcacaaggcacacatattacaagacaaattctaaagataaaaagtcaagtgaaaattggagaaatctgtaccctcccccaaatggggaatattatcccgaaaaggttgtttgaaaaaccctcatcatcgtaagagaactcctccttagtttcctcattggctactccttttccatttccctcaatgatagttagaagggcagaccgggaaatttcttgttcttaaggtcttataataatgggaaaatatcctaacggatcacctctctcaaatttcttctagatagccctctcccttttgcctttctcttatttttagaaagcttatcagaggggatattaaccttaggttccttcctcttggtccttttgttcttctcaaaaagtttatcaaaagaacctgaaggcttgcccgtagatagataaaggtcgtacttgatgaagttctctttcattgccagcttagaaatatttcattttaaggtcgacaaagaaaagatatggttagttctatccctaagctttagggtgggcactagccggttgaatgtgggagccctccagaatgagtggtgcacaccctctgcattatagaccatgaagtaatcctgagcatagccaccaatttttgacatgctatagtcatttgtgccacctaactatatgtagcctagctggctaaaatagaaatcccctgtccggccctgcctagggttggatttcagatcaaaatatcaactgatctcgaagggataaggttgcagccaacccatatgagaataccaaacaaaaagagggaacaagtactttttttttttgaatgaagggggaacaagtacttaatcccttttagagttaattttgctggacagatcctaaaatagttggctatatccttaaagaatgattggagcggctaaatagctccttattctgcataagggccaaaccacaccattcaattcttaggagaggaatgagtaagtgtcgatagaggaaccaagcagcttccaactcccctctttaaggttgaggctccaaagccactagctcttcctatacatggtcaatcttaaaacgtgaatgctcaccatcttcattgagaggctccatggccttgttttgttccactaaggggttgtttgtaatgacatcacagtctctgactagcttctaagcaggtcactcccttttttcaggctcaacaagcctctcagcctgactggcctaagcagcccgctcccttgccatcagtttggcaatatagggatcagttgaaggtgttgcgctatgggtttgctttatcctagacaggtttcgatcctgacccgtataccgtgtaatagtgactacaacttcagcttgtgaaggttttttcggtaaaggtgacacacgtctttctggcaatgtggttgggactcctggatggacaatgtatgtccaagaagttggaaggaacttttgttggtttttatggtactaaataaggtacgtaatgaaagagtttcgtattatctgattatcattataccgtatcccaatggatctccagatttatatacattaaatcaaaacataaaataaaagtttagaatatatacctcttgaagattatcagggtatcgttgaaacttctcgtatattgtatctgttggaattattttaccaggatctagattaactaccatgtatgttgtttaacagcctaatatgaatttctaaaacaat

SEQ ID NO: 114812 - DNA, 1953 bp, Cannabis sativa
  modified_base (1890)..(1920): a, c, t, g, unknown or other
atgtagtagtgttttgttgccttgtatatgttctctaggttgcataaaacaggtctggaaagtttggttcgaattagggttgatttggttgagttatagaattttttagcctttcttgcaccgaaccggaattccggttcagaggggcctgtaggaaccgaaattccggttggctcccaagaaacccccacagaaccgaaattctggttggggcaatttcaggaaccctagtttttcccatttttgtgttgtttagatgatagaaaatccacaataggctactatgtatactttggaaacaaccttgttagctggtgtttgaggaaataaaaattagtagcccggtcaagtacagaatcgaaaatacagaactttggctcaagcttgcatcgaaatagtctggctaaaatctcttctctctaaaattggaattgattgtaaagaacctactgtgatctggtgcgataactttggtgcacgaaaacttgcctccaaccctatttttcacttgagaaccaaacacatcgagatcgatgtgcatttcttcattgacaaagtgttgaacaaagaagttgaagttaggtacattccaacaaaagaggaggtggatgatattcttactaaatcactcaacatatctcaattccattatcttaaaaacaagcttgctgtcacatacacaccacatcacatcttgagggggcgtgttgaaaataatggaattgcctcaaccgaatctggtgaggaccacaatgattaggatgatgacagctaatcattagtctattaattatacaattctgttatttgattcctaaaattcagggatccttttgtactatgtatattccctaaaatattccttttctagaatcatcttctttgtactataaataggagcatattcaagagtgtattgtatccgttgagcatgtaatactgtcagtaaaaagaaagtttttatgtattgaatcattctctctttttatctaggaattactctcattaggttgatggtggaaaataggtgaaagttgccgagttaaatgtggtgttgaccctttgattttggggtacttcactttccaataattcttctattcgggtccttcagatggagttgatctcataactgatgagagacaattggatgtggcgctactcaaccaatggttttcttgattagatgttgattgtattttgacaatacatttgaatttttttaggaatgatgataccctcatctggcatcaccacacgtctggtatttattctattcaaatgggttatcattatgcagcgtcttttgaagacattgataacaactcaagctcttctttggcagatcattggttgaaattcttttggtcattttagttaccacaaaaaatcattatggattctacttgctctatttccaaccaagcatggaatctattggccatgctctttttagctgtaagtacgcacaagcagtttggcgtcattcgaatcaagttcttgactggtccaatttgtcgcaatgcgcaagggagactatcattcatttgtctacaatttacatatacatgttgaaatggaacaaatattttgcactctttagttgatctggacagagagaaaccgagtgatacatggaaacaaagctaagccagccaaaaaactggccattttttgaagtaaattatctgcagaattttcggtctacacaagcaaaatactgcccaaaaattagagcaccagcacaactaccttgttcagttgtggaaccagttttgtggacacctccaatggttagaaaccctaagttaaatgtcgatgcagctaataagttactagtgtgggggctatagttcgtgatgttggatatattttaccaggatatagatnnnnnnnnnnnnnnnnnnnnnnnnnnnnnnnatatgaattctaaaataatgaaagaaacacata

SEQ ID NO: 114813 - DNA, 1604 bp, Cannabis sativa
gtcaaccaagggtagctaatccttgctgacttcaatttatttttctcgtccttgctttctttgtccccaagtgtatagtgttatttatagcattgtacactagattccttctctacttctaagaagaagaagaacattaatttagaaaatcaacaaggcctgattagatcatttcaatattcattcctgcaaattcaaaggccttctaatggacctcttaagaaatattacatttgaaatttttagggaattaaaaaaaagacaagaaataatactaatggagttgtcgaagctacccctctttgattcctactaatgcaagcaactaaaggatatcaccgctttcttccttcatggatggtacctttttgaggactcctcgcattcttccttgcatacttggtagtctgcctcccccacaaccgttttaacttgaccgagccttccattgatcgtcattatcgtgtgttccttagccttggtggccacggatagcaagatgttataacattctcttacctctgtatgctttccctttagagttacaactcctcccggggttggaaactttgtggccaagtgatacactgaagtaattgcctttagcaggttgagtgaaggtcttcccattaccacgttgaaggctgttaggaaatccactgccaagaaggttgccatcaccgtggagtatgtgggttgctctccaattgtcagggccaagtctattgttccaagctattagactaaatatctagtaaattcgtatattggtatcgcataaggcttcatgtctttaacccctaacccatgttcttgagggccacgaagtacaagatgtcaatagaactcccattattgataaaggttcggtgcaccctcatgttttcttctagatcacgatagggattgttatgggaaaagtgtacacccttgcttcctcctctgtgaaggttatcgaatcgttttcacctttaaaactctttggtaacctctgctctaggctccaaacctggggttcatgcctcgcattgcaagcttacttgtctctccccttgcaagtgtctcctcctacaccgagcccttcaatgagtgttcttatctctctcaacacttctggggcatcgtcaagctcctcccaatggcgtcctttgtttggcctctggttttcttttatgtattttcccaagtatccgctatatcaactcttcaatctcgacctcaagtatttgcattctttcttgtgatggccgacatccttgttgaaccggcagtacttttctggatatctcttggccctttctttcctcaagggaagaggcttcttaaaggcactcgatgttcatttaccaagaatatatgctccctcaaatgggttaggtctgtgtaatgggagtactcacagggtactaactccacctctttcttgattttcttgtttttttcatcgtctttgcttctgaatcccattttcctatgcatttccttgtcgtgcattttcctgggttgatcatgttgggttttgtgctttaaatataacccatttcaatataatcagatttactaataaagatcagaaataacattttttatgttgcatggttcac

SEQ ID NO: 114814 - DNA, 2030 bp, Cannabis sativa
tctccctctttttttttttttttcatttttgtttttatcgacattttctaaattcagggtatatttaccggagcctgtgggatttcactggaccatggtgttgcggctgtgggatacggtacagaagatggtacagattactggattgtgagaaactcttggggcagaagctggggtgaggcaggctacgtcaggatggagcgtaatcttaaaggcacttccacaggcaagtgtggaatcgcaatggaggcctcttatcccatcaagaaagggcaaaaccctcccaatcctggcccctctcctccatctcccattaagcctccggcagtctgtgacaattactattcctgtcctgagagcaacacatgttgctgtcttttccagtggggcaattactgcttttcatggggttgctgcccgcttgagggtgccacctgttgcgatgaccattacagctgctgcccaaatgaatatcccgtctgtgacgtcaatgcaggcacttgcttgatggtaagagccaaccaaattaatccatgactcattcgtagctagtttttattagacttattgttggtctatctgaacatagcacaccaaaaaggggtgtttttaatcatttatatttttatatacattttatgcaacagagcaaggacaatcctctgggagtgaaggcactgaagcgcacacgtgcgaaacctcattgggctttcggaaataatggcataaagagcagcgcttaaagcaagggtaaacaatgcgtcagaagcttggcttataagaaattacagtacgcttagtgttcttgtcttggcatactctcatttcaatcccatcaccaatgtcaatatgtagattgatggaatataatataaaatatgactctgtaaatagcgctctattttatgctgcatttggacgacaggcttatattgtcagcttcgatgtactctgtaaaagtataattgtagctacaagtttaaagaagctccaaaaatattttataatatttttattacatttttctcctgtctttgaattgttaatattttatcattttcaaaatattattttaatcaatgaaaatgtttaaaaataatgaattgctattagacactgtagtgtctattagtaatattctttcaaacttattacattacattataagttaacgtgtaattgtaatataaatatgtgagataaaatagataaagcttttggtaaaatattttaagtattaaattagagtagagaagctaatgtgagtgctcctatttatttatttatttattttttgtagtttttaattattatagctcacttattattgtgagtgatccagtctccctttccactttattactaacatctagacccaacaatacttatacactctcacacgtgtcatcaattctcactattaccctattacttcatgtcctaacataagtcccatgtgtaagggtttatttatatttttagtaagtggtatgtcttttccaaggcactaagtaaaataattttaaaatttgatgtataaggtttgttaataaaatttttggcatatttagattgacaaaaatattttataatttgtatataagatttcagctgaggtatattatatatttttcgtttatatcttttatttatttatttcattaaaagtaaattaagtgtcaaacttctttaaaataaaaaaattagacacaactgatacgttttaatgatgaaatcaattctttatctttcccgtcattttttatatggtattcaaatcttaaattaatttcctaaatgatttgattagatcttgtgtgaagaaaatcaaaataagatttttctttactataaaaggaaagtcgcacatattgcttacgattctgtaggtacaaattcagaaataagtgaagaaaatcgaaataagactttccttttctacaaagaaaagttacacctgttgtgttttatgccctaaataaaactctttacaatctgattagttatcaatataaggaatttgaagtgat

SEQ ID NO: 114815 - DNA, 4551 bp, Cannabis sativa
tatgcaataataaaattggatatgagtaaagcgtatgatcgggtagagtgggactatttggagttgttgatgttgaagttggggtttgcatcttcttgggtaacattgataatgagatgtgttagatcagttcattattctttcaatataaatggtgaagtagttggaaaagtgattcctactcaaggattacgtcagggtgatcctctttctccaaatttttttcttttttgcgcaaaaggtttttcttcattgctttgtcaagcgaaataatgtaatcaattacctggttataaagtggctaggggtgctctagtgatctcacatttgttcctcgctgatgatagtcttcttttttgtcggggctccacacagtcttgtcatactttggaatttttttttgaactatattcaaaagcttctggtcaggtatgatgctcaaatgtattgactagctatctattgtattaactagattttatgccagtattattttattggtttatttaattcttttattatccatttatatatttacatatttcttgttatctagattttacttggcaaatacctgatatatattttttattctatctattaactgataatattttggtgttacagattatcaatttcaacaaatctctgttgtattttttcccaacactccagatgatatcaaagaactttttatttcaacctttcacatgccgaaaactactgcaatagaaaaatatttaggtcttccgatgcttagtggacaaaataaacgaagaattttttcttatattaaagaaaaggtgtgggttaagcttagctcttggaattcaaaattatttttttggaggtcatgaagttttacttaaagcagtaatataatcaataccaacgtatgtcatgtcttgctttgaaattccaaaaactacttgtgatgagctcgaatcgatgatggctcagtattggtggagttcttcagttgaacagcaaaaagttcattagttggcttggcaaaagttatgtttcccaaaaaataaagaaggattaggcttccgttcgtttgtatcccataatcaagcattgttagttgcacaagcatggcctattctgttgtctcctaattctctaccagctctcatttttaaagctaagtactataaacgtactgattttctcaatgcagaaggtatgtcttttaagatttatttttggaaatagatttgttatttttttttttatttccaatctaggttgtttaaaatgagatactatggtattacattttggatatcttaagtttacagtttatagtgcagttttttttattatatcattataggaatgtggctgaatttagcttgatcgactcactggtgaatgaattgagttttgattaattacataagatataggtgaagaatattggatctaactttcaatattctttttcacaattctttttataggaactacatactgttgtttctattgtgatgcaatgatagtaattataatttttttttattatttttgttcatccgaatttaattaaagactaaaatagaacaaatggtttttgtaatgcttacggtgtattccttagtactctatttgaccaaagattctaattgtaagtcttttaacatttatattgggttaaatgtaacatacttacatatatataattgagttctacgcatatttattaattataatactgatgattcattttaatgataagttgcaattttattaagagtttttttaattattttaatgagtatgaattccttgattgctgactttattttagacattataattttttatttctttattttcattccagagggtgatcatcctagttatgtctggaaaagtattatttggcgacgtgctttacttacaaaatgattgcgtcgtcgagtaagaaatgagaatagtatccatatctttaaagatcattggctacccagaccttattcttttctaccagtaacaccagtgggacaaaattatgaaatgattgttaaagatcttatgaaacaagaaactggaggttagaatttttcagcattggattctatatttaatcgggttgatcaagagtgtatttgctctattccaattagtaagttctcaaaagcagatagctagatgtggcactatacaaatgatggtaattattcagtaaaaagtggttattgggtggcttcaaccagtgattctgtagatggttttccctctagagaagtcctttcatcttggtggaaaagtttctgaaaattgaaattgccatctaaaatccttaattttgcatggagaggttttcatgaaatattacctaccacttgtggcttaaaagagcgaaagattgttttacagtcgacctgtcatctatgtggttttgataaagatactaatagccatgcgatttcctggtgtagtgcttttcgacaaacttggaaactcttgcactttagttttattgaaaatgtattagtggacgtgagttttcaacaagttctgctgagagcttcagatgtgttttcccagtcagattttgagttcttcactctttcggcatggtatatatggggtgaaagaaatagtatctcacagaaaagatgtgcaacatccaaatgtgattctttcaagaattaaaattccttcggatgagtatcatcagattggaaaattacctatatccacttttactaaaggctgtaattcggctgctacatggtcagccccacctattggctgtttcaaattaaatgttgatgcaacaatcgatagccatactcaaacgattggaataggagttataataagagattcgagtgttctatagtagcctctctttgtaaatcattaatgggtaattataattataatctagtaaatttctaaaggaaatcccctccaatatatactacataattatatatatatttctttatattctatattatatattttacttgttataattttttaattttaattagttttattttattttattattactatcatgagtaaaagattcttgttgttagtttatcttttacaggttttattttctcagagtgttgatgttttgttttgtttttcatgttgtttctcagttatccaagcagagtgtgtggctttacttgtagctttggactgggctcttactattggtctatcattacattttgttgagtctgattgtttagcagttgtaaatgcattttcaaaacgctcttccttccttaatgagcttggttccttattagaggatctagctagtttaatatccagctttcctgaagtatccctaatccatgttcgtcggacagccaatggggctgcacatggattagctcggcatcctcttcgggtggatagaacactagtttggtttgatgagattccttcctttgtttggagtttcttaattcttgatgtttgtatgacattatgatatctttttcaatgaatttattcattgttacaaaaaaaaaaaaaactgcttcccattatctaaaattagcttgtaaggaatgccaaaccttcagataatggctcgatacacaaactcgtgtagttttgctactgttattgttgcaaaggcttcaacctcagcctatttggtaaagtaatctacagcgaccactgcatacttgactcctcccttgccctttggcagttcgccaattagatgtatgccccaaattgtaaatggccatgggctgatgatataattcaaattgctcggtggtttattgatgtatgtggcaatgcgttgacatttgtcgcatcttttagcaaaataaatcacatctgcacgcaaggtgggctaataataacctttttacatgatctcagggctaaagagtttccaccagtgtggttaccgcatatttccctgtgcacctcatggaggatgtagtcgcattcatcaccatcgatgcacttaaaaagtagctggctaaaacttctgcgatatagcacgtcatcgtaaataacgtatcgagcagcttaacaatgtaatctcttggcttgagcttatcgtcaagaagcttgccaattttcaaatacttgatgattggattcatccaagtggtttgctcgacaacatctatctgtctaacttcttctcaatcaatcgtgggttgatcaagtatgtccacaagaataacattgagtaattctacttcttgagttaaggccattcgggccaaagcatctgcatagaagttgtaagcacgaggtattatactaacaataattttcttaaatttagataacaattcacaagtataagcgaggtatttatatagccaccctcgtcaagccaatccattgacctgacagaccacgatctaggaatcattatgggcttcgaggtactcgactttcaattcaagtgcgagttttaatcccgcaattaaggcttcatagtcagcttcattattggaggcattaaacccaaatcttaaagtcgcatgtaacaccctaactagcataggcgtattacatgatttttaaacatgctgtgca

SEQ ID NO: 114816 - DNA, 2414 bp, Cannabis sativa
attaatacttattattatttttttgattcagactaagagacgatgctcgtggcatagacgttaaatgaacaaagtgataattttgcaaatgattggtggtttgagtgggtgccaacctagttggtatgtactcaaatcatccaacaaaatcaaaggatggtacaatttcatatatataattatttcacaaatgaagactctataattcttacttcatgtatgtatccaatttcaaaatatgtttatatcatagacagaagaacaattattcttataatgcaatacaaaattatttgacatatttactattactaatcaatttacctttaaattttcaaggcctaaattatttagaaactaagatattcttggaaatgtggatgtggatcataagtattattatgtttttatatttgtgcttcaaattaatggatagagtcataaaatatgtattgacaaagaatataaaagtatcaaagctaaccttaattagccaatgataatgactaaatcccataacaagaagcttttgacattaattgctaaacaaaagtaaaaaaaaacaaacaccaaaacaaatttgataattttggtattatatgtagccaagttgatgacaccaacaaatagttagcacctaaaacaaaaactactatcttttatctttcttaagagtcagaaatcttctatcctaacaccattactggcaactagataagcatccttggacctagatttcttgactccagcagtgaaccataccttatcggatttggaactttcaactgccacacaagtgaccttaacccaaactagcacctttgttttcattccctcaattcctgttagctttccccttagcagtatcgctttcactcggtttgcataccttattacagatgaatccttgaagctaacttcgcacggtgatggcaaatacacgatcagccttgcctttgtttcatcaaattcgtaacaggttatgttctgaggaaagagtcctgggggtaagttgtactctcggaggagatctggcaaggtttttggtggtgaccctacaacaatatcatcaatgtgaattatagggtatgatctagacaccattaccattttcaagatatcatttcagagagattaattaacataaaaaatacctttgagtttgttgaaaatccagtttgctttctcctcaactgtacttgacaaagtctgaaaaccaaaccaaaacaaagaaaatctttagtgtctgcaggtggatatcttgtaagacagtttagattcatttcttaattgccattcaaaccaatttctataagggttgttacaatttcttggtagaaaactaactcttagctctaaaactatattagtcattttcactgaaaacagcataatatgctctcatcacatctcatctcatctggattaaatttaaacagagttctcttcctttccttaagcttttttctccataatgaaatgaatcatctaagcataaaaccatcaaatgagaatctgaacacaaaatccccaggtgaattttactaatgaaccccatttatttaatgccaattgtagttgtagactcaatcactcagtcatatcccaaaatgttcacaacaacaaacctaaaaaagccatcatcttttccaaaatcaaatctttaaattcccaaaatcttcacagaaaaacagcaatataaagggaatttccacactttgaaggaaacaatgataatacaaaatgggtactaatcaaataaacccacattaccaaaacaataaagtgaatcacaaatagaaaaagcataacaaaagattgaagtaaaaggaaagaagcccaagaaaaaagaaagtaaagaaaaggcatttactttgaatactaacacaaaaaatgaaaatgaaaatgaaaaaaagagaaaaccccattactatttagtactactctactcacagtgatttcctcagagatattagagagttcttcctttgctttctttgaaatccataagcttccaacttttaagctacccacttttgtcagagccttctccattcttctctttctctctctctctctctctctaaagctttactcactcattaatcagagatagaaagaagaagaagaatcaacaaaaatggttgtgtgtgtactgtgtagtgtgaaaaagtggcgcttttagactttggtttaaagaagtgaacaagggtattttggtaatttcataaccatatattctttctttctggtgctcattcgctataaatgtgctgtactctgcatggtgagaaaggctcattgctgattgagccttaatctagttaaattatgtgtcatttaacaagtacactctcaacaagaaaattattattaaaatctcagactactttaaccccataatataatttatt

SEQ ID NO: 114817 - DNA, 1472 bp, Cannabis sativa
tatacaacctcaatttccatctttttaagctagactgtataaagtataaacggccggtttacataatttgtattaattttttagattgccaataaaaaaaccttaaaaaaatggtgcttcttactactttttttgtttcttttttataataaggcctcctaaaaatataacaaaaacaaaacaaaattttaagctcaaaattacataaagaaagaactcatggtttaaatgatgtttcactctcctctattagattttgaacttgggttctttctcttccttgatttgtttgcaggaaattttttgttcttggattgtctatgcttcttggtctgttgttttggaggcaatgatggttttccatcttcatcttcctcatcagaccggtcatggccatcactcaatgaaccatcttcgtccgaactcaggaccaagtcctgtacaatgtcttcatccccagctaactcatcatccacttgctctgtctttctcttcttttttctcttcttttttgattccttaggtttctcattcctgttaatttaataaaacagcacaaattaagaatatatatatcatgcaagaagagagagagagagagagagagagagagagaatcttatttaaccatacttggaatcagttcctggcaaccaggaggaactaaacacaactgtgccttcctcattttgggtatgatcttcttcatcgtcactttctgtcatctttttcccaaagaaggatgagttttcaccaacaacaacgctgcaaattaccaccacattagatttagatgcttatcaccaaaaaaatctttggaaaaggaaaaaaaaaataacctggattccatcaaggaattgtttctttgttgtgctctttggcgtaaaattaagacaaattgtgacagagggctcgcccccgccttcttctcatcctacaacagccaaaaacaagttcttcatttgatcaactataattagttcgtagctttttttttttaaaaaaaaaattaattagttcatagttaacataataaaaaatggaaaatttccaattatattgtgcaggattgattctgttttgatagattttagtaacaaaaatatcaatagaagagaaattcgaatattcctaaatattgagtcaagctttgctagttagaagcaaaatcaaacaatacaaattcataatgtaacactctacacgaaaaatagaacatacctcaagaaaagacgccactgcaggattatttggcatataagagattgacatgcgtttctcatttgtaaatacagagttagcctcaatctgagaaataaaagagtatgaacattagatgcaacctttgtacatgtcaacactcaacaatcatcaattcacagaccactataagacctttgaacaacactaaggtggcatttggttgggaggaatgaaaatataaaaataggaataggaatggaataaaattt

SEQ ID NO: 114818 - DNA, 2562 bp, Cannabis sativa
atagccaagtaacttcattaaaaggaaccagaagcaacaagatatagctcaaataaaaatcaactacagattttattcacatgaatatgatttgtaatttccattacaataaaaggataatcatcttgaaagatgtttggaagaagagtaacgaataaatcatattcaataatggtacaatgataaaacaagtaagaacatgaacaaatgcagttcaatgaactactgaattaacataattttacctgtgataaactgcctgcaactttgtgctggtctgccattgaaatagtatcctgtccagaccaaatttcacctgttctatcaaccccactattagaaggctgttggggtgaatgatcatcttctggctcctctttgtgtgtaggaagagatccttgagccatgtgcaaggaaacattcccactgtcatctacagaagttaatccccaattatttccaaaactaccaatgtgacgtactagacgacgattctcccaagaaataagtgggggaggaagtctagggttcatgtttacattggagcagtaatatgaaaaataagcaggatcagcacgtaactgttcctcggactcatattttccaatatcaatatttagactagccatgctttcacttgtttgaaagttctgctgggaaaaaatattactgacagataaaaaagaaccctctatacttggaggtgcgcttccacttcgactaggagctacatcttttccactgccagtaaacctgtggcctttcagcagtaactttaaatcctctgctgccataccagcagatgattgagcaaaggtcgaggcctttttatgggaggcccactttccactagtttcagacattcttattggactctcagtagccatattattaaaagatcaatgttcctcttgttcttcttgtagtagttaagacaatcacatagtaacctggtaaaacagcgaaaagagtataacacatttctactcaatcactcaatatgtggtgaggatcaacatactaagtaaacaccctaaaaagatatctgactctgaataaaatagtacatttaatgcgtaattaaggggataaacttaataagaaaaaagtaaatgtcaaaaatataaatcttctatcaagagtggaaaagcatatggaattcctaattaactgaaccctaaaagctatggtaagaaacagagagttcattattttgacctttacagaatgagctgttttcgtgaactttactactttatatgggagatcaagatagcattttcaaaattaagtaaatcaaaggtaccaaagaacaaaactcgatcatactagaacaataatgattggtgcaaactttttttcagagggcgggctatacaataaacaatatccatacatgaacataaaccgatttcgtaattacacaaaattatgacaaaatgaaacacccattttaaataaaagatcccaaaaatgcattatacttgaaaatgataataataataataacttaaaataattttctttttcagtaccagtcatcaataaaagaaaaaaaaatacggttttacctcaaaaactaaaccaaataaaatttgtatgagtcaaccctttgctgagaaaactatgaacaccatccacctccatttaagcacctcaattttggggaaaaaaactcaaataaccgacaagggaagagacaaggactgtataagtatcatttacagttaaacgcatacacatatcatcccaaaatagcaactaagctaccaaccaccataattaaattaaaaaaaaaaaaaactgaatttaatacattcaaaataacaactttccttttttcaaaatcagcaattatcaagcacgcaagtctcaaccaatttagtcgaagaagaaaaaaaaaagaataatagtgataagagaatgataattaagacagcaacttcagtttccgtgaaaccctaggtagagtttatatatcacaagaaaggttggagaaaatggtctgaggtttctcttaccaggagtataggtaaaagcgaaagctcactgttccaaaacaaaccctagattcttttagagagagagagagaatggtgttattctaaaaaatgatagttttggatggaagttggaacccaggggatatttaaaactgtgttgtgttgggtattaggagaaaaaaaggtatttccaaatttcagataaggttatttcttttgcttaagttttcggttttatatttattatttttatttttgtctctttttgagtcgtggactttggttggattaaactgttttttttttaataataaaaaataaatattatggtttaaaggtgcagcaaaggaaagagtgcacaaatatcaaatgatccttgaagtgtgggtagaagacaaaagagttactttttcaagggctaattatagagtctttcttatactatacacttaacagtagttgaccctttagaatatcaacacgtgtacaatttacaataactaaatgtattttgggatttttttaagttttaaccaaaaaaaaaataagaaatttttac

SEQ ID NO: 114819 - DNA, 944 bp, Cannabis sativa
  modified_base (134)..(144): a, c, t, g, unknown or other
tgactttgactaccatgcatgagtgataaaattatgagtattgttattaggtaccaatactacttagaatcttctcgatatgtcgagttgcgattggctagcgatatttcttaaaagctattatattaaattannnnnnnnnnnatacttaattacaccaatagcgatattgacacaaaactagacactactgatgtcttttagtatttctctaaaattatgtaaggacatcacaattaattaataagcttgacttaaccaaatttcatggcctaatttcgttaaataattttctttttggtctttttcatatacgtatacatagtcttaccttaacgtagtctttacgaatttatagtagtttcgacgttgcatggtaaatgatgaaagacttttgtggctgttgtttttttgaccattacacttaatcatcatcatagactttaataattaatcaagtaataatagatattaaatgcatggtgtctttttcatagtttggacgtgaaaaatacgatcgaattggtttcattattgtccacatatcaattatattgatcaaaataaatggaaatgacatatctataaaattcagttttttccttttcttttcaaatgaatttagaaaattaagattattaattttaattagctatagatacatttttttaattgatattttcttaatgagtttgacactacgtacgtgaatgtcggttaattaattaattaattaatgcactaatatattatcaaacactattttttgatgatatcataattcatatatagacttttttattggtcattgtcatcattatttcgacgtaaataatacgaattggtttcatgtggtcatgattattttcatttccacttggtaaatacgaaataatatagctatatatatataatagaatctctatttaagaatattctattca

SEQ ID NO: 114820 - DNA, 2938 bp, Cannabis sativa
aaattaattggattggatcagatggtaaaatctaacatccaatatatgattggatcggatctggataggcctaaaaatattagatgtgatccaatgaacaccctaacccactaagtccacttgaaaaatagggtttagagaaatatcagcatcaacctctcgatataagcttggataagaagagggaaaatttgcaggtttcccttgtcagaactacaaatggaaaaatctttcccaaacctcccattcataggtttcaatgctttaggtctccattgtgagcgtgttactgacgccttaaaatttctcctcccatcattcaacagttaattttgtggagatttttatagtctataattaataaattaaaaaaaattacatttaatattttaaaagacattatttttattaatgggagttataacccccacattagtactagtgggtctgtccctgagtattggtccaacataagtttttttttttttttttgtaagaaatttaatataatttaatttaataactatcataaaatatcactcaattacaagactccacttaaggaggtgataatttacagcaatgctctaaattttaagggaataaaaaagagtgggctgcactcacaacaatgttcctttctattaatacaaaaaaaaaaagaaaaaaaaaagaaagcaaaaacaaatgttgtgctttaagttagcagagggtgtgagaagagggtaaagagggacccaagaaaaacaaagcataggcatcataatttatgataaaagcgcagatagtggcgtgaattgagccttcactgatgataaataatgaatgaaggccaaagcaaaaacacaagttcagtggtgcaggagccagggccacgaccaggaccagggccgcacgctcgtttaactttttccattcttcttctttttctctcatctcaatattatggccacgccttttctctctctctctctatcattatcatttatcatatcaactgttaataatcttcttgtttttttctaaaaccaccgctttcacacctaaattttgatttgcatgtgccaaaccaaaatagataacctacttaatttggacacccaagaaaataaacacactacccaaaattaaacattaaaaaaatcaacctacctatatagattatctttgacaagaatgcaggtaaggtaataacaatttcaaacatatgtgtagaatttttccagtttttgtatgaaagagaaacatcactaaatttgatttttattaataaatagtaacgggaattacattatttacttgtgtgaaattgaatgaatgagtttccatactttttctttatttcttcattaaattttgactgcactaatgttgacaatttacttaacattagaatttttttttcatgataacatatttattttagaaaaattctacaatacacactaaatctactaaagtactcaccaatttagcactatttgtttccacatttggaataatttttttagtcaatttttttataatcttttgcattttattcatttaggatatttcacaaaatttcgacaggccaaaaataaaaaaattaatgccaaaatagagaggatgcctcaataaaccttttttaggaatggatattgtaacagcatcctttactttattaaaagaaaagtggaaggtagcttggtcatattgtaaagtacatgttgtacagcttgtgatagtgtctcaatttttccaactgcaaactttgactctctatcataacaatgtacagtgaagtctatgtatgtgtatgtatattataatggtgcactgctagccacagcaagagccagaagagatctgtttaacagatctaaatctgagaccttacttacagtaactattactttatttgatatatacctcataagaagtttcgtttgggaaatactattgttaaataggtcaatgattgttgaataaagctcgggatcatacagctacaccaagtgttaataaatccaacaagtaattttaataatatatgtattatgcttaaacaaaattacttcaaatattattttttaatatatttttttaaatttatagtttgggttattctggtatggtggtttctatgtaggttgctatgtaaattttagttacgatttagattgatatgttggttggagtttttatgtgaatttttgtaaaaataaataaaaaaaaatactattttaaagtgtaaaaagattaaaaaaaaaaaaaaaccctaaaaaaacgattgtatcattcactggcttatgttttaacatttaaaattttaaatagttttaattagggtaaatagtgatataagtacccaaaattttaagtttgtaggtgacataaattcaatgatttttttagtggtgtaagcaccatatatttataaaactgtaattttcctcttattttatcagtatagactctgttattgtattaaatagggcacatataaggctcaaattctaaattattgggtctaaacagaaatatgcagtatcaattacttttgaatcttcttttaatacattcaaaatggagtctgtactgacaaaaatagaaaaaaaaattatagttttataaacattaggtatctatatcgctaaacaaaattattgagtttatgccagttgcaaactcaaaatattgagtacttatactactatttacccaaataataataaaaacaacaaccaaatcttaataataaaataaataaataaaaataaatacaagtttgtaataaagaaaaaaattaagatatagaaacaataaagagaaagagaaaaagaattatattgtacccactttactttatctattttagtttttaccttcatttctatattctttataatatacccacttttatagatgatggccccattatacctcttaagttaat

SEQ ID NO: 114821 - DNA, 4352 bp, Cannabis sativa
aattccgtaaaaccgtatttttgtaattttagtgttgtttttgtgtatttgtgaaataatccctagttattaagcattagtggtgcctaataacttctagatatgttgctttgcgattgactagcaatactctttaaaaattattatattaaactatatgagacctgatacttagttgaaccaatattaatattaacacgtaagagagtgcttggcgccactggtgccttttaacatttttcaaattaaaagagaaatgctaaaagcaccagtggtgcctaacaccttcctatgtgtcaatatcgctattggcgcaattaagtatcgagtctcatataatttaatgtaataacttttaaggagtatcttcactaagcaattgtaaggtaacacgtctaaaaggtgttatgcactactgatgctcaatagcagtgctcaaattaaaattataactattcacaatgttgtaaagtaattattctttcaaattttatcatactggacaaacaaaataacattgtgaatatttatatcatttgtacatacgccacatgtgtaatttaaaattaaaatatatatgtatttattagaaattatttagctaaaaattaattaatgattaaaaaaatttaagtaaaacttaattaaaaattcaacttattttttaaattaattacacatgtgacactgacagaaatagtgtatactgccacatcatcattctttttgtcacatgtgacaaaatttgacagaatgaccactttacaatactatgagtagttcgatactatttttaacatgctaaaaaatttaggagtacaaaagtacataagtcatagtttaggaggcaaattttttaaataggtatgtaaaaacttatatttaagtggagacataaatataaaagtttatataaaataaactaaattataagaggctaacaacgtaagcaaagtgacaaattaatagaattttgttggatggtactttaaaaatgcaaacggaataatagtttgacaggcgttttcactaaaatttaaacttaaagaattaagtgcaaatgaaataagagttgtgagaggatttagtttctaaaaacttatgtatagaatacacataaatataaatataaaaagtagtgctaaagaatgaatagattggtaggactttaattctattattaacaattttaaattttttatttttgttttatatgtgatactacaaaaaatattttttatggtacaaaaatatctattttaatctctgttttttattgtttaagtactaaaactaaattcaacaaaaataataattaaaaaaaagctcaaatggaaaaatttatttgaaaaaaaattatatttatatttttaaattgaacaatttgtgtcctcaagcagtgaggtgagtccactattaataggggaagaccatgaacaaagtggagatccaggtcagtgattggtgtactctgcgatagaaaggaataagagttagatcactaaacgaaaggagacatattctactatgctatacctctgtaagtattctataatatatgcatgatattgatgttaaatattaatttacgtaaaaaaataaaatcattcctattaagcatgttttcctaataggtggtactttggatcagttctgccatcgtatagtgtaatttttggctccttgaaattggatggaagtagttctgcttgaaaatcctttgagaaaaaggtttctttatcaaactcctcattatcactcaattctccttcgaggtagtaactatctttcagcgtaggtcttgcatctctgcttctagctccttcatcattttgctcaacttctcttgggggttagcagatggaagtttgaccctcattagggtttgtatgggggttgcgtgaggtacttctccaatttaattatagtgtgacttctcaccgaagttgagggatagggtcatacatttgcctcccacttgagagggagtcataggcgaggttcccctaacatgaaaccttttgtatgaagtttctccttacaaccatatggtgtttccttcagagtgttcttctgagggaggtcagcttgagttgtcctagcagatccgtagggcacccttttagcgataggtctttcttcgactgtcctcgtagggtatcactagtagagaacatggagctccccttgttaacttgcatggttgattgtcctctctcttatcatttccctttgaactttaagagcgaggcgtgagtcttgcctttgagtatgctattcagcacatttttcatgtcggtcatcgtggtttccaacctccgatttttcaaatagaggttgtttatctcctcttcatagcagtggatttgaaactttaactcactaagtacacttgtacattctttctaaagtacttacgctttaaatgattgaggttgcgacattagtggcgaggcaggatgagatattgtgagggtgatggagctcttggtggggccttacttgatggtttagcaagtggtgtcagaatcctagtcgagaggagtgctctattttttggcacgttgactatcagaagagtggtaggcgctatcagacatcctactggaagtggtggtctcattggagaggtgtcattttttggagttgtaaatggttgtatcataggggaaggtacttcttcctcttctctgtgggagtatctctccggagaaccatggatctccaatggtggtggatttctcctaaactccattgattgaacctcatccatgtataactctattaggttaagatgcctaaatcatcttggcatgcttaaatagtgatgatttcttagaaaaaatatagcttaaagcttgcctttcccatagacgatactagattgttgacgactgattcttgtcaacaaaataaaggttgaaaaattacaattaagatattaaattaaagagtaatatacattaagaagcttgaagattataaagacaatggagaaaaaaaaaagtctttgtatttcttagagaaatattatagtgattttctaaccccccctctttaatagaagagaagggtctttataggaggctctcttgaccctaatttacaggttgatacttatgtggtccttttagggaccatttagtactttgacggtgtcaggtgtaagtgcagctggtagtggagcagaagtagtggtggtcaggtcgtactaacataaaaagagcacgcctccattacttgtcccttccgtacctcatgtacgtttattgcactaccttgggtcttgtaggaagtacggttgaactttctgacttgtccttgaatacgcatgcttcctcaccctttttcccttgtgcttaaaaatttactaagtgttgaggccacgagagccacctttttagagagctagatggacgaaccaccttcatggggtccaaggtgggtaaaccaccttctcagaggctaagtaaggtgggccacctcctcggagggctagatgggcaagccatcttcatggtccccactacccaaaagagagaggagaggtgggagagtgaccatggcgcaaagagagtgttggtgctaagacctccttggtgccaatgagagagagagagaataggagaagaagtgtcaagtcttccttggcaccaagacctccttggtgccaaggagagagaaaaaagtgagaaagagaaagaaaaaggagaagaagtaggggcataagtgccaatgtctccttagcgctaagacctccatggcgccaagacctacttggcaccaatgggagagagaaaatgagaaagaaagagaaagagaagggagaaatacagagaaagaagtaaagggccaagacctctttcatgccaaggagagagaaaaagtgccaaaaagataagggaaaaagaaagtgaaagaagtgaaaggccaaggagaaagaaaaaatgccaaaaagagaaaggggaaagaaatggaaagaagtgaagggccaaggccttccttggcgccaagacctccttggcagtaaggagagagaaatagagaaagagagaaagaaatataaagatataaagaggaaatgatgacctcttggaacccatcttaagcaccatgaattctcacttttttgtattttaattatttattcgacatttattgctttccaatagggctgagcataaaatttagaaaattgaaaaaaattgttcaaacttacctaccgaatacctttggaaccgaaactgatgaaccgaaaaccaaaaaaatcactaacgattaaaaccgccattgaacagtcagttttttttgggtaataaaccgatcgaaaaaatcaaaatcgaccgttatac

SEQ ID NO: 114822 - DNA, 3023 bp, Cannabis sativa
ctgggactgcagccccttccggagggtacgcgaaagaggtttctctaacacaagtgttcttatcatgtcctatgaagccacagttgtagcaaaatttaggaagacggaagtattggaattgaatccattcttttcttcctcttagaatatccaggaagaatccaggcgataactggtgttgagtagaaagttctacttgaaacttcaaaaatcctcttctcgctagagttctttgatccattataacatagcccttgtattcccctgcctttgctgctattctgggggtattcatcgcgttgagatagggagttggaagccccgtcgctctaacccagaaaattgccttactcatgtcagcattgctccaatctccctgttctggccattcttgtattatcagtaacttcccattgatcagccatggtctattttccaatatggagacataatcctcctctttgtcgaaaaagataccccataaaccaggttttaaagttttaaaacgctagcgtccctgtaatttccatttctgttccaggatgtccttcagacgtgttcttgagacccctttcccttcaaaaaagcttgccagaacccctgttcgtgtgatctctgcgtttatctcaaaatctggttccaaatccagggacattaattgaagaaagttttgtcccagctcttctattccttcattcttttctccttctcctaccgcattagtgacttcagtagcttctgttgcctcagaaccctatttttcttttaaggctggcccctcctcaaccacctgtggtgtttgttgaatgtcttctactgaatcttcaatcattgtgtcattaatgatttcatcttgtcccgcacgatttactgtattctccatcctcaagcgaagttggtgaagaatatcgaatgaaataaatgctataatgaatagcccactttcactcagaactctcaaaactaaagtaaaaataactgagcagtaaatattgtaaacagtagtgaacagtagacgttatgaaaggagaatcacttttcacacataaaactgaacgaagcaaaaggaacaaggaaaagttcaagaaattcccttggattcactgaaaagtcttgcactttaaacaaccatcgtgtcaattggaaactccaattctctcaacagagagtctttggaattaaacaacaaatcccacttgaaggaaaagcttagagagagaattttattttctgttgttcctttccccttaaaaatacatatatataatttatataacataaaaatgtacctagtgctagctggctaatgatcagtcagtattgtttactttggttgtggtgattgggtgtgctggtttacagtcaatttcaattatgtagcgttttcttctaattttaagttaagtgaagataccaaagtttcgtaatttattgttaaaatatataatttattttataaattttttactttaatagtttataaaaaattgatgtaaatttaatctggtagaaaatttttattacaataaatacactatttttaaaagtatttttgagtggttttaataatttattattaaattataaatttttgacatttattttttattattttgtatattaaattataataaaataatgataaagtaattattttttctttttaataaaatattaattatatttaaatttttacaataaattttgtaattgtacattaaattatcatactaaagtttgatgtaaatatatcacaaaatcaattataataaaataaatttttcccattaaagatgatttaagctttttttttttttttgactaagctaattagtttgacaatccatatcacatgaaaatcttatactcttcataagaatatatacctttttctacttattttaagtatcaaactttcctgttaatcatgatcatgttggagatggtggctattgagaaagttttgggaatgatgaaaaaaaacactaatattttgtaatatatataactgcgaagtttattttgatattttaaaaatctcactaacttctttaataaattcattatttttttcatataaaataatataaataattgatagtatgtccttacagttttttggtcacttgtaactcaccatgtttcttagatcttgcctgtgaattttcttagagggcatctacgcatgtggaactgaaaataaataataactttaagaagttatcttgttagtaatttgtttagacacaacatttttgaactaaaaaactatttttattcatcaattttgtctttaatatgtgtttttgctacgcaacatacatctttggagtagtaaaagcttacaaatcaaagtgtacttttgaaatcacattttggctacttctgtgtggcataccacgcaagggccatcagtgaagagtgattatcatatagctcttcaatgtttggctacctctacagggcatatagtgcaaaggctatcactgaagagtgatggagacttagctcttttctaaattcctctacggtgaagcattataggaaccactactgaagagtagtgttttgtaaaagatggtcagtgagagtacatacttaccgagatgttctccattccattgtcctagtaggagagctaactctatgttctcattgtacttgcccggcttgaatgcacctttacttgttatcttgtaacttggtgcggacatttttcagtttagtccaaacatgatttttactagatctttggtattagggaatacttttcgaaggacaagtcttctatgaagaatttcctctccttgacttgtttgttgaagtacctggaaacttttttctggcagacatgctgctttaagtggccttggtctcttctttcttctatttcgtcaagggattctgctagcatgacgtggttcacttcttggtcaaagtagaccaaaagtatgagagcatgctgttggcgaattaggccagctgcggtacagaccaagtggctgttggattttatgccctaa

SEQ ID NO: 114823 - DNA, 759 bp, Cannabis sativa
aagtaaaaaaattaaaaacactcgtaaaccaaaccatagaatgaggacacatgaggtcattgctaataattagattattatcacatcaatcgacatggagtgggaatcgaacagatatcaataggagatatatagattacatacgattggataaacgaacgaagcactgaaactaatcttacaccgtgaaacacccaccaaataagtttcaataaagtacaccaacattagtatagtctccgcatgataagctccccttaacttgggttgcaatccgttagcttgttatattcgtgtttatatttagacagattacaatatcaaaacttaacttaatttgacccctcgtcgacatttcatgttcacatgttcttacactccaagttgataaacacgagaaaatgatatgaaatatgagacataataagaaaatatatcacactattttttcacatttaaagttttttatggtgtttacatttttataaatctaatatcaaatctcatatttgatatttttatctagtccaattaattttaatttttgttttgtttattttgcatttacattttaggatatttatttctctatttttttccttctctagtttttttagtagattttgtatttatatttggggcattatttgattattggaggattcgttttgtatgtcgtattataccgtattatattgtatagtgttatattaaagtatatttcatacaatatttttatgtaaaactatgtatggtatt

SEQ ID NO: 114824 - DNA, 1801 bp, Cannabis sativa
  modified_base (1756)..(1762): a, c, t, g, unknown or other
aaaaccgtagaaaccaggataatttccatagtaacttgccccaaagttacaataagcttcatgatcccaatagacttgttccattttaccgttgtattgatctccataatgggacccctcatgtccagctccagctgcagatgcctcgttagactttgtagtagcagcattgttgctgtaattgttgccagcactttcaggattaaatttttttagttccacctatgaaaaaaataaattacaattcatgaatgtttacttcatagcaattaccttctcatgaatataaacatcaaaatattattttacacttgataaatcagtacaaaaacgtaccttagcttagcataagataatgttaaacactttattttctatatttatattaatatacgtctattttaattatgtaaaagatatccaatgtattgtaccttttttcctccaagtacatgtactgtatcctcctttaagattttttcaacagcatcttcactgctaaatgtaacaaacccaaaacctctagatcgcccactcttaggacatcgtatgatctgagtgcgaacaatgtcatcgtactttttaaaatactcctccaattgatctgcagtatgctatactatggtaaaaataaaatggagaagctacttatcacggatcataagacaaaagaagattataaggttcaataacagcaccattgctcaaacacaccgataatccaccaacaaaaatcattttcttgtcagatggcgccttcattgagtccttaggaactgtccttttgacatctacctgatagagaagcattttgtttaccaatcaattaacagagtggaatgtgatatacctaaagctggtgacctataggatcaacaaaaagagaaaattaattagggaatagacattattaccttcttaccatctatgacatggtcttgttcaataactttatcggcatcagttggattagcaaatgtaacaaacccaaaaccccttgggttcccagagtgtttgttaagtattataacagcgtctgttatctctccaaactgggagaagtacttttcaaactggcctgaaaataacaaggtcttctatctgataatggaattcatgttgaaaataaaattggaaaggtaggactctatatttaaatcaatttaatctattacatttacaggaattgaaggagacacagtggaatttgatattggtttttagaaagaaaaaaatcaatcaacaatgccgtaaattctcacacatctcatctcaaataactcaagaatacaaacatgtccaaaagaataaactgagcattattcattcccatcttacaatattatcatgaacaagtaattaaataaatattaagcaagtacctttacttgtgctccaagaaacccctccaacgaaaagttttctgcaacataaccaaagaaaaacatattacagtacaagagattaaaaaacagaaaaatagaataacccttgttctgcacttaaatcaagcacccttatatattgaaagctaaatcttctacagtacaaaattcataagaccttcctgaagccgaataattagggccagttggaaggtccacaatggctgcaccgttttcgtactgatccagttcagaacccattgtggcttttcaaattagcttttttcaaggtacaaagagatcaatatagtagcttcactttaaagaaatatattaaattttatacagactaagggcccgtttggcacagnnnnnnnaaaagctaaaagctgcttttcaaaaaagctgtgacaaaa

SEQ ID NO: 114825 - DNA, 1522 bp, Cannabis sativa
  modified_base (64)..(66): a, c, t, g, unknown or other
agcataaaataaaaagcgctggcaaaaaagacttttcctagcgcgtaaatgtgctggtaaaagnnngattttagccactgcaaatatatgttggtaaaactttaatctctagccagtgcagtttgcgaaatgcgctggtaaaagttacttttaccagtgcagtagcgaactgtggtggtaaaagtgacatttcttatggtggttgttatatgcaaatatgccacataatgaaagttatatatgaaatattgcttgcatacagagaagatacatcgagagagtcaaaatattaattgggttcttcagcggtttaagtataattggactggattagacagcagcgtgagacaaacaatgttattcaagtgaactttttatctatttttttttaaaaaaaaaaattataaatatattttaaattaaaaatagttaaagtaaaagaatttacaaatttatctatagattcattttttatttattaattggtgaaaatatataatattaaatttaaccgtacctaactttttgaaatataaaataatattaattaagcggtaaatattcaattaattctaagaaaaataatatgcaactataaatatatctcatcttgaaaatatcatactagagttatattttatttaaattattaaaaatattaatatataaatttaataaaaatatttattatattatatcgaatgattagtttaaattgttattaacatttataatattttattattaaaagttcttgttatatgaaagaaattgtatcattgtttgcgtaagggtgacacgtggcgtttacaaagcaggattaatccttaactacctggactaaaacccttccataagggtgggcccagtccaaatggaagatgggccaaaggacgttcgaagcccagaaggctcgcttccaaaacgaaggtcgtccgaatctgaaaggcctccagccttaccaagacgaaataagttaaaccaagctctccgaatgaccaatgtgatgcatctggagatggtatagcaagaggtacctccagaagctctttataaggtgacatggctaccctctgacttctagtcccaccgtattagatcttatctcctatgtcagaacatttagtttttatggtcgatttcagagttattaaagcaaaagtaaaattttgataaaataatttttatctaaaccataagcctaaggatctaaacataatgaatatagattaaatctaacagctgaaaaaaatttaattacctcttgatgcctataagggtatccttgtttacttttttataacaatcgaacatctaatcgaagaacttgattgaagaatctacaccttgatctttcaagccagcctcaacactcaggaatagaatggataattagatcttaaaggatggacaaattcaggtattacagtgtgtagtcaactcatgtgacactgtaataagattagggttttaatgtcacactcactatgtgtaacgccctaatgctaaggcacgctacagt

SEQ ID NO: 114826 - DNA, 1525 bp, Cannabis sativa
acaattcatggtaataaataaaagatttgaacatccacataattattaatatttataacaagtaataatttttaataattattaagttaaatcatatggaactaatacttaattaaccttaattaatagcgatataatattttatactaagaatgtgtaacaatgctccagtaccaagaaaagaaagaatgagaacttttctttgtcattaatgaatttacagtatagattacaactatattctgtatacgtatacatgaatgtcaatgctgcaaaatctttacaactagtgttcaaattaaactgtttggagagaggcttgagtaggtaaatttgacaaccattctagtaaagccttgttcacaagctctggaacttcatcatgtgggcagtgcccagcctgtaagctaaccagagagctattcgggtagaactctttgatccgaatcgccttggcagggccaacccatgggtccaaatcaccccacagcaacaagagtgggcaactcaacttgcttaagacactgtctagagtatattgagtttgattcaccatgaacctactcatcaatctgtaaaaccaagcatatcaaagttcaaaccatgagaaacatttctacacaccatgaaagttatgatatgagatatgagaaggaacaagtttaatctgaacctgtaataaacttctccagcattgggatctgctgctggcattgttatagattccacaagatagtcatccacattggtattatttacatacacctgtgtataataaaatatgtatgtatcatatgaataacctgagctagagttgttatggtgacaatttttgcatctgtttgaaccattttaaaaaatagagttcgatttgtcatttaacattataaattttgcaaaatgtgatagagatcgaaattggaaccccccactgcaatggggtgagagaagatcaaacattaaactaattaagaatgagcacatttctgagtttaaatgaatgaaaggagaagcctagtaataactgactcacactttttaatacggataaaacccgagatggctgctttgcttgccagaacagaaatccgagtactaatcgctgaaaaacttccttcaatggcttcagtaaaactttttgaaaggttgattcttcagttttattagtttcactatttggatttccaaattgtcctgcagaatttagcagggcaaccccaataacttgttctggcaacccagcagctgaaacaagagctgtaaaacccccaaggctgcaaatgcattgtgattcatatgatcaatttttacaatttccaattcaaaagctcagacattcatatataagagaaacttttcacttagagaataattagattgaaaaatgttgccattcaaacaagttcatcccaagttaagtagaaaacctagccattttattgtagattattagtattattacctgtttccaactaaaactgctggctctttcacaatctctttcaaaaaatccaccacctggtct

SEQ ID NO: 114827 - DNA, 934 bp, Cannabis sativa
acgctgaaagggcttaaaaactgcctctaaaaggggtttttgtagtagtgattgaatatacaaagtatcaaatttatattttaataaaatataaaataccaaataggtatatgtggtattattctttaacttcccaactgacattcagttaagttagttagtcattaactaacacaattgtcaaaaatgacaagcaagcataatgagtcattggcctatatgaaaaaaactcaactaaaaaagggagagacacacaacatatagtagaaagagaagttaaaataaaacaattatatgagagagagagagagtcgggactgggaaattgtattgagcaacattgataattatataggattagtaagttaatgagttgggattataccatgaatgacatactgtgattattttcttgtagctctataaattgatatttttatttctcatcaataaataagagtggcagtgcttttaaaactggagtaggaccaaattcacattgaacttcatatctgaacctgtataattctcatgtgttactggaaactatctaaatttatctcagtatttatattttttgtttgatacgtattttttggttttgttcttgatttatttgttttttatttaatatttatttatttaagtgtgatggaattacaaaaattaattcctacatataaatttcctacagtatacatttgaaaaataattaaatatatctattgttaaagataattaaaaccctttatcatggtgacaaagtcaagaagctgaccattaatttgtgttaatattgaatgttactattagatatctcagtgtgtcttttattgtgagtacatatatatatatatatgagatttttacacctcatgtcaaaattgacaccttttttacatttttatccttacacggttttttaaactttttt

SEQ ID NO: 114828 - DNA, 2549 bp, Cannabis sativa
  modified_base (2504)..(2505): a, c, t, g, unknown or other
aacgtacttaactccactccctgtgggatcgacctcactcctggtgagtctaatacttgaaacgatacgtacacttgcgtgtgctaaatattgcaacaccaaccttccaatttgcccatgattttatcttttaagaacaaaaaatcattcctcttctttgccgagaaaaagaaagggtttcctatatatttctcctttgcctttagattgttgaagcccaaaatccctttgacttcttctctgcaagaactctttgtgttaggagagaaaactactccactcttggcactacttacccgttgtcccaaccaactttcgtatttctcaagacaattcagcaaagcatccgtgttttttgcattagtatgacaaaagaaaatggaatcatccgcataaaacagatgagtaatcggggaagaattccttgccacactaacacctttcaaatcaccattcttttcagctcgtagaataagtttggataaaacgtcactacaaagtatgaacagaaacggcgagagagggtcttcttgacggagaccacgcttgggattgaagggagccaagggcgcaccattaagaagaactgagtacttgaccgaagtgacacactccatcaacaatcacaaaccttgctattaaaaccattcgctttcaaaacccacaagagaaatttccattcaattcggtcaaaagctttattcatatccgtcttaaccgccattaccccatctttacctctctttcctttcatagaatggagaacttcctaggccaccagggaacactccgcaataaatcggccagggatgaaagccgattggaagggagacacaagtcgatcaatgcaccctttgagacgatccgtcagaatacgagaaatcactttgtatccatagttgcagagacttataggtctaaattgatcaaaggtatttgcactagcagtcttgggtataaggctaataaacgtctcattgactctctccatcatccgcccagtaaggaagaattgttgcaccatagagcaaaccgattccccaactgtgtcccaatatttcctgaagaagattcttgggaaaccatcaggccccggggctttgagaggatgcatcttgaataccacttctttaatctctccaacctcgggcatccgacaaatagcttcattttcactttcagagactttctcaaaaaacaaagtttccaattcatcttctatcacaggattggaagataggaacatttcctgaaaatgatcctgaaagtatttcccaatgttatccctacctcgaatcccttgtcccatatcgccccacacagcgcctacataattacgtcttctcctgatcaaagtggatgcgtgaaagaactttgtattcccatcgccgaatcgaagccaattctcacgggacttttggcgccatatcctgctcatcttctcctccaaatcaattatttccatttgaattgctgcctcttcagaaaccgaagactgatcaataggcctcctttgaattttctccagctgatctcgaaggagtcttagctttttatcacagaaaccaaaaacattttggttccagaccttcaaatctcttttggttatgtttagctttcgagggagccccaccactctcccgaagtcactatctttcttccaagcatcttcaactactagtctgcaatcttctctcgtagtccagacctcaaagaatcggaatggatagttcagcttcaagttatccccccaaatgtccagcaatataggagcaaggtccgagccaacaatcggataattacgcacacgggcattagaaaaagcagtacaccagtttccatcagcaataactcggtcaaggcgttttcgaattcgtttaccagctagccttgagttttgccaagtgaacattccaccatcactacccaagtctactccaccacagttaaacagaaagttactcaaaagctcgccttccctagcatcgaattggcggccactaaccttctctgtatggttgataattgcattgagatctcccataagagcccaaggctccttacaatcaattactttctccgtgagccaattccgaaattcgcgtttagaagcaccataaggagtaccataaatacaaaatagcttcaattctggacatcccataacagcttgaaacgagacaagaaatcctgtctcataagtattcaccacattacatagcaccccgactctccaagctatacaaaagcccccagctaagccattggccgggatacaccactgattcaaaaaccccaggcgattcatcacattaaccatggtgtccacatccactttagtttctgaaagaaagatgaaatctgcatttgaatcacggattaatccccaaagggtcctttctgtcgtggatcgtcgtaatccacgacagttctaagataagcaccacatgaggatggtggtgttggaattattttactagaatctagatttactaccaagtatnnttcattaacatcctaatataaattctaaaacatgaaataaacac

SEQ ID NO: 114829 - DNA, 1763 bp, Cannabis sativa
aaattgtaatttgacacgtttttcgagaaatttctttgattagaaagattgcacaataattgaaaaaacactgtagcgtgccttagcattagggcgttacagtttttttctatttttcttcattttagttatgagttataatatatagaatacaatattttttaaaaaaaaaaaaatatcctttgaactatttcaaagttgactaagtttcttaattgagactaaatcaacggctaaatatttcataaatacattaattcacaatagataaattgccttggaccaaaataataattaaaacaataaaaatgtgataaaattacaacacaggtgatttgactttctactcaaatactgtacttttttattctagtttcttaattaattagtagatcacatttaaaaaagataaataattaaattaaaaacaattagcatttttaccgtgaacttttataatactaattaaattgtgtcccacggtttgttgataatatttttcgaaatataacttttataacagtcctttcatcatttatttaattttattgtgaaataagtgaagtgatagatgataattgtaaatggatgcaaattaaatacccttcatcatttttacgtaatgaataataaaataaattgaaatttttctttttttaaaattaatttatatttatatttttaattttaattttttttacgtaaaaatggtgaaagttatttaatttacattcatttatcaactagaccatctactgtgtcactcacttcatgataaaattttatagaatatgatgaaagaactacattagtatattaacgaaccatatactataaggggcacaacttaatagtgtaaaaattcaagagataaaaatgttaattattcttaaattaattagtttgaaacatatgtttaattagttaattattattatttagtaattagttagtatcaatattaaaatattattaattatttaattggttgaagtttacttgtccttatttaaatttctatttttattataatctcatgcaagtaaccatacttttttttagggttaaatgttttcgacctaatattatactttattgaaaaagttaattattaagatctagttgttaaaaaaaaattattaagagggagaaaaatataaaagttgtacatgtatatgtggaaataaataataaaatatataaaaattatgagctaatcctctcattgttaattaattttgagatggaatcgcgaacatatatcttatcctaaattctaacatggtatcaaaacaaaaattaataaataaaaaaaaaactctaactattatccaatccaaaaaaaaaaaaagtcggtcgaagtagaccaaatccaaaaagtagagccaaagtccaaatagccacaaaaaaaatctcaaaatcgatccaaaaagtacagccaaaagagtcacttgaaattcggggatcttgaggagatgttagtagagtgtcttatattgttaatatgtggaaagatggtagcatatataagattcatgacttcctcctctcgttaccaattaattttgagatgaaatctcgtgcatcttacaattctaacatacaaaaaattgaaaaataaatacttaaattaagataatttatatgcttgtcatattccaaactatatacagtagaacctctatttaaaaatactctattcaagaataacctctaatttattataaaaaaaatgaagtcccaatttgggccagttataaata

SEQ ID NO: 114830 - DNA, 877 bp, Cannabis sativa
gacttcataataactatggtctttattcatttcttttttttttttttaatgaaagtaaccacatgataagatcattacatattccaaatttttttaaataaaacctctccagattaactccctatctagccctaaaagtttcttagccatatgatgagtatggacattacaagatcttggctgaaaacttaaaaaaatattagggaagcgagacaaagagtcattaatgtcattaactatgtttgaaaaaactgaaaaatctttttttttgctcttcactctgtctatcagctgcttcgagtcagtgacgaccttagcaagaggcattcgaacattgcagcaccaaagcaatgctgatttcattgccagagcctctgccattgtagaagttgcccttgctgccataggtaccgaaagaccagcgaccatgttctccttccaatccttaattatcaccccaagcccaattttaccactcttagaattgatagctgcatcagtaaacaattgataaaacacctcatttacttgattgtcttgctccaagctgtgggagttgttcgtttaattacagtccaccctcttggactgggcatccatatactccacaatataagtattgatcctcttcactacatcaacaacagacatgttagttctcccaaaaagtttgttgttcctgtttttccaaatagcccataatgtacacaataatagcataaaatcatccttatttaaagtagaaaaattaattaaaataaagtcttgaatatctttatgtttatagtgaaaataaaagtggctaagggaagaaattttccaaacctgtctcgctttggaactgttgctcctaaaatcgcccaatatacgtggacca

SEQ ID NO: 114831 - DNA, 2981 bp, Cannabis sativa
  modified_base (2918)..(2925): a, c, t, g, unknown or other
aaatagtaaattgaatgaaattagacaaaagtttttaaatctaacaatctcaataatttaagggaaatttttaacggcctgaaaagttcaaaaagtatgatttgatacatgttaaggtttaggggccaaaaatcctaggttcagacattaattaacataaattaaacccatggtactatttttgtaccattttaataaacacaaaatctgatttatcatcttacaaaatatatggtgttatcaataactttacaaaataaaaatctaaaattatatttacactaaaatttatttgatcacctcaagttaacttattatattaattatcttgttgttaaatggactaaatgtatttatatatatagtactacgtataaatatattattttttttgttaatagcttatttttaaattgggtaaatataattttaaatatttattttgtaaaaattattcattgaactttctattttattaaaagataaattgggtctcataattttcaaaatagtgtaaaataatatcttaacatcaattttcattacaataaaattttataataatttgacctaaaagtgcctatgatcatactagctaattacatttctcgcttatattcatgctaagaagttgttatgttgaaaacaaattgaggataattattagagtactattttgtaaaattttaaaaaaatatagtatctaacttgttatttaaaaaagaaaagtttaatcagtaattttggtatattctaaaataatatttactctaataccctaattaaaaggtagaatttaaagcctagtttgtacgtagtgtcggtgcaaatagcttgcagtggccttcgagatattttgttatactagatctcacatgaatcatatttttttttttatccgaagaatcaattctctattgagcccgtgaaaaaaaaaataaaaaaatagaaactcgtattgtactagagagctaggacagattaatagctccttggccccataacgtactcgtgcagaaatgtctttcaacatcactctcctaaattgtaggagagagagagttttattattggtagaatgtatactgctatatatacacagtttctaacttctttttttgaaggagtcatatatttcaatgttttcttttcttttttttttttttgaataaaatgttttcttttcttagttaaaagaaaaactattactttttataggtgaaattttaatgcagaaatgactaaacgaaacatgcatgcagttcaatggggtacctacatgcctctctatatttgtaaatctaaacaagatttctgaagctttaaacctaatgattttttctattaatacccctaaatgtacaacatcatctctaattcttcaatatactttaaagtgggcttaaatgtgttaattattattatatagttaaacgagtcttttcatggccactctcttttttttattttcgataaccatgatcactcatgtgaaaaagtacattaattcataccattttaagcagagaatatatgtgtggtagatgcaagctaccttgtcaacaagattaattttgctatttttcagaaaaatatatttttttaacatataaatttaaaaaggatttttccctcctaatctatcaccagtaatttgtttttttttttcttttgtgcttcttaattagaataattatatgtaaaacatgaagtatatatgatcataaatgaagtgtgtaataatataagtatatcgaacatatatgcaaattacgaaagagatcgaaattcctccaactattaattctttaagtttcaatctcacacaaactttagatctacaaaaacacaaaaaaaaaaaaaaaatgctgtttagtgtaggtaattagacttccaagctctctctactctatttagatagatttactgtattttaccaaatgagtagtgagcttgcaggagactggtaccctatatttatattggtgagacctttcatcacagtctctgccacaattaattgtcagaatattttgacaattaattcagaaaatataatttgagcaactaaatcaaaccaaattggctactaaataatgttgaccatatttagaatattttgtcaattaaaataaatatttacattgaatacaatcagttagacttaatgtaattaataattctaatattacaaaatacttacattctcccacatgatcgacattaaattaatgtactaactcaagcgaaatgattacccttgttaaataacaaatatacgaatcatggcaataggtcctcattatttggcgagtattatcttccatgtattatgataaattattatataacaatgtaattaatgtggcaatgtatttaagcaaataaatcctaaattttatgtttattctggtcctctaaagaaaattttctcaaatgaaattaaggtgcacatagatataaaaaaacatcaaaattagagcttcattgaataattttacttgtacaacgaaaaactacataggggtaactgaatcacatatttactttacgacattgaatttgtgttgcggtatgcctttagtcaaggatattgcgatcacccaatttagttttctgtgcttagtgaccacttatcacgtctctttatggctaaatacttaatatcgatatgttaccttcaacctgtaatcttatagttctcagtcataaatactatagctgaatttgtcgcaaaaattttttagtgacctagaaatattattctaaactagagacctagtataaaactctataatataccatacaagaagtatcctcaaaaaaataaatgaatctcacttctataatagaaatgataattaaggttctgtacaatacaacttactagtaatctttgttaattccatttttggcannnnnnnntgacaaaaatattttattatttaatgtatatttcggctggcatatattgatatggt

SEQ ID NO: 114832 - DNA, 3979 bp, Cannabis sativa
  modified_base (47)..(49): a, c, t, g, unknown or other
ctgaatacacgtgtcctttaaagaggagtctggtctcgagtttctannngagagaaatctcactataacacgatcgaagtaaacaatatctagggtttttgaaaaaaagtaagaaaaaaacttgcatggagatgacatgctataaagaatagagatttgatatttggaggagatggttaaaccaaccctaactagaagccattaaaagatatgatcatcatatcaaacattaaataataactaacaaccatatgtatagcttatatctatattttgattaagacatacaccaactttgacttcacacccttcatatcatcccctatatacatattatgaacataataataataataataattaatagctagctaatccaaatgttgattcaaccattaaaacattcatatggataataataacaacctaggaattattatgagatgattacaaaaatgggacccattttcttataatataaaatagagaagagaaaatggatttcacgtcttttagtgccgattttgacataacggacggtgcatcgtggggtatccaaatctttaagataaccacttacacaataatttatccaaatcaaactatataaatctacatatatatatatatataataaatataaattgtttcaatattatatatatataataataattaaagacgaaataaattaaccacattactactatgttaatactaatttatttgtgtttatataatattacacttagtagttactgaaggttagtgctaaagtatgtaaattttggagttcttgtataaatagtttaattatcattaaagtaatataattttgatagtaaaactttttaaagctattgaaagtattttataggggcagttttaatattattaataaaaaattacaaaaaaaaaaaagttgaagttgacaattgattaaaatgagattttctaccactacattgaatactgtcaaaatttgtattcaaaggtacaatacttttaattattgagaattacattgattttaaaaaaaatattttgaaaatagtaatctaccgcgagattagcttaaaaacaagattaaaaaaatatgattttgtagaattaaactatattctctaccgcatcacgatcgataggttttgcagtaacttcagaggacacagtatgcaaataatgcaatgggagacgacaaatgggacatgttttgtggactcgagtccaattagtaatacaagtttggtgaaatacatgattgcattgtttcgactcaacaaccacttgacctattgttgaatcatcatcgattttgaataaactttcgagacaaattacgcatttatcttctttacgttcctctttgatcacattttgattcacattatcaataactactatcgaaataagttcatgttgatgatgatgacgatgattatcatcgtcattgtccccgtgataagcatcgggaccctcattgtcaccgtcacgagcatcatcaccctcattgtcgtggtcgcggtaatacaaccaacaaatccaaaaggttaataccaccatggacataaccatgaatattgctaaaactatggctgttatgctcacaaaattccattcaaatttccatgaaacattattatctattattgccatatttattgaacgttgcaaattaattatttgttgatgtgtttgatattaatattatattatatgatgatcgatcgatcctcaaagaaaataatatatatttgttttgtaaaattaatatttagtttgatacacatatatatacataatatttcactcctaatcttaattggattagtatatataaaagatatgatattatatattgtatatttgaatttaaaagatgataatttataatatctgaaaaataaagataatagtgtacgtaaattgaagattttttattaaatgattagtaataaattaacagacttaacctttcgtgatttttattttttaaattaagacttttcaagaaaatatatatttagtcaaataaataaataaataaatatctgaaatatctggcctcttttttttggggctcccgtaataaaaataataaaaaaatatataaatatatattttttatttgaagaaaatattaattattaatattgtaaaattgtaaatgatattctctctttaaaagaacaagctttatacatttcaaaaaaaaaaaaaaaaagaactggctttattttattttttttttaaaaaaagcttagtttcgaaccaagagaatgattaataatattcttattttttttattaatcggataatatatttaagcattgttaggtagcgtttcattaaccaatcggataccttaaaccaattggtttttttttattttttttattagtcttattttttttttctattaatcggaaattctctaaaaattatttttttaagaaaaattgctaaaagacactactggtgtctaatactctactgattgtcatattgttattagtgtaattaagtattggatctcatatgacttaagaaaataattttaaaaaatatcattaactaatcataatgcgttacttatatagaatgtgtttggtgctattggtgacgaataataatatttttttttaaaattatactaatcaccaatagtaaaaaaaaatattaataccaataatattttttaacacttctctccatatagaatttagtgtagctagagattaggaattatgagccgaaatgaaaatatggattttagtggtgattttgacaaaatggacggtgctttgtgggcattacatctttagattagcactttcacaatttaatacataagcttttttatttatttattttttatttttttctatctaattataggacatgtttctttcaaaaattaaataaatagttatatcaaatctgttttgaaatgtgatcggaagtgattgtgtaaatatttgggaatatgtaattattatttattttaaaatactgtttagatatttaatagtaattatatgaagtaatttattttacacaagtttgtaattgtagttaattatctaagaacagtaataattcaccattacattcaattctcatatggtatgacctcatgagaatgggaaaacataatttaaaactctcaattaaagtactaatagtatctaatactttttataggtgacgttttatgattggttagtaatattcttaaaagttattttttaaaattatatgagacttaatatttaattacattaatagcgatattacactaaaaaagatgttagacactactaatatcttttaacaattttcttccttcaaatttcaaattatataatagcatatgtgtaattaactagtttagcaaacactcaattccactatgaaatattacactcaattttaattactttgtggcttttaacacacaactttttcaaagtatatctactccataaatattaacccaaattaaaaatttacccctaatcttttaaccaacttaaatttatctgtcacactaccacaaaaaataaattatagatcgaatctgatgaaaatattattggttcgtcaatcgatgcctacactgctgatattattggtttaggtttcgatattattaagaaagtgtgttagacaacaatttcaatttaatttcatccaattttattaataaatgcataatctaattcatgtactaataaatagctccaaattcaaacatgtgtcaaattctttatcatatatcaaatcgtgcccccaaactttaaatataacaaatcgtaccactcaaacttttgtccacattatgtgcccgttagtaaaattaaacttaacaaaagcctttaaatctaactatctcaataattcaggagcacaattttatacatttaaaagttacgaaattcctaattaccccttatattataatcatttctttgtaca

SEQ ID NO: 114833 - DNA, 3324 bp, Cannabis sativa
  modified_base (3286)..(3294): a, c, t, g, unknown or other
tgcaccttgttaatataggtagtatcaatcaatccatttaagccctctttaactgtttagtcacatacctacacagtcttagaatcatcacacttgaccttcctcaggatatgtgggattgcacaacttacctagtatttttttcttacaaatcacgggactactgactatcacacccccttatagggtccaacgtcctcgtcgagcacacttccgattatgtgaaggctctaataccattctgtaacatcccaactttaagcctccattgggcatttccccacgaatttatggctcttatacacgagtacgtctctctggctgcttcctggactgacgactcgccctacaaaccaacacaagtatttctagcatgagttttcctcactggcatgctttttgggaaaaattgccaagaggtcaaaaatcctaaaattatcccaggtcaagcacagttaactgttgagttctttcgtgatgggctaccaagattggtgacctcctgggaagttttcctaggaagcatgcgagtgagaaaaaagcatgctgaaagtactcgtgttagtgtatagggtcagtcgttagtccagaaagcagccagagtgacgtactagtgtataagagccataaatccgcaggggaaggccaataaaggcttgaagcggggatgttacaagatgtgtgctccatacttggggcactccagagtttccttttcttcgtgcgaggcatattagacaactttttgagaagggtaactcgggatcattgaattacaactcaaatgtaacatgggagggtcttgtatgacacacaagtgtctagggttagtacctgtggatcatactctatcacatgttgcccaagcattttagctagggcttcaagcttcatctttcttgcattccggcagaggacacttcgtagatcttttctttgtgatgaaggtcttctcattaatttcgttccacatcacttagccaaaaatttgggtaacaacatataacagaatagaaactatagatgtctatatctattgctaacactcctactcaattattctaccaagttcccaagacgtaagtatgtctgtaggataagctggtaatgaacaagtcaaagaactcgaataatagaattaacttaaagcttattcatgtcaggattcaaatcaaatttaatagtgaaaaactaagtaatattgacttagaatagatataacgataagtttataatatatgttctactgtcaacatcagtctagaccaatataaacctacatattcaatttcaagtctatttaccaatcccttgcaaaagagataccacttgccctaatttaaatagaccatatcgtcgattatcatgtcagtttaaattcggtgctctgataaatctcaaaactaaaaatattcgaatcatataatcacaagtattttccattgtgatgatatcactataattgtaaataaatatatactcttgatctaatagtatttacatattatacatataatcgcataaaataaacatgtgaataaagcaattgatatagacataaaagattttctgttttaattattgggaaataatgagaatattacgtagagatattttatttaggacataaaattccaacatcaaccacacataacaatccgaatagattattctatctaagacagtatttaagttgttctcataaccttaattaatatcaaaactcccacttataatattaacaattaaggacaatataattcatttatgttatgttttttttaattaaatcctcgtgtacaatctcatatatatacttaattcagtagtttactaaatcacaaaggatcttttctagataaattacatgtaaattacatacaattatgagtgaataatacttttttatttaaatatccagtaataattttatagatatatgatttaagggcaccaatcccaataataatactaaatttttaaaaaattaatttcgagtaatttacaatatcgattgaaggtttggagtttttttaatacgtgtagtaagtcaaagtatcaggaactttgttgcagatattgtaaacaatttaaaatttttcaaaaatgtacaaaaataatattataactataatgaagacagctttcaaaaaaatttaaatatatatatatatatatttatatattccaacatttgtttctgaagcactcctcatgtgtaaaactcattattttgaaatttatttgcactactttatattattgagaatgtcatgaaaaattgttagagatgttgtatactgtcctataaaagaaaattggattataatttttaggtctcagacgttcttatcaatgtgaccaaaatacatgccattaccaaagaatttttggataaatatattgtaaagttaagcaatctcaacaatccatcccttcttgtcctcaatgacacccctttgaatcccaacaagacttgtgtagagtttatgagataccgtttgagaaccggttttgaatccgactcttcacattaacacatttgaaaagaattagacaggaaaaaaatatctctttcatattttagtggtagtatttcgaatttagtgaggttttaaaaagtaaaaataaaataaatagaaatttttgttttttcgaataaaataagtggacatttgaaataccttttgctgtgatatgtaatagaaccaacaaaagcaacacctactgctgttcccgtacaaaatacctcatctgcttccatcaattcatccactgtaatgtcacactctttaacctgagatcattaaaatataattaattacataaacatataacaactaaaaaagcaaacaacttaatattctgtctagcaaaattaaatatgatggttgttatttgtttaaatttaagtagtgtttagttaggaggaatgagtatataataatagaaatggaaatataaataagaataagaataagaataaaatagaattaaatttaaaatgtataaaaaatatatgaatttttctgaatattcattcctttttttttaaaaatgaaataattattcaactaaaatgaaatgatgaaaagataattctacttgagtagcatttcaatataatcaaacaaaataataaaataaaaattattttcttactattccatcatctccaaccaaataccaggtaagtttagatgtcatttgttccttttacaacattgttgtccattcattgctatatatatatatggaagagatttcaatggttacatttttattnnnnnnnnnatggttacatttttttaagccattggatta

SEQ ID NO: 114834 - DNA, 1643 bp, Cannabis sativa
aactttggttcaattggagtttggcactgactcgaagagtgcattttagaagatttgtcatgtctcgaagaggactattatctaacactagtaatgttttttttcctaaagtatcaataacgttctttttaaagcttttattttattttcagttttagttttatctttttatatcaagtattatttaaatattttctttagaagatttttttctttttcattttatttaaaagttgaatcaaatcggttgtttaatatgaattttttgtttaataatatatgtggtcttatttttatctacttgttagtattatattatgatacttattagtatgatatgtaatttgatactaattggtatctaaagtaatgatatgcaattatatatttcatggtatcatattgtactaattggtatctaaatatttgggttaactacttattgttatccaaataataataataaaaagaactacaaattagtatctatttgcatgcttaagtttcattactaataaatagtatctaaaataattacttgtttgttacctattctttttggattgatattgaggagagttggtattacaataatgtattataatatgactgtaatgacaatctttaaatctaatataatatgatattaattgtaagatactaatattagcaaaattatatatataaggaaagtaattttaaagtgtgtaatattttatttaacctaatagctaaattttgtcatatataataataaatttaggatttgggtatattattttttcactaacatatttataattcattttcttaataagtataaatgtgtaaagttcccaaaaaagtatttgagtttatttttttatggcataattttttaatgatttaagttatgggtattcagttgtctgaaatatttgcaatgaaatttttttaatattttgaattgttatacatatgactccaataaaaaaaaaagtaacgatgaaacttccttttgttacagcgtgctcctttagttgttaaatatcacctaaatcggttaagtgccacttagtttacaagtgtcaacttattattggacaagtgttaaatattaaattaaaaaatatttgttaaatagtatttaaaattaaaaacaattattgttcaaattaaaattaaaaacttaaaactaaaatatatttaatcaattattaaaactgaatatactaaattaaataattataattgaatttgtcctcaaatattgtaaaaaaccactctactttactttttctttttttcttcttcttcgtagctacaatacagcaaaatcagatgaaatactcaaaaaaaaaaaaaaattgaagaaatttcccaagagttgatgatgaggacgaagatgattatttggagagtttgattactttaaatccatgagatcttcagatgttttgtgggttaattctagccgcaagtcattcaccatttttggaattgaagattaacaagaaggaattccactagagacctctctcatctgttagtttttttatcactcgtaaaatatgcaataacaatattcaattttatagataaacatattacatataattataagtgtataaccatagatctaaagaatacctttgttgattcaa

SEQ ID NO: 114835 - DNA, 2938 bp, Cannabis sativa
cacaaattcaacacaaatcaatactaccgtggaaatcaacatcaacattctgacaacacaagaggtggaagttacaggggaggaagaggtcgaggcggtagaggaggtggatctaaacccacatgctaagtttgtggcaaatatggtcattcaactgctatttgttacaataaatatgatgaaagctatatgggacatcaaccaaacactgaggggaatcaagacaaacaacacacaacccttgtggctacaccagaaatgctgaatgatgaaagctggtatgcaaataatagtgccaacaatcaccttacaacatatccaaataaggttcaaaacaaggttgaatatgggggtaaggaacaaattattatgggagatggaagtaagcttccaatctcacatgttgaaactggttttcttaaatcagatgttgataaacccttattgttacacaatatgctgcatgtttaaagaatctcagtagtaacatctgacaataatgtctcaatagaatttttctcttattcttgttgtgtgaaggaacagcccacatggaaggtggttctgtaagggacaattaaagatggactctaccaactaaacacctcaacctccacaaaatcacagtgacaactctcatactttacagctattacaacaaactcttcgcaacctggtgaagccttttccgattccctaaaagacatttggcataggcttttaggacatccctatattaatattttgaatcaagtgctaaaaatgttaaatgtaaaagttcctatcaatgaaaaactaaattttgtaatgcttgtcgatatagaaaatctcatgctcttcctttctctaaatctaactcttgagctgctgctgtcttagatgttatacatactgatatgaggggacctgatcccatatctcacacaaattttaagtattacatccatttcttagatgactacagtaggtacacttggctatatcctttaaaaactaaagatgatgctctagaggcttttaccaggttcaaaacaatgatcgagcaaagtttgataggaaaattaaaaagcttagaaatgactggggaggtgagttccaagctttcactgatttacttcacaatagtggtatcatttttgaacactcatgccctcacacgtcagaaccgaatggaagagctgagcgcaaacatcgtcacatggttgagatgtagcccaaatataattttctcgatattgctcggaattggacgattcaagatgttgcggaaagataaaagagaggtctaaaacttttatgttttgtttttctccaaaattcgaccataacatatagtctaatttaggcttgaagtttaactttattttcctacacaattttttctgttttatagatcatctttttgtgagatttgtttatcttttttccatcttattcctttgatattctctaaatattcttctattttaaatgtacaaaaataaaagataacaagcgtaaaattgctccaaacacaagtagaactaaattaaaaatacactaaaaattaactttaaaataatattaaataaaaacaacctaacatatgtctctttccacgatcaagtagcggattgtttgactaagggattgtctcgctcacgattttaatttcttgtcgacaagcttggagttcttgcttcaccatctcgcttgaggggtggtgtcacgagataaatatctaggggtatattcgtccatgctctgccttctttccaattctattggagcatgcaatcccgagaaagattttctatccagatgtcctttcatacgtacctttagcaccataatgattgattctttttttattcccttgtaatcatttgctacgtgtcaacctttaattgtatgatgaaatgccttgtattcagtaattacctatagatgagaatgacaaactccaaccgttatttgagctagttttatttattttatgtttcttttagaaacttttttgtactcgattagaacatggcagccatgcatttgggtaataacaaccaagaaagacaatttatttgttaaatggataattatttgtgaagaaaataataacaaataaaaaaaataaaagagatgtagagtaattagggttttattcaattgtaaagccaaaagtaaaaaaatacaactaataaaaaaaccttatataaaatatctctttctccgtacgttctgaaaagcgagtgatggtgttgctgtgtacgattgtcaggccttatccccgatggcggggagtggtagtgcggaccctctgcggtgtcttaggtgcttgtacttctcctccttttgtaaggctttgtatttacagaaatacacttatcccgaccaacctcatttaagtaatctgattttgacagatttttgttgagtacggtgtattatcttctgctctttttactggtttattttttgtgatttttttacatggatatacttctgctgaatcgtctaaggcggctatggtggaagatgccatggaggattttgctatccagattgagcctaatgtcacgatgacgaaggatattataattggcaaatccattgtgggccgttttttctacaaaaaggggagtcttcaatagtactctaaggaaagtgttaaacgatatgtggaaattattcaaaataaactgtcaaggctcagacattttttttttcaattaaatagctaaattaattatagaaactcaaattctctttcattattaattattggatcaaaatttaatagtttgataaaattcatttttaagtaatcatcaatagctattatcgattgagacatatataggggctgttcggtaatgattttaaaattgaatttttttttaattaagggcgcgtttggaagtaactgtgtaattactagagtaattactagggtggtaat

SEQ ID NO: 114836 - DNA, 2605 bp, Cannabis sativa
  modified_base (102)..(110): a, c, t, g, unknown or other
taaacaaataaatgataacatgaaccaaatgacataataagtgatgaaaatacttttgttctttattgatatttaaataataaggattacattgaaatggannnnnnnnnagggcataaaacccaacaatagcaccatcccaaacaggtatgccatgagcctggtgaaaaaacacagcttaatagtggctggaaattgctaacacaagagctcaaaattgggaagacaacttggtgtagttgatatttcaaaaatgacatgattagtgacaggtttagatgtctagtgttgaacattattggcagaaaaaaaacaaaggtaatcttggagatagaatggcttcttagattgtctacctgccctactaaaagaagtagactcaacatggtgctgagtattcagaggtgggacaacatcagggtgcacaacatcaggggtgaatcaaattgaggagtttctggtgtgggatcagtgtgttggtcaacattgagtgactcaatagtagttgggaaaaaatctgagatgtgaggtgcaaaaacacagttgacacaaatgggaagatgtgttcatgaaacacaacatctctagaataaaatatacaatttgtgttaagatcaagaagtttgtaagctttcatgcctacaagataccctagacaaacacatgttgtagctcttggacaaaacttagatctagcaacccctagagtagacacataggcaagacacccaaagggattgagatggttgtagtttagcactttggaatttagaatttcaaaaggtgaaatatgtttcaaattgggggtaggtgttctattaattaagtaggtggcagtactcacaaacttaccccaataaaccaagggtatatgagattgaaacaagagtgctctagcaaaattcaacaattgttaatgttttctttccacaacagaaatatgttgaggtctttgaacacaagaatgataatatatgatccctaaagaggagaacattttaggaaattggagctctttagcattatctgatctgacccccttaatttgagctccatactaagttttgacaagttgaatgaaagctggtatcatagattgaacctcagattttatttttaatgaggtgaatccaagtgtacctagagtaatcatcaactatgatgatgaaatatttgaaaccttcagtggtttgtgtgtgataaggtccctaaatgtctatgtgtataaaattaaaataatgtttagagatgttatgattggacacaaaaagtagctttctttatttagcaaaatgacaaatggagcaatgaaagtttagacaaggagaatattgaaattgtaaacttttattgatagaatattttttacacatgaggcatgaccaagcctataatggcataaggtttcgtcacatatttcagaattaacaacagaaaacacagaagaaacaatttgatcatggaggtagtaaaggttgttaatccatcccaatcacttgttcttagtaatgtcctgaacaatacatttgtttggcaagaagatgaatgaataattagatgaatcagatagggcacagacagataggagattaaactgaaaattagggacataaagaacattatccaacacaatgttatgcaattggacagttccaacaaaagagactttgggcactaacaccatttgccattccaacaaaattgattttagattttttttgaatggaagtaaacaataaggggtcaaaacagaaatggtgtgcagcacctgtgtctataatccaattatttttagggatagaattgacattaccagagatgttggagactgttggttgctggtgattgtggtcagtttgacactgatcagtttgtgtgggagagacagatgattgagatgatgaagcttgagattgggattggaacctctgtgttagcattaccatcatcctttgacgttgtgaagccaaatcttgatccttataaacactttctggctagtactttcctgtagaaaagtttgctgaagatcgatttcgttgatttctaggcttgttgggaatttctttagggaatcttccatgtaaatgatggcttggtgggtaaccatgaactctataagattttgaaacagtatgacaaggtactccacagtgtgtgcaaacaggtctactgttattgtttttcctatttccaggtccatttccaaaaaattgtccaacaaattgtcctgcattctcgttcgaattgctagaattctcagtctgaggtatgatgattcctctttgtttttcttcttaaatcacaactgcataagctttgttgacatttggaagaggatcttgtagtaagatttgagaacggacatttatatatgattcattcaatccaattagaaactcaagaacattgtcttcatcaaggtattcttgaatagttttcatagcagtacaagtgtagaccaattatggtctatattcttacaacaaatcctaaagtcttttaatgtgatgtaaaaggaaaaaaaaaaagaagaagagagatgagtgggtatatttttttagaaattttgtggacataggcataacttagtagtttcacattt

SEQ ID NO: 114837 - DNA, 2748 bp, Cannabis sativa
  modified_base (31)..(37): a, c, t, g, unknown or other
taaaatgtaaaatgcataaaaaaattgatannnnnnnttattaaattttttctcatcatgcattagaatagtctttctttacatttaaaaataaaataatcattccactaaaatggtagaaatgtcattcattgaaataacattccaacactttaatatacaacgaaataaaaaaatgaaataaggattatttcttttccattccaattcattacctccaaccaaactccgtgattacattaattagtaactaagttgtggtactatatattatctgattataaatgatatttgtaataatttaaataacaataataaattgaaaacagtcgttttcctttaaatattaactagtaatttataatgtgcatatagtttaaaatataaataaatatctaatatataatataaaatagtgtagcaacaacattaattaattaaatataaaaatataagtggagcaaatttctaggatgacttgtcatataatccccaacgagcacatacactgcctttgaggtccattaacttcaattacttttttctgcgacgggaaaataaggggattaagcttttaaacccagtaaaagaaatatgcaggtaatcacataaagcaaacaaacaatcaatcaactatcaagcagtaataagccatatatattcaatattatcaataatggccttaacaattctaagacaatcatattatatcgtatgatatcacaatcaagcaaatcaattattctgtaataaatgagtgggcaatacatctcgctacacaatttatagcagagttctgtgatgaatttatatataatttagagcagctcttaatcactgttataaatgcccaagtaattcaattatcaatattctaggttctggcaaactacaactaatcaacgaacagatcaacggatctttggcttttggaaattcgacccattactttccattgtacctgaacgtcagaaaacacaaacaattcacaagtaaacaaaaaccttatgtttctacctaatacccttaccttaagtgcaaacctttagttattttttaatctcatatttttttgcattatttatttatgctatgaaaatgtaaattataccctcgattcccatatctatgaaaattcatcatattaaaatttgattaaataagaagacaatcagctttgggcataagaaataagaatgttaggatggtgcagagtatgcgtagaaatagacatctaaagttcaacttggctcgcaacaagataaatcagacataatttataacatagcctgaatgtgaagaagaaaaaaactagttgaacaatcactgctcgaacagcaagaatgcacattgctgcaatgcaactaaagcaaatctcttccatctcaaaagggacacctgacatgaaaggtgttaaagctaccaagtaccaagtgagaatcaaatttgtcaagtttccaccttaaacttttgtcatagtttgagaaataaccaagtcatatttttcaaaataacggctgattattaggcattgtctatgaaaggttatgtgagattacataacctcacattgattgaataagcagtacccaatacaaaactgatgaagagggccaaagataatggccatgacccaacgccagaactctgaaaaataatgtgataggtcagaatattataggcttcaaatacaaaatgataagtttcgaatacttgagaccagtttaatcccataccagaatagagaaagacgcaacaatcatgacatattcctgtgatgaaatatgcaatagatatctagaattacacaattctcgatgcatcccatgttaccatgtaaaattgtagataagtctctctataagaaaaataaagtagtattaaagcaaagaactaggcactggtgtagtgacctttgtgatcaaatataagaataaaacttagattttcttcattctaatagaatgcaaaatcaacagaatatttagtgtaagacagtaaaagctaccttgtctgtatcaatgtcgtcaagctgattcaaaccaacaatataaatatatatatatacatataaatataaagtatgtaaatatgttaccgatgcattctcaagctcggcaataaatcgggcaaagcatcgtactccattaccacacatctaaaatatgaaattataaacaaacttttcatctttcaaacagtacagaatcaattaagcataataatagtgaaatagtatcaaaacaagacttgaaatctccatcataattctcaatctcctattatcaaccctcaaaaatccctttagatgaaaaatcgaaaagagagatgaacaaacttagctccatttttcaaatttaccaggatgaaatccttgccgaggctatggtacttgacgaaatgaaggaaaccggtctctctgggatccaaatacggctgtcagaggaacccaaatggtggtggccgtagacataactttgaagctcagtagagtcttcttcatcttcatactgaaaatttagtgggctgggcttgaaaaacaactgggcctaaattttgggcttacttcagttttaccattttttagacttttctcaaaattattttttgaggaaattacatgtgaaaattacaccaaatatgggaatctataaaaaactttgataaatatggcttttttaactttaccactcttatatggtatttgtccaatttaaagttttgtatggtatttctttttgccacttt

SEQ ID NO: 114838 - DNA, 3911 bp, Cannabis sativa
tatttgtatgtggactgtataaatgtttaatgtgccggcccaaagtatttttgtaatttttttttccttttttgtatttttttgttttttccctttatcttatattaaatattatttaaaaataatattcaataaacatatagttttttaataaataataattaagaaattaaatattattataaacgtgtgatatataaatttattatttaaaatttaaaattcatacacttttattttctgttaattttttattttggagttatagagtcatgttttgtaactaatggcagattcaaaatttaagttgagaggggacaacactttttttttttgtaagtgcggggacgacactttttttgcagagtgatagaatgtcttttttctttcagatgcaaattcgtatttcaatatagtaacaataaaaatattaagttcaataattaagattataaacaaattttatttgtagaggtttaaaaagtaaaatttaaatactaaaataaacctattttgtttttattaacattaaaaatttaaaactaatgaactccatgtatattaaataactttatcattatatcaaaacttatattgtgcataaatatcaattttatttagaaatatatgttgtcactatatgggtccgcccttgtctttagccatttcagtaccataatactttaaattaacactcctcgtacattaaatcatcatcattctccatgagtttcattatagttgctgagtaatatatatacccctaccattgcgtgactaaacatgttatcttaattgtgggatttttggggtcttgaaataataagagtagaaaatatgtcccttttgaaacaaacatcaacatatttattttttttttttttgaaagagaggacatcgatatgccgtgacgacagaaaaatcatcagctctgcatgcaatcaaggtgaacaagcggccattcttcaaagaacggctcaacccgaatattctctataattattctttctttcattccaagatattgctaattcatcaaagaatacatatatattatataagaatggaatgcaacataggattgaaaaacaaaataagtaaatgcaaaaaatattggcctaactttgttctgtagctggatttcttcgagacaacgaggacgaggacgggccagagctatcttctttcgctgcaactgggactgcgaacggctttaccgataatctaagagattcgggtccttctgctgcaattcttttgcataaggagtcacaattactaataacttctgttaaccttcctttaagctccccaatctcaacctgcagtgaattaactgtgtatattccaaatttgagatgttgctaagacaaaccgaaccaataattccgagaaagagatgctcaacaagtaccttctgataaattttgtgtagtagttttcattgctgagaccgagtaattaagacgttgcaagagtttaatagccaacgcatctgcaacttcaatcttgttctctatctcttcctgtttcgatttgtatgaaatatgagccaaaatacacaatacactaataagagaatcatatctatatatgtatagtaagagaaacctgatttttgctaatttcttgagccttctgctcatggtaatcccggtacattgagaagagttctagtagcacttttggatcaacagtacctaaatgtaccattaaacatagacttagagtaaccattatcatcctctcaagttctcaagaatcaattttcatgtatctgtaattttttcttggacccaattggccaattaagccaataattgaaaaatgattattcaatgcaatgggaaaaagaaaaaattccatacttggagctgatggcttcctcactagaatgtcagtcaagctagtctcggtaggaggagtcgtcaaaatcggtgttgactgcaattaaataaagcaaagaacattaaactataatataaaccgaaaacccagaaccccatgataattataaacctattatgtttgttaattgattgttaaattgggaaattgactagggccaagtaagaagaaaaacactcacgattttgagtgatttgagccgctgtaagatgggatcggcgatttctgatttctcagatacagttgtgatttcatcgattggactcttcaagcatgatcaattggtgctttagaatacaaaattgggaaattttaaagggaaattggacataaaagaaaaaatgaattcgccataaatacctgtgagtttgaaagaatagattctgaggcgcccatgagtgaaaacaacaccgttttttcggtgcgattctatttgcaatcttgggttgttgccaacagattaaagaaggaaaaaagtgatttaataacaaagtcaaaacatacaaagttgatacataacaaaaccaaatctatgttttgggcactaaacttgacagaggacacagagaacagaacaaggccgtcctatgttttgggtgttccaatgatttctactgtcaatcagactgaaaatcattagccatcacatataacaatgctgtttatctattttaaacatttctaataagatacataaaaattattagcaattatttggatgaatcttcataccacattcatactgctcaaatctaaaatcataaaagatcccaaattcagagataaaaacctagcaaaattgaaagaaaaaaatttccattctgcttgaccccataatgaatcaaaactttatagacaaaactcaaattctctattaagacaatggattgcttagaaatttctctaataaacaagccaaaagccaattatcaacaacaaacagtacatatcagaaaaacactgaatcagtaaattgggttaatttcttccaaaatacaataatttaaagccctgaactgcatgcaacccttgaacaaaagaatttaaacatatatacataaatacatatttgataaatatgaaagaaatagaaaagtgaaaggtctagtacaaattcaaatgaatcaatcacagaccaccaaaataaacaagccattgaaaggaagtgtacaaaaaaagaaagcatttttcagatagaaaataaatccaaccaccttaataaaccatcaaaattacataaaattgaaggaaaacccagtacagttccaagtgcaaagagagacccaaaatgcaaacgatgaagacccatcaagggaaaacgcccattgcagaccttaaaagatgaaaattgaaaagaaaagagaaaacccaaaagaagtttacctgttaatttgaaagaagagaagcttgagcgttgagggagaaaggcaccattaaaatcaatggctttagaagaaagaaaggacttcatagatatattagtttgataaattaattagaagaattatttgcttatttttgatagaaacgatatcgtattggtccattgattatgtcgtttatatgtttatttattgtcgtttttcttttgcttatgtttaattaaatactttttttaactgctaaacatctctaatgatagtattttagagaatatttgatgagataaaaaacttagagcatctctaatggttaaattttagaggatatttggtgatgtggatatattattatgcgacaaaatattgaaatgttataccattggagagaaaatgatgtcattcttaaaattgatgctattcattttttttaataaaaaattgaagctaaaaagttattgtagctaaaaattaggatacatataaataataatgtgtgagatcataattataatatttttaaagagtgttaagggtgtgtgcataaatcgatccaatccaatgagaaccgaccgatccaattacaaccgaccgccaaacattggatatccaattgtgatcgga

SEQ ID NO: 114839 - DNA, 2512 bp, Cannabis sativa
cagctaacctgattaagagtagcatcacgttcttgcccaccagaacccttaatcagaccacgctccctcccaacagcatccaactcatcaataaagacaacagatggggcctgaaaaacaataaggatttgaaacctacagctaaataatatggataagcttttggtacatgctatacagaatgggcaacaacatcaactcatctacattaagattacaagagaatgtaacttaaaagctaaaatgcatacattttccctcgcttcttggtaaagtgcacgaacacgagaagcaccaacaccaacataaatttctacgaactgagaggctgatatagagaaaaagttaacgccagcttcaccagctacagcttttgcaagtagagttttaccaacgccaggggggccacaaagaagtataccacctgattaagaaacaacatagaacgctgccataataagcatgcctaccaaacataattcaacttcatcgataagctctcccgttttagtatttacatcccttaaactaagtaaaaaattttagcaagttcaatcatcatgatgaaagttactagctttataacaaactggcaaataaaaactaaaatattcaattacattacgtaagaaaattctgatcactaaccaggtattttaacacctctcctcctatacatttctccatgagtgaaaaacttgacaatttcctcaagctcaagccgtattttcccaagcccagcaacgtcctcaaacttcacatccacacctctctccaaatactgaggaagtttcctattttgtgctcgtcgaacacgagccccagatttcatgaactgcactgccatcttcatgtatggattgtcttcaccttttccttgctcgagctcttcatcatcaccctcaatcccttcaagaccctccatttccctctctaactccctcattttcttcctttcttcagcttccgctttctcaatcttcaatctatcgtcataatctcttttttgcttcctataattcaacaccactaccctataaaatatataaaagaacacgaacccaagtgccgttgccacattctgatccctggccaaattggcccaaacattcgccatatactgataattcttacgagactggcgtaatgactcctcgtgcttcttctttttcaactctctcctctgtcttctttcttgttctttcttctgagctgacatgaccttatcaatcatctctctttccttcctcattctctccaagtcttctttcctttccctcttgaaatcctcccttacccgcctcagctccgcagcccttttcgactctttcttcggcttcctcaatgaaacaataaactccggtactcttgagaggaaacccagataaggagacggtaactccggtttcttcattggaggtgtataagcattaatacaaaatgaatcgatattgaacctatcccaactatcccaaaacttcttatcactctctattgatggtaacatcgtccttaacactctaaagtcttccaaaaccaccaaaacgggctctgccctttgtctcaaattcataccgggaggcttaattacatgcttaagattaccttcctctttcaattccagtaattgggtgtacggtatacgattcgaaacaacaggaagtccctgcgaccaggccttgagttcttgaggcgataaggaggtttctggtttcttagtggtgggttttttgcccgagcgttttcgccctttcactgcggctatggccgaattgggtcgggccaaagaggcagacattacagtcagcgtcacggagattttgagaaaatccaattgggttctcttcgttttatcgttttcatcgtcacagttagcattagagtttgataactgggaagtaatcgagggtctaatctgaaaattcctccagtatcgaagggttttgggtctggacttgagggatggggaagaaggaaatagtgaggacgaagaagatgttgaaaaacccagacgacattgggaagccatggagataagaaattaaatggtttgacttctggtacactacatttggtcggcgagagagatgaagatggttggtgttgaggttgagtgagctactcagtactcactcgtcactgactcaaagaagaagctccatctccttccatgttccctcatcctcaaccgaactctgatatactaaatgggctttgtccttggaggggccaacgacacactataacctaagattttaggtatagacgtgtcgtttatctattatttattttcatcgtcgtcggtatgattaaaaacgacaacaataaacttagttttggcgttgttcaaactaaatcactttgtcaaacacagatacgagacaatatgcaattcaatctcaaacgtagtaaatccttaaccccactttaaacgccgtggcaaaaaagggaaaaaaaaatgtttactgtcaaatttgcatcatctacatgtgtatacaaaaattttataaaa

SEQ ID NO: 114840 - DNA, 2182 bp, Cannabis sativa
ccgaaacaaatttttagcgatgtcatcatgttcactgctatggtttttgtttggtgaagtttttactattatcaaagatttgatgaaatagttagtctactattagtaaattgcatttcaagagcacgcatgtggtgtccctagggtttagggagttacaactttttcttagagaagccatggttttaatggtcatgaagacttgtcggatatgtacatttactgcgaacacaagtcgacttataatatagtaagtgtgatgtatttacttgcctatttattacaaagcaaagtagaagagtaatatagtaataattgtgatgtgatgatttgtgtgggatatgcttattagcattgatatttggttaagttctaaatggttgggagatgtggactacaagtgtattaagttatgcagtcagggctatcgaacaaataacttattattatggggtagtgggtcatctaaaaagaagttggtcgtaattaaggaatactgaggtcacagatgaagagtctatgggtcatgcccaagcattttttctaactgaagctgatacgggtgctagtccttcgaccgattcaaattatcttatagggtagacatattagagaaatgacaaaacagtaagatggttgttcataagttaaattattgatgttcctcagtgggatgtagaacatgagtagctattagagacatccatataattgattcagacaacataatcttcttgcctagaggttgtctagtgttagtagaagtttgaaaacttatgagtatagtctgaggtcttaggtgaattgaggacaatgattatgtgagttgatcttttcactaccaaggaaattgagatcgagggccttgattcaaaccttagtatttgaaatataattaggctagtagcgtataacatgatgtcaaagaaaatactggtgtcgctaaggtagagaagattacctaaatttcccatggtaatacaaagatggtgggaaatacttttaaattttaccatattgtcaatttggtatacaaggtgaccatgaaatcttgagaaaggttgtcttattagacaatgatgtaaaggtatgctcgcccagaatgcgaaagagtcataaattgagatgcaatgtaatgaacatgtattcaagtggttagggaatgtcagttatcttattagatagcagaggtgatggctttattaaaaaataaattgtataaccaattgtgatttgagattaagagtaatttgttaagtcaaaggtagtgttgactaggaaaaagtagaagtaacgtgggaaccatacaatgaaattctagttgtaattaagggaaagaaattcaagaatctcggattcttattggttagcattggtatcaggagactcattataagctaggatggtagcttataccaagtgatttttagtggaatatagagtgtagatgagatacattttcaattcggaaggttataaagatcactattaaaagacagaaatagacttgaagatcaaggaatgatcttcagttaattgttattagttgaggagtcgggaaatagatatttccaatttacctatgggtacttgctatgagtaatattgttcctattatattcttaatgttagttaaactttatagtggttgttaagattgaatgattaagaaatgtcaaagttgtttgagatgaacaaggtttaagttcatatcaagatagcaactcctcatggttaattaagcaatacagacaaagaattgtaaaaggtcaatgaaagtaatggttgaaaatggggatctaattgggacagagataaaattaggaaatataattaagagtgacaagggtacaccttctttctgataagccaccatgagcttactttggagttaagcgtacttaacttggagtaatcacaataagggaaatcttctaggaaatcatctcagaaatggtacgagtgaggacaaagtacgctggaaagattcatattggatgcatgaccacctaccattccaggatgtatcaagaggaaaatatattaaagagtaaagattaacaagacattgagatgagaatatatttgtaatgaccgttatttttagacatgggattagtgggacacttagcactaattaatatgactatgtgattatttatatgttttattctttatagac

SEQ ID NO: 114841 - DNA, 2873 bp, Cannabis sativa
ccagacaaatgagattagctggataagttattcaaatttctaacatgcccaaacactgaattggataaattagcatgtctaatcgaatcgagtcctacgtaccaaatgggccatgggggtttcggacataggagcttaagttttgaatacgctcaacgacgctttaagctcaaccaacactgaatataaatgacaagcagagtttagagatcctaactttcattacagacaacatgcatggaaaaataatggcacagtttcaaaatagccccgagaagcctaagttgtacccactatctcctatagcccacatgcaaaccatcacctaaatcatcaacgaagaaggcttctatcctacctagaatttggacaagcattttaaccatagaagaagtcataagttcaaaaagagcaagagtacttatttgagaaaggtgaaaactgtgggggtggcgagatttatagtggcgcaaccgtaacagagtcctcgtcgagatggcaatgtctaacctgaagtttgcaagcccaggcggttaatttgttgatctctacttggagatttagtggcgagagtacttatttgagaaaggtgaaaactgtgggggtggtgagattcacggtggcaaactgtaacagagtcctcgtcgagacgacgacgtctaacttgtagattgcgagcccatgcgattaatttttgatctctttttggagattcactgtcctcgacagatttagaagaggaatcttcatgtttggtggtagttatcctaggttttctcttgcacgaatacgaagaagaaggttgaggcaatcgtcgtacagattggacattcaccagaagcaatttttgattttttctctcttagaaaatttaaactcaaaatataaaatgggcaaaaataatgaattgtatttgctcactctatttataaggaaatagtgacgatctgtgtgcttctttgattaaagacccatattgcattatagaaaatacaaagttaatgtcagaatttaatacatgatattggaatcaaggtgtttgcaaatcataacattcacctcagcacaagtgatgacatgaatcaactgttaacacgctaccctaagcgtcattcaatttcccaatgcacgtgaggttcacagaccaaggagtcaaagccacatgtaatccactagttgaaacccaaaagttctagttgtctgcgaccaaataatacaaaagtaacaaaggtcactcctttttcgaattctccatgtgcccatgacaatttagagagaagactgcaagcctccatgactctcaagtctcaaaagcttagggtaaatgttatccttgtttctggaagggggacatgctgcattcctaattcaaaattaatcatctaaggcctagtcaaaagctctaacaagatagcaagctcaatttatactgaaggatgggccttgcacccatccaaggtccatgatgtttatgtccaagactagatctctctggatctagaagggcatcccgcccgaaaaagatgaagcagctaagaccctccgaataagcatatgggatacatctagatggacattccaagaggcaccttggagacctagcctgggatgatgtggcagccctctgacaccaaatcccaccgaattaagggattgtcccctgtgttagagcctaagaatgtgcgtaccaccaaatgggaattaccagtctgacggccactactttgacactacagtgcacaagagcggtgcacgaaagccatctgtcaatattgcatggtcccaagcatacagattgcctctgccccctcagttgagccttggtccgttggcccaaagtcaacgtattttatgtattcaccctattagtggatcatgtttacatgcaaactctagcgggtcacagatatacccgaactcggatcctaacctataaatactacattataccctcatgcaaagggttaaaaattcattgtgtaaacaccattgcaagaagctagggttcttaagcttgtaaagaactccattgtaatacatcaagactatttagccaaatatgactaacttgtggactaggctcattaacacccaaaccacgtaaaaatttccatctctactttctattaaattttttaagggctattttcaataatatggaaaaaattattaaggttatggtaaatatggcataaaaagtaaatgccactaaatatagcataatctaaccaatcaaactaaaaatatagttttttgttttaaaaaaaaaattataaaacattaaaaagagaatctgaatttaagattcataaaaataaaaacttaatatatatgagattgaataaccataaaaaatattaaaattctcttcatatttatttttttaaaaaaatataataaataaaactacggagttgtcactcgtgctggaaatgtcactggagtttgctaccggcaccaaaaaattcttaggagtagctgtcagtgccgaaaaagtcaccggagttgccgctggtgccaaaaaagttgttggaattagcattatcatcggaaaaatcacaagaaaaatcaccaagaaactggtttcttgatgaagaagaaaccattttcttggtgatttttccggtgattttaccagcgacaatgccgatttcgatgactattccagagtttgctgttggtaccgaaaaagtcaccggagtaactgttggtgtcggaaaagtcactgaagttgctggcggcatcaaaaaagtcgttaaaattaacattgtcgccaggaaaatcactggaaaaatcaccaagaaagtagtttcttcatcaagaaactggtttcttcaccaagaaagtggttttttcatcaaggaactaatttt

SEQ ID NO: 114842 - DNA, 1393 bp, Cannabis sativa
  modified_base (44)..(46): a, c, t, g, unknown or other
tattatactatatatgatataatataacctccaacacataatannnattaatctcatattaatatataacgtgccacattttaatcttcattatatatttgtatttaacaaatatataacatgggtatgaataggttaattgggattctttaatcataattctttttctcttctgaaaattaaactttactttggcttttttcttagtaatttcacttcatgattgacccgaaatttagtgaaagaaaataaaactaattaagacttagttaattcatttcttttcttttatcaaataacagaaacctctatgaattttctgatcaattagcctgaaaatacctttaagattttgttgtttttaaagtagaaaaacaagtactactactacctaatattgggaagaaaaaaaaaatccatagaaaagaacaagtcaaaacactaaattaaatgacttgtgagtcaagtaatcaaagaaatgttgttataattatatgaagcttcttaacaattttatttatttaatttatttattttggtgtgtaagatgtttcttgtatggttcattgttcacccttgaccatgtcaataacttggaccttaccactatttattgatcactccaatgagccaataacttcacatttcatttttcatttgtgtcattatatttttttgaaccaaagaaaaaagttaaaagaaaatggcaaacactacaactgagtcctctcttttccaacagctctctaacaaattaagttcttctaaaatggaggagctttctgatagacacggtgtcaaaaacgagttgagtgagttgcataatgattttcaagcgaaaactcgagatgttgttagtgaagatgatagattgagttccaagaaggctgcttatgataatgaagacttgttagacagatttttcagtaacaatcgttgatcttcattaattcatggaaatttagaaagtattggtaaggtaacattgaatttagggcatactatctaagaagaaaaggttatataggatttgttattatatatatgtgtatgacattattcttcatacatatttaggctgaatttctaaatgttttgacttgttctattgtaatgttttttttttttttttatcattattataaattggtgtcattggatgttttgttggtcattatttatttagatggtgtgaataattgtttttattatatactatctaaccttttattctttaatatttaaagaaagtttgcttataattttacttaagaaatactaaaaggcttgtttatagcacggtatatcgttgttgataaaattaagtattagattatatatataatttaatttaataattattataaaacaccttgtacttgtagtggtgcta

SEQ ID NO: 114843 - DNA, 1110 bp, Cannabis sativa
  modified_base (780)..(781): a, c, t, g, unknown or other
aaaaaaaaaaaaaaaatacatgacacatatagtttcaagatttgattcatttggttaaaagaaaaactacaaagagtactgctatttatcctaagatcaatcaacttcaccattcacgtacgtaggtgttgttggattggttaactgtggcctgcaaagtctgtcaagaatactacttcgatttggtcgaaataggtagcactatgtgcatgaactttttttttctttttctaaggtggtattttaactattacaaatcttgaaaatcagtgaggaactgaagatatataccattgaatattatatcacttacttttaatgtatgaaagaaattccaaagcaacaggacctttttttttgcaatatactataaaatataaattggtgaaagtcgaagtataaacaggcccaagttctttattagattttatcatggtattttaacaaaaataaagtatttaaacaactatactacagttagaaatcatggtatgatattcttcaaaacaagcttaaactgtggtatttctcacatttacaatatattttattaaaacaagtgtaccacatttagaaatcatggtatggtatgatattcttcaaaacaagctaaaactatggtatttctcacatttacaatatatttttggataaatactattttatactttatattttataaaagttactaattagactctctgttttgttaaataacaaaatagatcctgtattttctaaaattgtacaaataggactctgaactgattttttgtcaanntaaaacttaataataatctgatctagagatgttatgacaaatctggttacatttttttttgtatatgtttgtattaaaaattattttaaagttggttatattaaaaaataaaattattgaaaattgtggttagggtcttatttttactttaaaaatatagagtctattttgtcatttagcaaaacaggagtcaaattagtaacttttgcaaaacatacgatttaaaatagtatttactagggttgtacaaaaaaaaattgtaaatcgtccaaaccgaataacccgcccaaaccgaaccgaaaaaatcgataaaaattacaaaccgaaat

SEQ ID NO: 114844 - DNA, 3207 bp, Cannabis sativa
ttttgagcagcaaagaaagaatagtattggatggatgcagttggtttggttataataatttgttgactgactctgtattgtaaagtgtgttgtgttattactattgcagcaaattccataagcgattgataatacatataaaaaaaaaataaagggcttgtgagtcaccgaccgtttctttgcgctttgtttaacacaagagtagtaatgcaaacaaaacaactgctatcatgtgctgtagcctcttcccctttagattttattaattttatcatatataggattccattttcccaatgacaaacttggtatgtgaaacataaaattaagaaatactattgtcttacaccaataccatcactaggtaacaccttacaatttatttttaattctttgtaatagtttttaaatgaagatatacgggatttgatattaaatagtaccaataacgatacacctcttaccaattttacatttaataaacacaaaatgctcaatgtaacattattagaccattaaaatttgttcatctcatggatggtacaaatgcagaatcttttatgtgtttatttctgtacttaatccttgtttattcaatgctcaacacaaaattgtgttgtctttgacaactgcaaaatggggcaattagtaactgaaacaagcagcctcattacacatttaattcctcaatactactcatacactcaacctatatacctacttcagccatgaccaccccagcaacgtcacacacacttgtaatgtttggccacgaccacggtcatctcattgcttatgaagatatgaacaatgatcttcttctttcagattaggagtactggtaggctagtgaaccagagattttgttgtttactgtttagactgacagtgtctgctattgaaacctgtaagcactgcctttcttcataattatagagttagacaaaacaaatatgtaagagttgtactttattaacgttttcatattcatattcattggttttccaactaaatctgaatttaattgcatgacaataatccaacaacgctacagccttaataataataaataaaagaagcaaaagaagaaagagaataatgtaattgagaaagagagagatcaatgtagatgcagacacagcatttagttgatatgttcattcaccatcatctaatgttacttttgtgatgtgttgaatcttaggccaatcttctcctttctctttctcacactgttgctttaacaaaggacaatctcttatttttaaataagaaagggaagaaggcagcccctcttcgggcaagcaccgcagccttggacagtttttaatatacaatttctgaagggaggtaagttgttgaaaggccttgttgtttagagtttcaagcttactacaatcccaaatgttgactttagttagagtggtcggaaggcctgcctcgtatggaaaactaacagcttcccacccactgatatgtaaggattccaaagaggagagtctatgcagatcccattgcttatggttctcaaacagccttttggaattgtgtaactcaatcttctttagtttggagtgtagtgatccccaccctagaagcgattccaacaccagacaatcctctatatgtatctccacaagagagggagctgtgcctgtgcctgtgtgctgagtagttcttgggaccaaacccaccattccttcacacttccagatatgcagtttttctaaggatggtagataacaacccggtaacccaacatcaagctttggacaattactaagttctagccatttgagaagagggaatagtatttgaccttgttgcatagcttcttcactactgaatgaccaatctttccactccatcatatctgcaatcgttagtgactctagacaactgaataaaggaagagcggccttgtaattgtcatcacctattgagatcacactatcacatcctctaatattaagttgtttgagaaatggtagctgcccaagtgggggtaaaacacaacaattcttacaattgataaagctgactgatactaacttagcaaatgcagaatctccaatccactctgagaatgatgaacctctataacctacaattctaagatgctccaaatttgtatgtggtctaagcgcatcaagtatatccttttctttctctttttccttttgtgaattagcagctacatagccgtcattatcatcatcatcccacttcaaagtcagttccgaaagatacttcttatccttcagattagcctccgaagcttctattccatccttgatattttccagcccagaaatgcagcgtaagttctcaagctctcctacttttttcattttaaatcctccactgctatttctatcactactcaaaaccacattggataagaaagacaagtgtttcatagtactaagttgttggggaaactctgaatcttttagtggtacaccatcaatatctagatatcgcaagttgattaaccttcccatcttctttggtaattcacgaatcttccaacactcatataataataaagtctgtaaattgtacaaattacaaactgaatcaggcaattcttgaagtggagtgaaagacaagtccaaatacctcaaatgctttagatttcctgaatgaggcagcttcttcatagaacattgacataaagaaagaactcttaaacaacttccacttgtaagcaacatatcatacttcatcttgtttgaggtgaaatggtttgattggaatggcagtgctagaaaggtacgcaagctctgggcttcatgcaatcccttgaatttgttgaggtcgtattcccacttcttcatatatgacaagtggcgtgtctttgctgaaagtttaagtaaatcattactagaatattccaacctaaggccaaaatcatttgatacaaacacagctaaatcatgtactaagtcatgcatttggaggaatgatttaatcttcttcgaatgttgaaacaaagaccttgacaaaagatcttcaaggtattcttccccatgctcttccaactttttgctttttttatcaaattgcaaaaatccttcagccatccacaacaaaatcaattcttttctttcaaactcgtaatctttagggaaaatagaacaaaacgcaaaacatcgcttgagatgtccaggtaagtgacggtagctcaaccataaagctggaaga

SEQ ID NO: 114845 - DNA, 2650 bp, Cannabis sativa
agggtttaggtagtttagccgccaaaatttcaatttttgtggttagctgttacaaaccgtaaagttaaggtggtttagccgccaatatcccaaaataaaattagaccttatggtcgttacaaaatatgttctctggaataattgacaggtcaatcgtgtcagttacattttcggtgaaagcccacttagccacattatgggctgtaaagttacaaactttgggaatgaactaaaattacaacttaaaaataatctagagagcttattacaatggtgcacatagttaccaatactctaattggaacatgttccatttagcgccttgataactgtccccgagtcactctcaattaacacaaaagggtgtttcaaaagcacgaccttctccatggctaactgacaagccacaacttctccaataagggaatcagagaagtttagcttgttagttgccacccacaaaatagaacccatgtcatccttagccaaagtcactccgtacatggatttgcaaccaactttcatatcacaattgattttgatctagtctttcggaggagcggaccaaccatgagttatagcagcttttagcgaggagaacaaacaagacccataatctgcgtaacaaaaactgatagagtcaatataatgtttaatgttactcagagtattgttgtgtaccttatcattacgcgccttcctattcatatccaccacaaccgaagcataaagaaataatttttctacttcaacccctctcgacttcagactgcaaagaaatttgacccaatctcaaattcgcgcattggagtccataaatggcataaccccccaaggggaggatcgccacaagtggaacacaagttacaataaagaaaaaggtgttccattatttcctcaccctccccacaaagagggcaagagacctctttaatgagaattctgttcgctaggagagcatggacaggaagagcattagaaagaatacttcacaaaagaatcttgtgtcgctccaacactttatagttccaaagtctattccataaggtgggggaaacagattacaaaggagcacgatctaaagcttgaacaagtagtcaaacttaattgagaataatccattcgactctttagtccagacccatctatccctaccctgaccatagggtttatctccttttaaaatgttacgaattgtatcttggtcgaaaagagaatgaagcatagggatatcccaatccccattgtccaagagaaggtctggaaccctctccaaccccataggttgagaagttataagagtagaaatctttgccatgaattacctaaggatcaacccagatgtttgtctctttcccatcagaaatcagcttgcaagcacccttcttaaggatttctttaaatttcaccacgttcttccagaaacaagaatttgagtttttaaaggagcaattcaagaaggaactgcctctcaagtactttgcactttagaccttacaacacaatgactgattctcattaaggagggaccaacccccatttagccaataatgtctggttcatttccataaacttccaaaagctaagcccactatgggatttgagaagatgcagatgatcccatgcctttaaatagataccccggttgccttgttcacaaccccaccaataatctctagccataccatcaattttggatgcgagtttctcggatagcttcgtagtttgcatggtataaactagtaagaaaagtccaacttatttgattaaagtaccgactagccttagacaacatttttaacttccacccatggaattttgacactaaattatccaaaataaagttgaatctacatcctttctgcgagacctaacaaagggagccccaagtaattaatgctcccagtgacactattgatcccaagttcttgtttaatgcctcttttcataccctcactagtattgctgctgaagaaaatagaggttttaagtttattaatctgttggtcgaaccaggcacataatttctccagacactgccaaagacctctaactttcgctaaatttgctctccccacaaggattaggtcatctgtaaagaagagatgagaaagacaaggctcgatcttactcaacttgatacctttaatggttcccttatcaagaacgtcctccaggatgcataaaaaaatttccacaacctagataaaaagataaggggaaaggggtctcctgtctgatgccacactcaagaacaattttactaacagtgcctccattgaggcaaatagataataaaattttttatatgttaattaattttgataagtaatgaacaagattccttatcatttaaatgtcagggtttataatttacaaaaaattcttcactttattatgaaataataatatatcatcaaaacttgaattgtgtgataggtaaataatacttaataaactagtaataaagtatatatatatagggggtgtctgttgtcacacatgggttttttgagtgactagtgttgcacacctttaatagctattagattgtattgattttgatctaaaggctgatattacacacttcatatatcatttctatataatattatatttgataaataaaggggtatttgacttgaaaatg

SEQ ID NO: 114846 - DNA, 1563 bp, Cannabis sativa
tagtttttaaaaactgttttcagttttaaaaaacagaaaacagtttttaaactgtaaagccaaacagcctattggttttccaataagctcttcaaattatatgaaatgttgcatcatcggtcacctaaggcagaccaataacaattgtacaataaaacactgccaaattaatttagaatttcaaaagaaaataatgtgatatgctaataagcaccatgctctcttcaattatcccattcataatttcatacatattgtgcaaaatagagtttttgaaaagcttaaattcacaccacgaactgttgaaaatacttgcaatcaaaacaaaacttcaaaaaggattaaaaaaatacaagaaagggagaaagcagatgacgaaaaatcaaagttcaaactcagaaaaagatcaagctagccaagaaaagcaagcaaactgtaccttgttgatcaatttcgatcttagattgaaaactgacagagtatattacctgctcttcgaccaaaacacaagctaatcagatagagaatataaaaaatttaaaagacagagtaatcttccaaataaaaaaaattaaatctaaattgcggtaaagaagaagaaaaagcaaacattgaagaaacccaccatgagatacgggattaataaggctcaacaagcagttagggttctgaattccaaattttgaaggagaaagatgaatactttaaatatttgcagtaataccaactccacctccaacaacacttgcacccccatatcatcatcataaatattattgtaacaatttacaaataattgtactcttccagaaaatttcattaatattaaaaggaaaagagaagagacatgcgaggagagttcggatgaaaacctcatccttctccaattccaactgccggaagaaaaagaagaagaagaagaaggaggtgcattttgtagttctagggttttgggtgtagaggatagggtgagctagtgagttgggagagagctgatagagaggttgatttggggaagaagataagagagtttgagttgatttggggaagaagaagacacggggcgttgggtttgattctctttattattggcttttaggttgttattctctttggtgtcgttttataactgagacttaaggttaaaagtcaaccttacgtctcggttatatataaactgagaccataaagttattttttattttttgtaatacctttaaatctcagtttaggttttggtgtccgtctactgaccgacaccattgagttttttaaatgtcagttttaaactgagacttaaaattaaggatactttttagtgttagttttttatattaaatgaaatttgaactgacactaaaagtctcttttgtagttgtacaacgaaattgtaaaattaattatttcattacttactagttataaaaaatagtaacaagttacttagttactagattatacgtacatatatatatataatcaattatatcccacactaatttaattttaaaaattttatttctaaactaattaaatccctccaatgttattctcattcacaat

SEQ ID NO: 114847 - DNA, 3368 bp, Cannabis sativa
  modified_base (39)..(62): a, c, t, g, unknown or other
atgcaacataaaatattttttgatcttttattaattagnnnnnnnnnnnnnnnnnnnnnnnnttttatttagagcataaaatcccaacaatttcatcttgttatccacttgaatgaagacctccacacaccacccaaaaatcttagcatctggtgccacatttgtttcaataccaaccctattctaacatagttgaaccttctgacatgtcaccaagccatgaacaattaattcatcactcaagttacaaagaggaagcaacgaggtaacctccacatgtgtagatcaaagttgaaccattgttggaaagcaactcataccagcacgccacagcaggttcttaacattaggaggtaattttatcttccccatttttttcttcttccaaaaaatagattcttccatttcaacccacctaccatgaagtttttgaaggagattatatttacttttaacagtgtataaaacatatggttctttggatcaaacataatgatcaccagcctaagataattgtgatggaatttgcagaatcatgttcttgtctctctctccaaatagatttgtgataagctccacatctcatccttcactatcaacacacaataaattatacactttggcagttgctaaactaaggtcatcagagataacaaagggttctcattatcaggtagcgacgattctctcagcacatcaatggttcaatgctcaccaacacatcattaaaatctatttttcaccatttgttgtgactcccatatgctacaccatataaatcttagattatttcctagtggagcattttaaaaatccccatttagaaaatacctagctttaaataagcaagatgctaaagaattaggccttgtaaagagtctctactcttattttcccaaaagagcaagattaaaatatctcaaacttcaaaacccatttcgccaccatttttgtgacgataaagtgaatcccaagagtttaagagcaaggttgtggaaagttggaggcagcaagtaaatggtaatgatctcttttccattttaactaagcttaaaagattgcagaaagttttaatggagttcaataagagtatgattggagatgttcatgaaaaatatgatttggcctgaatcaatttcaatcaagctcaacttgagtcataacaaaacccccattcagttacaatttagagataagcaactgaggccagagatttgctagtttagagtagtaactccttagggagctatctaaaatagaaaagtaagatagactggctgcaatttggtgatgaaaactcggcttattttcatgctagcatcatgaaaagaagggaggagaaccaaatagcaacctttgttgactcagaaggaaaagtagtggatgattatatacttgtatgttggaataaatccccacatacactatccagattagcacaaaaatagtaagcaaatatacaaacctacaagtggcatttggcctttaacaacctattgagataaaaccaaagttagttgcaaagtttgttaaaactgttgcaactaagtcttagagccctaaggttagggttcagagatccattcaagggaataccatacacaaagaagaagaagaagttagtaacagagagagagagaaagaaagagagagaagaaaaatactataaacacttgaaaattaaaagggataagcaatcatacacatgatttggaatccaagtgtgtaaattattggtcttgaagatccaatagtggaatccaagagaaagtacccagcaacatttttggggaacctctataaatctggtgctatctctgtattgtttttctttacttttattgctttgtgtgttcttatgtgtggatttagggttatggtttgatctgggaaggaacaaggcttgatcttgtgagatagcagtctttgagtttcttgagaagaaactcgaagctctgctagggtttctttttacgttttgtgcgaggtagaaatgaactagctctagattgttctaaagggttaaggttgtgaccaaaatgacatttatttttggtttgagtcaagtgtcgtttaactcagggttaagtagagtcaagtgttttgactcaggaaaaaaagtcatttttgaccttgattaaaacttgataatattttgtttggtgtaggttaaagtggtaaatttttacattgtagttgaccactttttgtctcattttaggaagttcatgaggagtctgagttcagtttcacaaaatttgactttggatcctataagggaaggtcctcagcttaccttagactaataattgcttcttttaagaccgtttcaggttaaagatgtcaaaaaagccttaattccctaacctgaaaagcccgtggctagatggatatggttcaaagtttttaaggtcatgtcgagtgagttgggaggggagatttctgcagctgtcttgaaattcttcaaacaaggtcgagttcctaatgagatgaatgccgcactcttatacctaagaatgataatcctagtagtgctattgattaccggcctattgcaagctacaacacactttataaatgcatatctaagatgctttgcactagattcgctaaggtgttaccattattagtgaatgcaaatcaaggagtatttgttaaaagtatatcgcttgctcataatattatgattctgggggatctgttaaagggttatcagaggcatctcatgtcctgtagatgtttactcaagattaatatgagtaaagcatatgacaccattgattgggaatttttataaagactgctaaaagcctatcactttcatcttagtttgtacaatggctcatggtgtgtgtttagggtacatcttattcattagtattgaatggtaagatccaaggaaaattcaatggtgcaaagggacttaaacaaggataccccatctctcctttcctctttgtcttggccatggaatatttgacatgattgctccacttccacactaagaataatgagttcaggtatcatccgatgtgtaaaaagtcttactcttgtaaattttgtgctttgcggatgatcttatagttttctgtaaaggaaatgatccctctatgaaatgtatagcggcagcctttcaggagttcagttgcagcttgggccttgttgcaaacaagagcaaataatttttctactttatgggggtgcaaagtagttcaaaacagaccatgcttgagttgctaccatttcaggaaggttccttccctatgaaatatttgggggtgaaccttagaccaacaaagtagaaattttctaattgtgaagctatactcataaaactccaagctaaactacatacttgggcaagttga

SEQ ID NO: 114848 - DNA, 3822 bp, Cannabis sativa
gaatccactttctcaggtatgaaatcatacttttggttgaaatttccaaacataaaatttcatgaatttgatatgaccttttgggtttgttcagagacttctaaaaatggtggatggattaaacttcaaagattttgtggctttcttatctgcattcagtactaaagctagttttcatcagaaagctgaaagtaagtgtggcttaacttaacataaaataatgatgtctttcctcttcttctgatatttaggtggtgtactaattttcctacactttttctctgttagttattttcaaggtatatgattctgatggaaatgggaaagtctctttcaatgacatcttagaagtattaaaagatctgtctggttctttcatgtcagatgaacaaagagaggtatatatagatatatatatatatatatatatataatgctaggaaacatatgaggacaatgtttggttcacttattagattatgtttgttcaaacttgcagagagtgttgacccaagttttgcaagagtgtggttacaccagggaatcttatctgatgttggatgattttattaaggtacttttgtataatcttattctaacatcaagcaaaagatgacatagttttcaattgactattatagctcttggaagcagcttgttctttttactattttcaagtctcaaaattatctcactctaattcctgatgcaggttcttggcagtactggcctaaaaatggaggttgaagtgcccattgattaagttcaagttgaggtaattcacaacaattcaagctggaaatctgtagtgaaaactgatcagttggtttcatcatttagaatactaatagtaaatcaagatggaagcatacagctttgtatataagtttaagggattcttgtcaatgagtattgttctctttcatcacgctattaatccattaaattgattagaaaagttaaatttgcacaataagaatgactatcagccaaaagaaagatgcgaagcttatgatatatcctaaagcaaaatgatgtgtccaaggattaagatttagaattactttaaactcacaaaatatataaatttataaactagtttactttaagttaagtaatcaagaaaaattgtctttttctccctttgaaagaaaataatggtgttggtgtataatttctgtattttgtcaaatttcaaatcaatgtgtactttactgcagcaaaatatctttctaaaacaagacatactttcaatagagaagatttgcattcataaagtcaaactccataaagaattttcaaccaaaagttaataacttgaacttggatataaatgtctaatgtttccctatcccccggccaggtatggctgtccaagaaatggtcgtcaatggtgaaagaaccctccacatctgtacatataacaaaaataagggctgtttcaggccaaaactcagactccattactgttttacatcgagacttcagattaatttcattcctgtgatgatataaatagttatattagaagagtgttaatggttgtaaaatagatagttattcttagaatctcttagaaatacaaaataagcttagtatacaaataaaaaggcattcacttgtataaatcaactcctaaaatattacattttcatagaaattaccccaacaacacacaaacaacaattctaataaagtacagtaacaacaactgttggcttagataaaatctatataagcactgaagaatttctttgaaaacaaactatatattttttcatttaaaaataaagggtatcatcttagttgaaaacaaagcacatatgaattattaagaataaaatatacttatcatggatggtagtgttgttagtctttggattcaagtctagaaagagatgcctctgctactataaataataataataaaaaaagttatataaaagggtcgaatttggttttggagagtaatcaagttggacctaaatcacgagttactgttctatactcctttcacttaaatgcctgaagcaattttcagatttcacatgcaaattatcttcatcgcctttaaggcaaggttttaagtatagattaactacaaaacctcgtaaaatctaaagactaaagtataataatgggaaaaatttaagaatgttcaacagctaagactctggactaaaatacttccacatgaaattgctaaactgggattcatcatctacagtttctacatcattaagagtatggacaagttaatacaaaccaatttatggcttcgcaggctgtgctcgaggcctccatagtcccagttgatactcgtgagtatatttcagtatcagcttcctctggaacacaataattcagacatgtttctaaattagaaacaaacaatgcaaacacaatcaatcatgtaattaagcataactctacaacctcaaacatacaacaactagcagagtctattggcaagcttaaagggtcagcaaatgtaagactagcctacacaacttcataacaaaaaaagggttcaccagttaaggccttttgactgaggaaaacccctaatccatacagtataaggctttttgactgaatttattaatacgatccgacaaaaaagcactttgattaaggaaaattaagtcactaagaacaggcctctagataagaatattatagctctgcaagaatgaaacaaaatttagttgtttgacaagttctttaacattacaacacccagacataactggtttctagttcgtagtatacatttctagattcatagtaaaccttgtttgaataacactttacttaagaataatgcatgttaattaagagaagagagcaatggaggtaacattacgtgtttgcaagggactccaagcttcttgagcttaagagtgcgagtaacaaggagtttatggaagtcaccaatctcagattcaagcttggccacatgggtttcaactcctttgcctattccattcaaaaattctggtattccaactttcactgcaatcgaacaactactactacatcaatattttcttcttcattataaccaattttctcatgaaatggacaaacccaattatatagcattgcctttcaattaaaaaaaataaaataaaaaatccataacctaagcttggtaaatttctcattacaataaatatatcaaaaatgtgagagttaccctcataaggaatcgacttggagaaaaatctagcgaaaggaggggtggagtaaggtgtagagattgtatttttgttgatgaacagtatttgcctccacgccatcgccatcgccatcttcttcaacttctctttggggtttactggggttttgttcaattccaatcaacaatacggtgtcgttttccctttaatttattttaattttatttttttaattacaactacataagctcttgaaaattaaaaaagtattgcctaaaagtttattattggaaaaatgtatagccatttcggtatatattcttacttattttcgcatttagaatttttttatttaaatttgtttattattggatacaatgtaaattagaactacctcaaaaataaaataaaataaaagcactacctccaaattttctaaaaattttaaataatttaatcatttaaaataaagtttaaatattttatgtgcataattatttatttattttttatttttttttacatataaacaactatttgaattttaattttcaatactctaagttggcatttagtaacatttttttaatcagttttttatttttaaaattaaaaaagtaaaaatatttttcaaaatcat

SEQ ID NO: 114849 - DNA, 5731 bp, Cannabis sativa
  modified_base (5632)..(5634): a, c, t, g, unknown or other
tggaggcttgaagcggggacgttacagcaggagagaaaaaggaaaaagaaagagggtcgcgtatttaaaatgagagagataaaattagattttataattattaacatattctactataataatatgagttaagtttagagaatcaattttaacccaataaaattttccaaaccatgttgtaagatggataaggtattgaaagttgttacaaatgacccaaaaactcgatcattatatcatgtttgtatataaatatatgcaaataaataaatggattattgtacacaattttttccaacatataaaattatttttaataaaaaaagactcattattatttatttttaaagaaaaaagactcattattaacttacgaagcatatttgtattgtaacatgttcttaaattatataaattttgacaaattaatttttaaattatataccttctgataaatttattcttaaactttattttttagtaaatatgttctcaaattgacgaaggacttcagtgcacaacataagtttggtcttgattttctgttcctatagagactcacttagactatagtagtaaatctgttataaaatgaatattttattcaatttttgacaacctcggataatggtgtggtgaccactgtccaccgtccagtttctgagtttcgttttttcgtttacacgtgtggtgtgtgtgtgagagagtgttttggtacatgatctcatcatcaacactagtttcctaaactaaaagctgtagcttggtgtttctgcatccaaacaagtttatggaaaacataagcttcgtatactctgccaaccactcttgcttttcttattttatttttttattttttatctttcatattattggatattttattattaaattatatatatctctttaagagcattttcaatgaatactattcatatttatagttatcaaaatatacacattattacaaaatattattttgtattttcgctttcattacataaaatttgacattacttcttcaaaaaaaaaaaactattttaataattgacaactttaaaaattgttcactcaatatcacattacattaaattaataacttttttgataaaaaaaaaatcctcgacaaaaaaaaaaaaatcatatgaccattgtttatattgaacaatattttatataaaattaattttaaaaattaaaacacattgcatatgtgacaagaccacttcaatgaactaccgagattctctaagcataaggctctctgttgtgcgtctggtctgtctgggcaggggaatctcgtggtactaaactgatatcaatggtacagactacagagagttttgttggggcttcccacatttttttttttttttataatgggcttcccacattttagttgtgtttgtttgatttcgtatttgttcttcgatctgacatataagttttgttgtagttatgttctggtttcattcattgggatttgaaaataagccaacctacaacttgagtatgcttgttaataactccgactacaaatggtaaccattaccaaccgttgattggccagatttcctctttaaatactgtaaatttaaattacacgacatgagcatgtcaaaatgataaggataaaaatatataatcataacaacaacaaataaaatcattgaaatgaaataaacaaaaaaaaaattacattacatgaatgattacagatacaaataccacaagcaattagtaaacacaaacaaaactcacttggagtttcagcaagctggagcactcaatattcaaaaccttttcactcttcattatggcttttgatcttttgtatggtcctaggccgaaccaaaatcttgaaaccacttctcatggcgttcgatgtcagattgagaaacacttcgttggaccttctttaaggcttcttcaaagtcacacatggcaacagggtccttcgaaatatcatccttggacatgctcttaatctcatcacgagttttcccagcaattttgcgcctcatcccgttcaaggaagcatctcgacagacatttgttagatcatcaccactgtatccctcagttcgacgagccacatcatctatatccacatcagtggccacctaaaacagatgcataggattaatttcaaataataaactacaataaaaccagacaatttgagccaatgagttttgcttgtctttggtaagtttcattttgaaggttattattagggtacaaccgtacaagcccagatagccttgtaaatgactttaaacaagcaattacctcaacagttttcaagttgatccgtataagctctttgcgactttcaaaatttggaagaggaatatatattctcttttccagcctcctcctgaaattggaataccaccaatcagatgaacgttcagaaaagatctacttgatgaaaaatttagtgcaaaatcccagtaacattcaactccaaacaaaaataccaaacccaaccttaatgcctcgtctatatcccaaggaaagttagtagctgctaaaaccatcacgattttacggctgccatcttcatttgtggaggtattgtttacaccatctacctgaactaaaagctcagatttcacccttctagatgattcatgctcccctgatgctctgaatatattttttaaattgagatcaatacaggtaaaattgctaaatgcatgataagaatcacaatgaaaatattttcaaaaaaaaaaaacagtcatagatttttatggttatatgaattgaacacttgcaaagtgccaaaaattacaaaagttctactactgaaatatagttcttactccttaccctcgagaattacaaagagaatcgatctcatcaatgaagattgtacttggagcataagatcttgcaagatcaaataagcatcgtaccatgcgctcactctctccacgccattttgaagctaatgtagcggaagagacattgaaaaatgtagtgccgcactctgtagcaacagctttagcaagcaatgtctttccggttccaggaggtccaaacatgaggacgcctttccatggtcttctaattccctaaagttcaatgtgatgagagaaatttttggatgaattgaaagaacgtactaatcactaattacgtagaaatgaaacccaaaaaaaactttgatatcaatatataagactagagaagaaaaaaaatattttttcactcatctgtcagttaatagagccatattcagttttatcaatgttaactaagaacatggggacaaccagaaggcccagaaatctgctcctggctgcaatagccagaaacatgtaatataaaagaaaaaacatgccaataaaagctaatcagcagaagattattttaaacagttagtaatgtcatcaaatagtaatggctgtctggatccttgagtaagataaaataagataatttgcttgccatttaagaaagattacctggaaatattctggcatccagagaggaagcacaacagcctcctctaaaagtctttttgcttcactcaatccagcgacatcctcccatctcactccggggctggtttcgaggacatctctttccagcattgcagccaaatcaggatcaggtccctcgtactctttctttttacccttcccatcttcagcatcgccattctgaaaatttcaacaagtatatcaataataaattaagtctttaccatcaaatttcaaaccctactaaatggattattctttacaataactgataaaagatttagctttataatagaatctcaaaactacaatcttatgacaaaacaaacttattgaaatgatgtaacatactgctgaatcccccttgctcgattttcccgagctagtgcctttttttccagtagttgatgctctgacccctgagttaaccctgcttgacgcacctgattttgcaccaccacgagcacttggtgcaggtctagtagcaccacctcgtgaccaagccccatcctgtggcgacttcctcataccaccggggccagcccttgcagttctgcgacttgtgtcccgacttggtggcctccaaacatcagggtcatgatcatccatatgtgtacctgacgaagtcgggtactcatccaatggttgaaaaacaaaggaagacttggaatgtataggaggagaagcagcacgtcgaccagttggaatttccttaaatgcccttctttctgcatctaattgcttcacagcttccgtttcctcggaaatggctttcttaacattcatccattttgaacgaatcaaagggtcatcgagtgagtttaggtgcctaaacaagtaggaaaacttaaaatcaatatataagtgagcagaggcacggcaccaaacaacccaacaaagcaacatcaattaccagtgtccaatttatttgatactcaaagcggttccacaaaaaaaaaaattaacttgctttgacaagagaaagtatcaagaacatattttttattaaaagaaactaaaataaaggttcaaacttcagcctttgcaccctattgtcaattttaaaaattgagtaaattaaacagcatcgtttcactggattttgtagcacataattattaatgtaatataacccgaaattcacaaaccacaaaatgaagtcccagttttgtttgtgtataatgaatatagaatgtctccaaacattctaaagtttttgaagtcagacagagcccatagaatatagtaattcatgcaaaaaagcttagttaccagtcaaactaatcagatcaacaataaatgcgattaaattatccaagaagataaactaaaacatcccaaaaccaagaacacccacattctctgcaacaatcaaaaattaaagcttgaattttcaaaagcatcagtaaacgaaaccctagaacatcaaacactagttgaaaaaatggggaaagacgaagaaaagtacttgttgatctgagcaatagcaccgtcgaagaagataatggaggtgtcgtagattccttcaagagcgtattcccttgccaacttcagatgatcttggaggccaacgagcgaagaagcgcccaccattttaccgggaaactcaaacaacaaaccctaattctccgcacgactactgctcagtcaaattcatgtagaaaaagaggccgatggagctctctctctctctagaaggtagaaccgtaatgtatagcttctctctctaagttgaggtgatggagaagacacagcgaagcttaacggcgacgtttaagcgtttcagggaagaagggagtgagcttactatattgccccttggagacttggagtttcagatggataatgatggtgctggtgggtgggtgggctttataatcttcaattgtagggcccaaaattttcataaagcatgaacttgggcccatttgggctcacttattttctaattttcgcttttctttcttcttttttcccttttctaacgaatctatttaaaacttcccaatttcaaattttgattcttcttcttctcataaaattagaaaggaaataaaaaaataaggaacgttcaaaaaaaattatatattatttataattttactatataaactttttaggagttttttcatttttannntttaaaacagttttttttttatatttttacgaatttctacatagaaatttctattgcaactagcgctacaacataaattacaataaaaaatcgtata

SEQ ID NO: 114850 - DNA, 1044 bp, Cannabis sativa
  modified_base (66)..(71): a, c, t, g, unknown or other
taaattctcttacttattaattccgccttgcgccactataaatttggaattgaatagcactctcannnnnntagaacgctctatatgtaccaccattctacaagattccttctgagactggcatctgcgagtgaacaactttccagaaatgacgtttgcagagaccttttcatttggaggaactataccacactattagggtaaaattatcaagagagaaactcaagagaacaacgactctattcttgagcttgatgagagatcatgcaacaaaagataaaacaataaatcaagtaaagatgtgagggtaagagaaatacaaacacaaagagattttataaggttcaccaccaaaatttggggctaagtcctcagtgagctgccttagagaagctcaatcacaatccactattaagatcagcaattataccaagtttcagagctctaagacacattaatagtctagtagctcatcttcttcatcataggtatgaatatctctcacttttctttctctctagatcgaaacaatccccttccttttctctctctaacactcttcttctcttttcttgaacacgagagcaactctcactaggtctgaacctcctaaatattcatttttctagtttgaggagttgtaatgaagctgtaagtcatctggttccagtatccttctatttatagtgattgcatagctgagtaaattagttaggagtaactaacgaagtctagttaggctttaaaatttgttttaactaagtgttagttgtgacaagtcagcttatattgagaattatttcaacgtaatctaattcaaaccacagacatgtttataattgtgtgtttttttttttttattgaattaggtatttttatgaagactcttaccctttactttgtttcttactaaatgaccaactttcattgacgagtaggaatccctgtaatcatataatacaacaatatttttttttttttgaaggaaaatggtaaactttattagaatgaactttcaaccattacaatagataaaagatcagc

SEQ ID NO: 114851 - DNA, 1477 bp, Cannabis sativa
ccccaaagcacaactttctcacatggttggcaatccagccgaggctcaaaactaaagacatgttacttaaaatgggattagcttcttgcataaagaaaatacatcaaagcacttcttcaaatgccctgttgcaactgcttgtctccaggatacaaaacactggttacaatggcatgcaacacctaccaccttgatcaccctcaccagatggattggaagatcaaaacttagtaagttcaggaagaaggtgtttgcagctgctctctcttgcttggtgtatacactatgggaagctcgaaatgtcagtttgtgggaaaatataaaagcagaaccaaaagtgttaatcaagggtttaaagcagactgttacacaaagaattagcttatgttggcctaaaaaagtcagtacagaggatacaagctggtttcaaagcttgtaaccaagcattcgaattgtatgtatgagatttaagtaagcagtgtacataaatgtatagatagtattgtttataggccagtaggggtgttatttgtttgtaaaaattagatttgagcaatacaaactttcctgattcatacaaaaataaaaactgttatgaagttggggttttgggtggcaatattttggtacattaaagtttattttaaaaattaatatattgtcattaagttaacaaactactatatttagtaaatagtttgatttagtaattatatgtgtattttttttaaccaagtaaaataaaaaacctacaagttaagtaaaattgttaattgaatgttgtaagatattgctgataataaaatacaaaaaatggctcaatacgtaaattttccattaatatttcactattacatacaactcttaactacattttgatttttattgagttatattttatgttagtttcgtgtgtaggagtctatgtataataagttaattgcgtgcattcattagtttgtatttaacgataaattttcttatttaatttaaaacatttgtatatattactatttatttgtagttttactatttatattaaattttaattttaaaacctacaaactcagttttttcgcttttcctcttttataagaaaaatcccaaaccttaaaagacatctatgcactctctctatcaatatatgaacaactacttaaaaaagaaatctcaaggtattttctaatggttgttttacgaagtggcggtgaaagaatggggtaggttttgtttatttttgtaatatttgttgggtgataataaaattttgatatcttcaagaaaaaaaaaatattgattttttacttgttttaattgtctgtatttatttatttttctgaatgtaattattaaataatatgttataaactaatggttttatttagaaatttttacatgaaaaatcctttttacacactttattacataattaccttcacacgcctattactacatttatacttacaaacttattttt

SEQ ID NO: 114852 - DNA, 2049 bp, Cannabis sativa
aatctatatattatattattataaataatataacaaataaaacataatataaacttaataaagttgatagagtggcaaacatattaatatatgaaatgttattaactagtacaataatataataagaaaaataattcttacaaataatattactaagatatttaaaatataaaaaaaaatgagaaataatgctaatgtggtgattgtagtttttgtttctctaactgagacataaatttattggatctcacattctcgttgaattatgcaggaagcgatagttgagcagtttgcgattgttgtagtgactgtagcggttgtgatgtctacaactgcatcattcattaaaatggatagaccggctgagcatgttacgataaattttaataagtaaatcactagaattagactatcaattttaaataactattttattttaagattttacttatactagcaaatattattaaaattatattgtgtttacaaaaaattagacaacataaccactaaaatttgaatatccaaaaattagcttgttaggtggatgttcctttgtcgaggtttgtatattttgtaattatgatcactctatcaaaaaaaaaaatacgtgtatataaaaaatcacattattctcaattttaaatcattttttaaataaaattactaacctgatttttttaaaaaaatttatacaacaatactatacaaatatttaaaaattagttaattaaaaaaacacacaaaaaaatacatactaatatatttcaaacacataaatataatctatttttttcacaaaccaaataaaattattaaaatgactttttaaaaatttgtacaaaaattccacatatacaaatatttacaaatataattaattaaaaaaacacacaaaaatatacaatgatatttcaatataaatagtccaaaaaaaaaaaaaattatttcaaccacataaataataaaaagataaaaataaaaaaaattaactttatgttcttgaagcttttaaccaaacaatattttatgtttaaaaaaatataaatttttgaaaaaaaaaatcagatatttaaagaaaaaaacaaaaattaaaaaatcacaaatgcttttttgtttttaactacataaaactgattaggataggtggtcggttggaataatgacgatcggtctggttgtgagaaaaaaaaaaaagagatagagaagaggaggggaacaactagtgggggtaggtggggagctggttggggtagtaagggcagtgaggatgcggcagtagcaacaaggtctttttttgttttgttttgtttttgtttttgcagagagaaataagaagaagaagatgagaaagatgaaaaagaaatgagaaaggggcagttggtagggttttattttaaaaaagcatacagattttgggcgagaaaaagcctgcctattttcgaacagtcatatttcaatattttaagggcgacaaatgttaccctaatactacaaagtcgcttcaaaaggttataggaatgatttttgtcgccccttaaactctacaaaactaaaaaaaaaataagtatctcattttttttaggggtgataatcttatgtcgcctcaaataccctcctctttagaggtgatactatgtcgctcctaaattgatcgtccctaaaagccaaaattattgtagtgctttataaaatcaaaggatttaaaattaagagaactaccttctcttctacaatcaagcttcaatacaccataatatcactttccactaacgtttaaacttcagctattaatagaatgaggaataatcagctgaatgagcttcgcgatgctaatggaaattgggtttcatgggactcgggtttgcaatctgttgtagccgactatttcaacaatttattcacatcttcgggtagtgtttgtactgaagtggtcgattgggtatccactacagtgtcggatggtgttaatttggaactttgtcaagcagtttctgaagaggatgttcgaaaagcagtcttccaaatgcaccctgacaagagcccggg

SEQ ID NO: 114853 - DNA, 2873 bp, Cannabis sativa
  modified_base (27)..(41): a, c, t, g, unknown or other
taggatgttaatcaaacatacttggtnnnnnnnnnnnnnnntggtaaaataattccaacactcatcaatgaggataagccggagggtcatggagatgaccacaacgaagaccacaataaggattatgaagaagagtactacaagcaagaacctgaagtagtacgattgtagaaagagcttacatatactcgaacgaggttagcgaattaggaagaactcttgcgttagatgcaagaagaacttgcacgattgcaggctcaagctaacctccctgaaggaaaccctcatgctaagaaatttaatcatcctagagttgggccatccacccaaatgaatgacaaagggaagggtgtaatgggcgcccctccaagaagatccacgaacaatgttccaccgaacaacaaaaaagcagtaggccagccgcagcagaaagaaagggatgctcaagccccaaggctaggccaacccatcaatctgtggggaagagtcatgtggaatgatgggtcgggtactcaggtacaagagcccaacgttcggggatggaaaaatcacctctagtaattctattaactatagcatatgtgtggatgatctagactaggattgattagaatagcatagaccgaatgcagtgtcgctcttgggcagacccaaaacaaaccaagaaaaaagtttttgagtcagttgtgagtcagtctcagaataagagaagcagaaaaactcaaggtcagagtgaagctccaaagaaagaaagaacgaaaaggatatgaagcccaatatatcaaatgtactaatttgtcgacactcgtgagaatatctatagggctacgtgcaatacaattcattataggaagccccctccggtgtacaagggtggcaagcacaaaagagatcccagtaagaggtgcgagtactggtgatgtcaggaaaactacaaaagaatgtgatcatttgaaagatgagatcaagaatctcataaaaaaaaaatgggcatctccatgagtgggtgagaatcccaaacatttattcaacacaatgggtagcccaaagacaactggttatttctggacaacatggagtggtaaaccctcctcagagagtggtttactaacaagttccaagaatacaggccccacaaggggtcctaaatgtccagacacccaaaaatgttcaagctcccaaacaagggatcccctaccctccaggtgttgctccacctccagttgatggtcacgttgcaaaaaaatttttaggcttgcatttcactggaagtaccaaaaatgtccagaagaggtactttaatgaacttgaacaagatggggaagtgtctgctctcgtgcaaacaccatcaaaaagctacaaatgttgaatctaccaatcacattcatggaaaaagatgctaaacatgttcatttcctccataatgactcatttgtgatcgaggctcaggtcgccagcaaaagagtatcaaggattttggtggataatgggagttagatcaacatcctatttaaagccactttccatgccatttggttaattaacgcaaacctcatgccttgctcgatcaagcttcaaggcttcaatggagactctctactgcctagagggaagatctagctccccgttacgctaaatgggggtttatccaaaagcaatacttcctctacattcaagtactatacatttgtcatggtggactattcaaccacccacaatgccattttgggactaccagtccttgtagattttagagcggtaacctctattcggcacatgtgcaagaagttctcctgtgacaatggaagtataggaacagtaacaggtgatcaaaagagcgcacaaaagttctatagtgtatcgaccagatcagtcttcatggtttgaaaagagatggaagagccaaatcctagagcacctaccgactagcacatggagtagtctgggaggaagacgagttagacccccgtgtgggggtggaaataatgattgaaccactagagaaatatggaagaagtctgcatcagggagaaagatcccagaaaagttattaaagtcggtcggactctgcctccaacaataaagaacaaattgggtccacgttaaagcagaaccaaggcatcttgatgtggagcaacacatatatgatggggatcattccccatgtaattttccatgccttaaacatagatccaaatgttaatctagtcaggcaaaagcagagattacttgatctggtatgctcagaagctgtgactggggattggacggctgaccgttcagagtttgggcagtaagcccagcaggaatttcttctgagtcgcctagtgggatgctggacgcaggttgctgattagaaacttggtaggctcttcgtatcactacggtggcctgtcttgttcggtcgtcgatggctgcctgttgagcctttaacgtttccagctctctatccctccattcggtgaactggcgccttttctcttcgaatgcaaggttcactgcagcacggagctcttcgtggtcatgatgcaaggtattagtatggccttccatgagcccaagagcattacagaggttctggatctcagtgtcatctccaatggttgtctgaacatttattgctgaagggatcctagtgctgggagtacccagttcggctgctaaactggtgtttccaatctcttgcacaccgactgtgattccagccaaaggagatgtcgcaccttgatccgcagtaggtggttgcgtgtttggtttcttgggattggtgactggtgggacccttgcattccctagagtctgtagtgcgggatctaccgccagtggatccacctgatcgaccacgcctctgcgagttgttgggttttatgccc

SEQ ID NO: 114854 - DNA, 2350 bp, Cannabis sativa
  modified_base (2298)..(2309): a, c, t, g, unknown or other
gcgggttggtttggttaaaaacccgcactgcgaacacccctagctatatccactcaagttcaaatctaaagcactaagtgctttcattcaattcaaaaacttggaggaaaacaagtttgacaaaaagattaaatgtctcaggacaaattggggtggtgaataccaacccttcaccactctagttcaagatcaaggcgttgaatttcaacattcatgccctcacacttccactcaaaatggtaaagctgagcgcaagcatagacacattgttgaaatgggtctcacattgcctgcttaagctcaactgccattaaagtattgggtggatgccttttatacagcagtctatctcataaataggttaccaacacctgtgttagttaacaagtcaccatatgaagttcttttcaaacaaaaactagattacaactttcttaaaacctttggcattgcttgctttccctgcatttgaccatattagtcccacaaattccaatatcactcactaaaatgtgtcaacctaggctataacacctcccataaggggtacaattgcctcactcccacaggttgcatctacatctctagaaatgtagtattcaatgagttggagtttccattcaaacacggttttcttaataattataaaactcctaaacctgtcatcatccacagttcatcttgctccacccttcccatccccaccttcaaagatcaccgcacttctaggtatgtgcatcctcaacctgaagcattctctgaagcatcaccaggttctactcaggtttcgtttcccttgtcccaaactagttctgcctctgatcttgcaggggaggatataactcaaaatattgataatgataactaaattactcctaattttgatcaatatttcgagcaatgtactattgagcaagacttagaaccagtctctgaaattgatgctgcaatctctgatgctgaacctgcagcagctgcctcaccccaactaactttagccacagcattgcagcctacataccaaatgatgactcgtgctaaagaaggaattttcaaacctaaaacctacctcagctcagccaaagccactgccacttatgctgaacctgaatctgttgaggaagctcttaagcatccttggtggaataatgctatgaataccgaggttgttgccttaaagaaaaatagaacatgggtgctggttcccccttcaaatagtcaaaacttggtgggaaacaaatggatattcagtatcaaactaagagcagatggaactgtggaaagattgaaagcaagacttgttgccaaaggatttcatcaaaggccaaggatagattatggagagacattcagtcctgtgatcaaagcctcaacagtgagaattgttgttactatagcagcatcaagaggttgggaaataagacaacttgacatcaacaatgccttcctaaatggcatcttgaaagaagaggtttttatggcacaacctcaaggcttggaggaaaaagggaaggaaaattgggtttgcaaactgaacaagtcaatctatgggctaaaacaagcccctagagcttggtttgacaaactcaaaggcaccttaatcacttggaagtttgagaactcaagagcagacacatcagtgttcttttacaagactgagaagagtgtaattttggtactcatctatgttgatgatataatagtaacaggaaatgatgcgactaaggtaaatgaattcatctccaaactcaacaatttctttgcactgaaggatcttggtcaattatagttctttttgggaattgaagtttttagagatgagacaggactttatttgactcaaaccaggtatatcaaagacatattgaagaaagtaaacttgatcaatctcaagccatgtcctacaccagttacagctgggaaaccactgtcaatcaaggatggtgaacctatgcataattcgtctgtatacagaagcatcattggctccctccaatatctctgccataccagacccgacatcgcatactcagttaacacactgagtcaattcctgcagggccctactacagtacattggaatgctctgaaacgtgttctaagatatctaaaaggctccaaacacctgagactacatatcagctgcaacaacaaactgaacatcattggcttctgcgatgcagactgggcttgttgccccgatgacaggcgatcagttgctggatattaggtgaaacattggtgtcttggtcatccaagaagcaggcagtagtgtccagatgttggaatttattttannnnnnnnnnnnatctactcacaagtatgttgttaacaccctaaatatgaact

SEQ ID NO: 114855 - DNA, 1625 bp, Cannabis sativa
tacggatcttttaatcacaatatagtaatgataatttataattagtcacatcatttttattttatactataaattttattgtgactaaaaataaattttttttagtgaactaaatcaaactatatgctacaaataaaccacactctcttttaaagatttttatcctaccaagtaagattctaactaatatcgattgtatatccaatctatccatacaagaaataattatataaactttccttcataaacaaaattattcctattgagccaatagtaaactgtagctgccatagcagcaaaagtaatgttggatagtaatgttgatcatccaattaagacaagcatgatgatctataggctgcccaacaatcgaatcacttgctaaacaatctttttagagaaatacattcaaagaagaggtgagcatccataacaattgaggttatggattttcattttatgggaggtagtatagtagacaatagaattgttttttatttgctaacaacctcatcaaatagctctacaattcttaaccttgttacaactagtgataaatttatcataaaatgtgctgattttgaagttaccactctggcctgcttgaaaaatgtcaccacgagaaagcatacttcgaattttaactaacttctttcaaaaccagctcacatccaatttcatatcagtcccaaaagcctgaatttttcagattaatgagccacttcatctaaagaacatactgcttagtagtaagagtccaaatatacttaagttttgttccactatttatttatgtatttttgatagaaacttgtttggggtagaataattaaaaaacttgggaaaaaggggaaccaacaccccttgcttttatagcccaagtctcaaacaattccacttagctccttctctaaaactcacacccccaaaaactttgggtttacaaactaactcccaaagagaaaaatgtaacttatgagcatggtaaagctacatggagcctaggttaggcatgcagtagcctaacttgaaattaggactgattctaagttatttagagttcatgtctaaatagaactttttagggttttattaaaatactttttctggtcaaataatgttaagtaagattatttgatgtagcaataaacatcttttcaaagtttaaagaagtcaaaacttcaaaactccatggtttcattttattttcttttttgaaaataataaaataaaatatcattaaacttagcaactatatgtaatgtgaaaattttaaagactccacataatatcaaaatatataatactcacctcaattttattttatttttaattttgtccttgcttataaggcaacattaaaatactcattcaataacatctaatatcgttccagcaaaaaaagaaaatttggtatagctctgcatgcgaagcagacaaaggtttactagcccaacaataatgtcattttaatcttttgaatgattggaccacaatcaactttctttcatttactaggccttatggcaatacccaaatattaaaaggctaattacaaaaatactgaaatttggattaacttttacaaaaatactgtcacacgaaaagttttcaaaaatactgtg

SEQ ID NO: 114856 - DNA, 5253 bp, Cannabis sativa
aaactgcaaaccgcaccgcaccgcgcggtttagaaaaaattcaaaccgcgaccgcaccgcaaagaatttcaaaccacattttttttccatgcggtgcgggcggtttgagtggtttaggcggtttgatgaacacccctaataaaacatacaacatatatctgacatgtaattaggcgtccgtacaccaaactaccgtaagtctactacccccgttcaacgtatatagctgagtctcaaaccttcttaactatagtacgattggccataatatcagcatgtactttgaactctagtcgtactgatgtgatgcatcaatccatcttgttataccaaattctgcacagggtgatgtggcatcgagcatggtgacatgtggagaacattaagaaatctggacgggtgattttctcttcatggcccggccagagaacttcctacttaaaattatcaaggttacatcttcagcaaggatcatctaggcagaacctgtgtgattgcccgtacagatccatattatccaggaatgtcgagtcttccgaatagagtaatttggcataagaagatcttcaaagatacttctcttaaatattctagcattgaggtaccgatcataccttgctaggctatttttatcctattgttcgggtcatttttagagttatttttcttcttattcgtcactttttggaataaaattatgcttattttctttggtttcaagtttagacaatatataaattgatcaaatttcaaaaaacaacgatctataaaatagagaaaattttgtaagaaaataaagataaaatttcaagcctaaattaaactatgttttgatcagaatttagaaaaagtcaaagtacagaagttttagatctcttttttatcaacgcatcttaaatcatctcatttagattttgtatgtgaaaattatgtatactttactaagagaggtcgaagtaggaaattaaattgtagtcctgaccagaaatgttgtggtcgcgactatgactttgtacgggatatgggcaacttcgtcttttctcaattttggactgaaaactctattttaatgaaggggtcatgacttttaggggagatagatagaatggaaccctagaaatacaagaagaagactattggagcgagcatgggtgatctgtaacaatcatccatctagtttctttctcttctctagatttcttatatttttatttgtgtttagtttaatatagatttcattatgagctaaactccctatttagggatgtcatgaatattgattgagattattccatagattaatgctatttgattgattttctttcctattattgtgatttattcatatttgtgtctattacatgtgtttgattgaccacgttatgcatgatttatgatctcaatacaaaatctaaaaaatgagtattgagaatgctctaaatgaataacataatgcaccattctatattacttgggggagatttaaggaacttggagatagatgttatcccaatttctcaagtgagtattttactttgttcttttgtgacagacttgatgatgaaacaaaaagttggtgggttatggagcagacgagagagcctttgttaaggagaagccatgatgtaattaatctattgaatgatatggcagattttgattacaactgacattgagatccatcacttcagttagagtcatcaatatcctccttattacccaaactcaccccaaccatttaaggaagaggagaacacaccatcacttgcagaagaaattaaccacttggcagacatagtaagatctctatgtgataatctaatggtgcataatttagagtgttttaacggtaataactcaaataatgaaagttttgagagttttttgaataatgaagaagtgccattagataaatacatagaagagattgagcctagaaatgaagagaaagaattctttgaagtggctaaaaatttgggtacattggatgcttgctcaacaaatgaagatcttaatctggtgaatgaagaaacatccatcctcattgatgaagttattgaagatcaactcacagtcaaggttgtggatggtcatgtggaaaatgaacaaacaattgagagggtatttgagaaaaataagaaagatgtatctttgctggctgaagaattacttgtagttgttgatttgaggttgtcaatgctattatgttatgaattaccaatggattcttattttccattaatgtcagcttcacaatattacatcctctacgagctaccaaatgcttctctctaagctcatcatccaaaatcttgtgttgttggtgttgcttttggttcaaactcatcacttgtcaagcttgagggtattttcaaaaacaactttcaagttgtctgtattattatgggcgtcaacctcttgttgatgtggcatggacctgaggtagattttcttctctttaaatttttatttcacattgaggacaatgtgaaattttagtttgggagaggggacttattattttggtttgtttgtttattttgttttattactttgtatgtttattttctagttttctttgttaagtgtgttgttaattaagctgatgatataatggattgattttggcgctgttgttatttatggaatggattgaaaattatgaactgtgagcttgattctttgactctttggattaatttggattcttgttgaaaattgtgtattgatgtaaattgtcaatgtttggattgtataataattgttctactttggtatgtggaatgattgcttgaataggatagaacttgcatatttattctcttgaggcaaaattcttggcaatacttgttcggaatatgatttaggtaattttctttggactgtttgagcctatcaagcctacccttattcaatcatctctagtttatcaagtttgagcttgaacctgttttaaatttatagacacttaataaaacctgaaatgtatctattcattgttttattctcgttgcaccgtgaattatgccataagctttggaataagtttgggggaataaaatgtttgggagtaaaactatttgaaaagtaggtgattgagaaaagattataaaattaatagtgttttttagcatctctaaaataaagaaaaaaaaaagacaaaaatatatttcttatttctttaaaaaaaaaaaagcaacaactatagtgaaaaagaagtgatgttgaaaacataattgtaagcttctcaatcaaaaatttttttaggcgaatatcgggatattggactattgtgggtgcttgacgggttatagtgtgcttatggtataatatacgctaaaataactttttatctacctattgcctaagccattacattacaactatgaaagtccttttgatttcaagcaaggattgttaacattagttgaaagaggtaagtcatgtaagtatattgatcattgggttgtggaaagttagaaagagtagaatttttaggatgatatccaattaaagaatttaaatttgcatttatacactgttcttcaacaaaaaaaaaatatctgaattaattgttagcgttttgggattgaaattttggttaaattgattgattggaattttaagtcttaactagactatgttttgatcagaatttggaaaaaatcaaaacataaaagttttagacctattttttatctttctaacacatcttgagtcagctcatttggagtttgtatgtgaaaattatgtatatcttactaagagaggttgaagtaggaatttgaattgtggtcgcgactagaaatgtcgtggtcgcgaccagaaacgctgtggtcgcaaccaaaagtgggcataatggttttttctcacttttctacagtggtcacgactagactacctgtggtcgcgaccacgactccgtacgggacatgggcaacttcgtcttttttaattttgagctaaaaactctattttaatggaaggagatcacaaattttaggagagatacacagaatggaaccctagaaatacaagaagaaggatattggagcgagcgtggacgatccgtgtcgatccgtgccaatcctccatctagtttctttctcttctcttgattttttatgtttttatttgtgtttagtttaattatagatttgattatgaggtaaactccctctttaagaatgtgatgaatattgattgagattattccatggattaatgatatttgattgttatttcttccctattattatgatttattcatatttttgcttattacatgtattggattagccaccttatgcatgatctatgatctcaatacaaaatctgaaaagtgagtattgagaatgctctaaatgaataaacataagttttgatgtgaaacgagagtagtcacatagcttgtgtgacccttagattgttgcttaatgcaaattgtttgctgtactatctcagaaatgcagtagttgacatgcaatttaagatctttatgatttgaaaagagtttagattactttataatctatcatcacataggaggaagaagaataattaaataatattaataattgggtaatcaaagcaattgaaatcatatccctaatttcacatctattgttaaatctctttttatttgcatgttttgttttttgatgtttgcttagattatttagtttcaaaatccatttatttgattgccaaataaaaataagaattcaattgattggtacttagctacagtcttcgtgggaacgatctcacttacttgagtattacctgttaaaatgatatgtatacttgcatgttggatttatcataacacatccctaattttatgggattgacttgcaccgacaagaaataataggaaactttcctagttttcctttttagttttatcttttttgggaaacctatttattttatttttttccctatacatagtgaagaaattctattgtacagggattcaaaacatactttctagagagctcttatgctgtaaaataattgtaagcttttccctgagaattcttaagagactcacttggccagcttcttgtgatcttattattctttaaaccaatatattaaaaagaagagtaggctattgccattatcacgggattaaacctttataaatctgtattcttatttgcttaattacatataattttttttttgttggggtaaccgataaaggttaaaataacaagggtaacaaaagttacacaaaaggtgggg

SEQ ID NO: 114857 - DNA, 3272 bp, Cannabis sativa
  modified_base (3180)..(3187): a, c, t, g, unknown or other
agacttatcccttgcctacatttatcatacttgaactcgcttttggccgatagaaaactgcatcaaattcatctatgttagaaggaaagaataggaattaattatgtttttgtggtatcaagtgtagtgtaatgtagattttgtaagtatgtgtttgttttactacttgatgtgtaatgtagatttttttatttttattttgtgtacttcctctgttagtttctgtggtgctgaggtggctctatgagataagtgttatatagagagttagagcggaggatgctagaataatttagaggtaactttcttgtttgggagagggaggcatcttttaaggaatctgtacatttctagggtttggatttcaaagaccagcccttcttcttcaatagagaaaattagtccttagtgaatatattgaagattgtttgagaattacatcatttattcatttaactacttaagttgacttccctactcaaaattttttatgtggagattcaattacattgaaatccttattgtaaaaatccaaacatctgttcatattttattctttttttttccttcaccaagtttgtttagaaaaaatctattctttctttctaaccaaagaacctatcatgttgctagtatagctagattccagagcttctgacttctttttgacctcggacctattcctcccgatagtagaataggctacacccaatgccctatgagaacactcccatatgatggtggaaaacaggcactgcgataagagttggtcttgggacttgacttggtgccctgcctgcgaaggtccaaccaatgtgggggaaatatgcaagaagggtcttcgtctctgtagggtgtcatttgggttcagcttgcccaaatttagtatccaactaaagcacttaattttgagtaaacaacttcctttgaaatgtaggtgaaaaatgaaaacctttctccagatcaactgagtgaccgaaataagaatttgaatgaaacggatctggatctgtctaacttccatatcctttaatcttctaccaggatgttggattagatgagaccaaaaataaaatatattttaaatgttagtcctccaccaattctctctcattgatgttctgaaattaattcaaatcccaagagaacttgttttccctgatacatttttgctcacatcacatggaggcaatgccaggtgttggtaacatgctgagaagaggaaatctattagctaatctagtatctcccaccttcataattagcatctgtatatgcttcttaagattcttctcccaggactgacctttagtttagtacatacatcttcatgtttacagcagcatctgcacttgcttctccaagtttatgttatggctcgcatctacaagagtatatgcaggtttacatgccagcttttcggtttcagataaaagatcaatatcttatttctgtgatgagataaaaatgtactgtggtaatatgataggtcctcctttttgaaattatcattgggtatgtaggcttcccctaaatgaaactttgacctcttaaaacgtgtattttttttttctgtttcttccctataaatcggactcgtctttatggttgaaattacttgctgtatacgtgtgtttcaagtttgtgtgatttgtgtatatgcatatcattactcatagtgttcttgaaactcttttattacttgcacattggttgattattactttacttaaggccttaagggagtttctaatgataaaacccacttgtttcagatcattttatcccaagaaaagaacattcaacgacttaatgaactagttcgtagtcttcgggaacaattacaacaatgtaaaggaagcaatgaggcaaacggcactgcacgccctttgactgcacatgtcatcggacttgaacggcagcagcttcttgagggctaagctggatatctttcaatccaggtcaatgcttttattatatgctgtttttacttaatataatatatctttctgctctactcaattatagttgggctgcatttacatgtaaattaagagacaaaccactcccgaggatcaataacccataatgtaatactctttacatggtcaatttatgtgtttttttgcatgtctccaggtaatttatattgttttattgttattaaccaaaccaaaatgatctacatcaaatgtctaatttcagatttgattggaggcattgagttacgttgttgaaatccaaagtaattataaatttctctttatatgttgttttatataaagtggtgtactggtttatatttaaaaatatatgttggcaatactggtattaactattttctttgaataatgttttagttacatttactctttttttttttgaaagacttttagttacatttacttgaaagtacttattcatcaagaacaattacaccatattagaaaattctggtgaaacgatagaactcgaaactgcgggaacaacccattccaactaagaatgctttcataccgcttcggttgctggtttggatcgttgcgaagctgtagttttcacgtggctcgggatggggcccgtggttggggtgtgtaacaccgctcattctatattggtatggctaggtttgaaataaaaactattgcaccctagcgcaggaataagactagcaatatccaaaacagtaccatcaaaatcaaattaagactttccaaaattgtttaacctattggtttcaagtgcttaaagggtcttgggataaaccttgatttggggtcaagaacatcaccattgcagtccctaaccaccgcactgcacctgtactgcaaaaccgatcttattcccaagacggatatgttcgcattgaccttgaaagcctcgtgcaaggagaagtccgattccgagcttcatttgtctttgccatatctggttttctgttggattttatagtcaactaacctttaaactttctctttgtgaggagaggcaaccaccctcaaacttactactatattatcgagttttagcaaaatattatagggtgcttctacagtggactctcttaaaagggatgcactaatgctccatctacctgttttgacactcaaataatctttttgttcaattttttttttttaatattcgtgtatgttatagttaggggtgttcatccgatcnnnnnnnnacttttttggtcaaacaacatctaatccgcactaagtgcggatttcatattttggatccaatccgatccgcataagagtttaaat

SEQ ID NO: 114858 - DNA, 1253 bp, Cannabis sativa
  modified_base (41)..(41): a, c, t, g, unknown or other
taatttcataaataatcataaacaactgctaatttccaaantaactaagcgggctttacacaagctatctctggactggtgtatgaaaggtgtgggcctatgatttctcatttattattcgtcgatgatagtgttttcttattggaagctacgctagagagtcgtgttcaatttggagacatccttcatacttatgaaggtgcgtcaggttagttggtacatttaaataaattaattatttgcttttcctctcgtatggctcatgatgtttgtaaatctgtcattggtgttttgggggttcctttaataccttgtcatgacaagtatttaggactgacttgctttgtagggaagagtaaaagtgagttgtttcaatctatttttgatcaaatttggaataaattgtttagtttgaagtcaaagcttttttcttcaggtggttgtgaggtcctcttaaaatctatgcttcaagcaattccgacatgtgttatggatttcatccgtcttcttgtgagtattgtgaatgaaattcatcgaagtggggtggagatcctgataagcagaagttacactagtttacgtggtctaggctatgttggcataaggcagatggtggaataggatttcgagacatatttttatttaaccaatctctattagctaagcaggcagttcgtctatattactttcctaattttttggctgcaaaagtaatgaaaggattcttttatgtgaatagctgtttgatagaggtggttgaaactaagcagaccttgtttttacggaaaagtattctttggggtcgtgacttatggaaaaaaagagtttgatggttaattgggaagggagaaatggttcgaatttgggaagatgcttggatccctaaagaccatgtgggttgggcttactcattcagggatggtttagatcttcaatatgttagtgatatgaaattggagaatgggctttagaacgttcctttggttaaagatctctttgataaattggaagccagagctgtcttatcaattcatatttcgttgtttaactggaaagatacattaatctggtattttactaatactgttatgtacgcaattaagagttggtattggagctcggtcaccatattagggtggggtagggatggcaattatacccgcgggtactcgtccctaatggagcgtgtacgggggttgactttcaggggcgggggcggtggtgggtatgggtttaaagattcatacccgagt

SEQ ID NO: 114859 - DNA, 3982 bp, Cannabis sativa
  modified_base (3874)..(3886): a, c, t, g, unknown or other
  modified_base (3940)..(3957): a, c, t, g, unknown or other
aattaaattcacatatattgaactatataataatataattctgcacttattcataattatctaattagagttttgctaatccatttcttaattccatggtattacatctttaataatgggtgagggtcccactagttaagtagtcaacaatgggtgtcatccatgatttttttgggatatcaataattttaatatcttcttcacttggggtgatacttttttcggtcaagtgttctactagaaccacattgagagtggcagcttcttttgtggtggtgagttgcgcaagagcatcagcattggaattttattctcttggaatttgctcaattgagtaatattcaaatttttggaataagctttgtgcctttgccaagtaagaggctattttggctccccttgcttggtattctccaaaaacttggtttactactaattgtgagttgctaaaacatcttattgatttggcttgtaaaccacgtgcgactcttaggccaaccagtaaatcttcatattcggcctcattattcgacgctttgaacctgaattgcaacgctgttggattcggtagccattgagcgtgaccaatattattcctgcccctgagttgttttcattggacaacccgtcaacatataactgctacgtatgctgagggagcttttgaatgtcttcttcttctggccacctggtgcattcaactatgaaaccggcaagagcttgagattttatggtagttctttgatgataggttatctcaaactatcctaattcgacagcccacttgaggagttagcccgaggcttttggttttattaatacttgtcaaagggggttgattagtgaacacatgtatctagtgtgcttggaaatacgggtggagttttcttgatgcatggactagacaaaaagcaagtttttccatgacttgatatcttgactctacccccaagaggcgcttgctcacatagtacaccggtttttagcccttcttttcctctcgcaccaaggcaccgctaatggttgtttcagttatggccaagtataaatacaaaatctctccaattttggtttagacaaaatttggggctctgccaagtgttttttaagtactcagaaagcttcttcacactcttctatccattctactttgttgctgcctcaaagtaagttgaagaagggtaggcacttgtcaatcgactttgatacaaatcagtttagtgctgctatgcgactagtaagactttgaacatctttctttatttgaggtgagacatgtccatgagggcttttatcttttctgggtttacttcaatgcccatagaattgacaataaagcccaggaacttttcagatgaaacaccaaatgagcacttcaaaggattttactaacttgtcatccacgtagacctccatactttgcccaaattgatcggtaaacattttgttgacaagtcactggtaaatggtgccaacattttttagtccaaagggcattacgttgtaacaatataatcccatgccagtgatgaaactcgtatgttcttggtcagcgatattcataacaatctggttgtagccagaataagtatccatgaatgacatgagttcgtgtctggcggtggcgtcgactaattgatcaatacgttgaagtgaaaaacagtccttggggcctgctttgttcacatctgtaaagtcaatacatgtgcgccactttccatttggcttggggaccaaaaatgggttggccacccaaatgggatagaatgactccctaataaaattgctagcaagaagtttttctacttctttttttaacgtagcatatcttgtctcatcaaggagcctccttttttctcttttagctgggatgttcttatccaggttgaggatatgcgttattacattaggatcaattcccaccagtctgaatggacccacgcaaagacaacttggtgatcacgtaggaattgaataagggattttttttcatttcttattgaggtgcttgccaaccttcacagttttggtcggttcttctggatttaatacaatttcttctagttcttcaataggaccaaggtcggacctatcatcaccaatgcaagggtcgatttcctaaaactttggtgcctttggttcttcaatttcttccacgacggccatgataggtgccgccagtgctaattggggctattcatcgaacaattttgcaaggtgcaattcaccgcatggattttgaactatttctgtatcaatttttctgaagagtctgcgatttttgaaagaataaattgatgagttttccaaggggaacatagtcaaatgtccatcgtagcactctcaatgaaagcaccaaactgttgacgcagttttttgtcaactgatctaagaagatcgtaaaataaaagaggaccatagtgaattaatctgactaataaaaccgcaaaaaattagagatttatagtagttcacccccatgtcgcgatggtaatggggctacgtctacttgtagttttattgattagatccgacacaccaaagttattttctcaagagtgtgtggataaaaatacagcaaaggatttctaggtgaaatcttaatcgagattaatgaatataaggctaatgagagacttgatattcataaatctgttgtaaattaaaggttgtaaagttcttgggaacaataaaccaataatttgtggaaaaaagatgtattaatggtgttttgaggactggtgtcgactgagtatggtggatccaatggagaaggtgatcgaaataatgtggtattcttggcttctatcaagtgaacttcaaggggaaggtcacgaagagaaagatccaaaagagagaaaaagggtcccaaaaagaagaagccaaggagaagaaaatcctttttccagcctccttcttgaagtatatataggctagagggtttgttagtgatcccccacacatcgggatatctcattgaataatcccatatcccactcttttatgaataaaacattacaagtaaataaatatcaataacaatctccttgtatctagaaaaatatcccacaaatattggacaattggttaattatttccggttgaggatgcaccaacttgaaatggagtgatgggatgtcacatctctcctagaaatgcacgatgttgatgatgagtgctgaacacatgtgttttggagtgtcaattctcgcgcacaatgccacataggctttggcagtgtgctccaccaaccctcgcttagacgcatttcccaattctcgattaaaatgtgccaacttttattgtaagctaattttgggcctgataaccttagaattgagtgatggttatgagacacactttgatccatcttgaaattatctttccaacgcatgttcaaccaggtcatttggattaaaattaagagagtcatgcctattttactgaaggttgtttatactatcttgtaccaattgcgagcactgccatgaccaaatgctagaggtcggccatgcatgctctcagaccccttgggataagttttgacttattttttgatggtgagtcatattatgggggtcctgggacccaaaagtctcattttaatgtttgaaactctaacgggtgacgactaccaccagttggagccggataatggcagtggtcacccatggcttgtgggaagccataggtggtgtttctcacttgtatttggtacatggatgttgagaataaaatttggccaatgaattcttcttccttgtgtagtaaccaacctgtgcctttttactatggcagttgtctccaattgttgagagcactgccatttcctcatggcagtggtcacctatggattgttgggaatattttaccnnnnnnnnnnnnnactaacaagtatgttgaattaatatcctaagtatgaattctctaaaacaatgannnnnnnnnnnnnnnnnnttaagaaaaccttacattgattgta

SEQ ID NO: 114860 - DNA, 1447 bp, Cannabis sativa
  modified_base (1418)..(1421): a, c, t, g, unknown or other
ctaacaaattaaaatcaaactaattaataatttaaagaatcaatttaagaatattaataaataaattaatcatatttataagataaatatggactcatcagaaagtcgtctcgttcaattctcaaaagtacgttaaggactgccgccatttgttcttattctcctctagcttcaaagcctttgagtgtccagatctcctaatatagtggactcagattcccccactaatttggacagctcccaccaaactcttcttgagccacgctaccattttttagactctcaccagggaggagctcaacctgggagatctggttacaacgactaacggccaaagaactaaactcattcaaggccatcaatccattaaggatacaaaactatcgaaggtaacgtattcgaatgctcgaaacaaggaggctttgggaggagtacatctaggaggctaaaaaccaagtgtcaagcttactggaggaggaaagagcaggaggacctttttgcttgcgacttgattgcagcagattaaaatacatagaggaaggaggacaagaattaggtggttcccaaaccttcgtttcctttctcaattcctaactccggtactcctagagccattacctcaggtatccgtaagtctcctttgtctttttataatgttccttttgctaaaagttatgctcttttcaggccagttggctttaataggaggttacttaggttgcaaatttctcgttcctagtggggtgatagggaaaaagagtggtacttccccaatattggagatcttttgagcaggtcccagatgggatttggtcctccaataccaatacctctagacaactcatgttatctcacctcaggctgatttctttcttcggatagtttcttagaagacgatgataccatcaacgttatttatgagttttctaagaaagaattaggccgcttgagtaggattagtttttatttttcatgccttatcttcatgatcattttgcaaatactccttatgtttctttcatttcttttttcaattagaccgatggacgccatcttcgcttccatggacgctctgaggtctacagaaggtaacattgtccctcctactgattatcaaagagtcataatgactctaggaccttcggacccagaggtcatatgtgtagatgacaaggatgaattacccccactggagcgaaaggggaagaatgaggctgacgtctctgcatcttcaaagaaacttaaggcagccaaaactccttccgatattattggggacttaggaatcccttctgaagctcatactttcccaggtgtcccatccattcccctaactcccattcatctggacgaggcccatcagcagcttaggattgataagcataactatgttgtagatgatgttgggttttatgccnnnnataaaactctttacaatctgattagt

SEQ ID NO: 114861 - DNA, 6876 bp, Cannabis sativa
  modified_base (1858)..(1861): a, c, t, g, unknown or other
  modified_base (4134)..(4162): a, c, t, g, unknown or other
ttctacccctatctctctattacgtctcttcctctccatacctagcacgtccaccataggctccaccaccactaacccttatcctcctcctttaaccgcaacctcgtcgagaccttgaacgaggttagttattttgtttttttaatgtttaatttatctggtgtttatgtgatttttatgtgaagtttgataaatattggtgtgattattgtaacgacccaaaacatttaaacatctcaaaagaatctaaatttttgttaaaatttaaattttttagtttgcactagaaatctaagaagacttagtaaacaaagtttaaaatttatgtgtacacttacataactaaaatattttcaagtttaacaacatagtttaacaaaataaataaaaaaggttcacaattaacaaaatataacttttctcaaaaaaagacccttctttcaaaagtctccagaggtcaatccacatgtgtatcatcacaatcagactccaacgcttattggtcgactttcaacttagaagtatcactgctgggcgaactctactaatgtagctgggataattctacatcgtacatcacttctcacctcttataagtccatttgcatttcaaaatatttaaagtgagacaaaggatcttctttgcccgtgtacattttctatgttggcattttgaacttgggcggtaggttgagagcattgatttctggtgagaatggtgatcttctagtccggtcaagttctaatctgtgagtattgggtcgatcaggccttgaacgaggcacttaagttgatctatttgtgcttgtaccgatggattaacttgacctgcctgttgaccgacctgtatcacttgaggatctcttagaattgggttgggcacatagtgatttgtattatttggctgaactatagaaggaacatcatgtccatctaatcctcttctacgattcagatcatttgtgagattgtgcatggtgcctaattagtcaaagactgatttgtcgagaggccttcatgcctagctattgtgagcaaggggttggcccggtatttttgtctaaggacggatgttaagctagtcattccctcccaaataaagttggcaaaacttgttcgtctaccatgtggcccacagtttgactatgtggccacagattagacgatctatatacttgggtttgttgaatgtatttagctggacactcttctggcccgtgttgtggcctagtgggaatttaagtatctgctactatctattgctcaatgacttggtaggctctcctgatcagtacagtgacctgcttgcatcgattatcaatcacttcttattgggctctcataatttccatctctcaatccctctactcttcgaattggcatctatgctcttcaagagaaaaatttatagatgctctagtatcttgctgatcgtaataaagagtattattgtggccttgtattttccctagtgtagctcgtaagttctgtagttcggtgtcatcactgattggcctttaagaatttgtagcagattagattctagtaccgggggaaatttgctcaatctgaataatagtggttccaattttttgcacgcccaaagtgaactcaaccagaggtgtagttactccttgacctacagtttgtgggcctattggttgttgaggattagtcagagtggggtttgtcctaactggatctttagggtttgtaagtgtctagacttttggatccatagccattggatccgaagttttagtctattttcccctctgtgtttgtacaactatctgtgtcctaagaaagacttaaaacaaagacttttgtttctttgctcttaatgaaagcaccaaannnntgacctcgcttttagccaacaatactgagtcaaattaaagcgatttaagaataattgaaatataaaatatgaataatgtaaaataataacaaaaaaaaataccagaattatagaggtttggccccttgatgatggtaatagtctaatcatctttagttgtaattacttgtgagtagatgaacaagaaaactttgatctctctgtaaagttcctacaatgatctctgagtattttactcttaaatctacatttcttgagtgttctttgaatgaaatttgtgcccctaaatagtgagatgagtttgctatttatatggattaattacatcaaattggtttcccaaaatcagtaaggaataaaatagaaaatttgtttaccttctataattacaataagcagaataggaaactaggtaggttttctttcttcttaaattctatgaatctatcccatgaatttactgattttgatgtgtcttgcaagcttgagtatatagaggatacatctcataaattttctaactcgcatctcctggtcggtgcatgcaaactactcatacgaaagaagttgttcgaatgtttttgcatactctgctcggacgtcccaacttctgttaatgacttcaagtatcaaatctcccttcacgactcattatagatgggattgcccgtccaggttatgaaatctattccacgagtcacacaaatgaatgccatgtcaacctttatagaaatttggataacaaaaaccaaattaattagtatagagatttatctcttgttgccctactagattagacacgttatcgtgttttctaattattgtgatcacctttgctaatcaaaaggtttactgaaaaatgtgaatattatttaagatatatggattaattagtcatcaattaattatattaatgtttattatgatatcttaatattatttaagatatattttggtaactttagtttagtgtagaaacttatttgttatttataataaattttaaatatgaataataaaatatattttagtaacacgtgaatttggttggtcgattaaaatttttttgattgtaaaatttgattgcttttagtaactaaatgaaaaaaaaaaaaaactactcttgaatgttgttattttaaaactataaaaaaaataaagtgagaaataataaaacaatatttaataaacaaataagatattatagttaaatttccctaatttctaaaccattttagtagagtgaaaattccttccaaaagtttcagaaaacgtcatttcaaggcaaaattaataaaaacttaataattttttttcttttatatacagataaaaaatttcgttcttttttttgataaaaaatttcattctattcttatagttattttatttctatttattcttagttttgtttctcctaaacgatgctttctctggaaccatttatgggcctaatcttcaatgtttgcaggcccaagtactatcattatgggcctaatcttctatatttgtccagcctagtgtggtgcacatgagctttaagtgttacacaatggtattttgatcttattgaaacttgaaaaatagttgggaatctcacaaaaatatccacttttttttttgtcattttactgtcacgttctttttatatatatatatataaatatttattataccaagttttcaaaaatactatgctaaaatttcaaaattacaaaaataatatattgcagtaaaataaaaaaaaaaatactaaaataacgtaacaaacaacatgaaaacaacaaaaatataactacaaagtaacagaaaaaaaaaaacaaaataatgacctaattacaatatacaaaacaatatcaactgttcaatatatttctgtattacagatatattttacttacttttaagaacttgatttatctttttgtactgttacattattttatttatggttattgttgttacaatttcatactttcaatttttttttctcttttcctttttgagttagtgacaattaaaataataatttattttttaaaaattaaataaataattacattaataataaaatcttttgatttcaatatggggtatatatgttggaacttattttaccaagatctaaatttactaacttgcatgtttgattataatctataatctatcatcctaaatatgaattttctaaaacgatgaaataaacatataagagattaagaaatcctaaaattaatggcagcgaaataataatgactccttccattcagatnnnnnnnnnnnnnnnnnnnnnnnnnnnnnagcattatcaagatctgaacttgaatcttctctcattcgatttgggttgaaatatgctaatcattcataaaacacaccatgaaaaaaaatatacatgaataaaaaaacaattaaaagtacttgttcaacaaaaaaaactggaaaccacttaaaaataacttgtagactaaggcataataacaccttaactacgtaaaaattcttgttgcattgtctactatttatatttctttaagcttaatttctttattaatcagtttttaaaaatctcagtaaaaaaaacacatgtgttgttgagaatagggtcttgttgttgtgtaaataaagcagcaaatatatgaataaatcaaaaaaaaaaaaagcaatgaatgaatgatgagaatatgagtgagtgagttattggttggttattttgaagaagtttttggccaaacaaacttagcatattggagcgtttttaatagtagcattcttttaaaagtgttattatatatgttgggtactgctgttatgacatttagcagttagttggaggaaggtttagatacttggtgttatggtcaatttggaaggtcaggaatgacatggtatggaattctaaacagccaacatgtgaagaaatgttgcttttagcaaaaataaactttgtggactggtataatgcttaaaaagaagacatggattcttctattgatgccaatagaaatcgaaatgagcattggacaccccgagatttcaaccaaatcaaagtaaatatcgatggcgcactttttgctggtgagaggagatacgacataggattggttgctcgttcttcagatggagcaattattcagacaacaaatatgaataaggttggtacatttcagccccatgaagtagaagctattggaataaagaggctttgagttggattaagaatatgggttggactaatgtgattgttgagtcggattgtttgagagtgattaatgatttaaaaaagaataaaactatggcctctccctatggccatattatttctgattgtaaggctttgttggccgatgttagtagtgtttcttttcattttgttaagcggtatgctaataaggttgtgcacgttctagcacgatcttctcttgttgaggttgaccgtacttttagtagcgttactttacctactgtaattgcttcactgattttggaagacttgaattaatgaagtttcttcatgattattcaaaaaaaaaaaagtgttatatatcttcacattatctaaaaatataatattttattttatttttctttcacattatttttggcacccttacttttaaaaatactccagtgatatagcacattttaagaatgttataattatgatctcaaacattattatatataatttttttttattaaattattatgtatattgcacatttaatttttgttttttttaaaaaaaaaaatatagcatcaatgtcattgtataacatcaatgcaaattttcagaatagtatattttttatctccaatagtacaacatctatatattttgtcacctaagtattccacctcatattttctaaaatgctactattagggatgctcttagcaatagatggtttgaactcaaacctcaattcttaatccacttatttattttacttgggaaacttacaaaaatattgatttttttcccctatctttataaaaatactgtcagaaggcacaaatttcttttttactgtcttggccaattttttttttcttttatactgtaaactccaaaaaaaaaaaagaggcctccatcttccacacccatgggcagaaccaccacaggaacaccaaaacaatcgaaaaacaactattaattctgatgagattgagaaaaaaaataatgaaatcaacgtcaaataaataatcatagcaaaacaactgtaaaacaattgtaaagcaacactaaagcaaaataaacaaaagaaaggaaaacatgattaaaaaaaactaaaaaaagttatgcacagcttcaatacccaatgcaatagcagttatatttgcaagcccaatcttaaaaaattagcgccaaaaaactactaaaacaacacaaaaataaatgtaaaacaataagcagatataaccacttagaaaaacaataagcatatatatatatatatatattatattctcacttagaaaaatactaaagaaccacacaccttaaaaaaataaattatggaaaacaaccgtaaaacaacactaaaacaaaaaaataaaaaataaatacagtatactgcagtataaaacttataaaaatacacagtaaaaaaataaaaaaataccacctaacaatattttttgtaaaaaaattgtaaaaattaatataccatgtaaattttccttttacttttctacgttgttactgtttagatgaccaatcaaatcgattagagatggaaaaagaaaaagattagagagagagagagagagagggagagagaattgaaaaagaaaagagtaatttaaggcataaataccgaagttttatgccgagtagcagataaatacctaagtcctatttttgcggtaaaaataccttccgtcactagtgtggaacttctgtaggtacctggacgttaaatgtcaagtcagtacctacatggcacgttgtgattggtccaggtagatttattttcattttttattttaaataattatttaatattttaaaa

SEQ ID NO: 114862 - DNA, 2685 bp, Cannabis sativa
  modified_base (54)..(68): a, c, t, g, unknown or other
  modified_base (2513)..(2516): a, c, t, g, unknown or other
tcttccgatctttttagaaagttcatatttagggtattaatcaacatacttgtnnnnnnnnnnnnnnnccttgtaaaataatttccaacagcaatatcctaacttagtgaaatcctgagatagggtttcggctgggaagactagtgattttacaatgaataatactgggatgttacgatttatgaaccgtgtctgtgttcctacagatgatgatattaagagagaaattctgaatgagtctcatacgactccttattctgttcatccgaggacaacaaagatgtttaaggagcttaaggccatgttctggtggcctagaataaagaataatattacagaatatgttgcttagtgtttaacttgtcaacaagggaaagttgaacaccaaaggcttgcacgtttgctgcagccattgaaccttccgaaatggaaatgggaagacatcggtatggactttgtggttggattgtctaggatgacaagacattacgactatgtgtggatcatagttgataggtttacaaagtcgtgcactttttggcctgtacggacaaatttctccattgatcattatgtagaactgtatgttagagaaatagttcgtcttcatggtgtcctagagtctatcgtttctaatagggatctaaagttcacatcgagattctaataagggttaaatcttcttctgtaagccctattgcttggaatgcaagcttagagaggatgtttattgagcttctgttgtccaaaggactttagaaactcgtttattggcaatatgtgctttgattactaagggatcattgtgggagaaaatgcacatttctaacatcatcctcggtgacagtgatggggagattcatcattttggggcactatgcaggagactacactagtgcgcacacttcccctacctcaagttctcttaggtatcttttttgcaagtttctcgtgcttcccacaaggtgggttccacctgagattgtggccacgtctccatccgctggaggtgccacccgtgcaagtaacgctaccctagcttgcactagcagagcagggagtgcaggcagtgatattcttggagcttacgaacgtcttacctcctgcgggggaattatggtgttttgctatttcgaaatgatcatatgcccgttgaggacccctgtccaggacaaatgattggaatctagacacattttcccaaatgtcccactcaaaccaaagtttcaatctcatctttcaaataatcacactcgttagttgtgtggcccttctcttagtgatacttgcattccttgttttgatcacgcctatttcttcctccatttgacatccgtagaggctttctatagtggaccatattagaggtcactttgtagacattgtcttgcgtgtctatcaaaatggtatacgcagtgtattttgggacatattccttcctcgacttctttgaagactcattacgattattgcctttttccccctcttttgttccgagtatggctcacattttattttggagcctccgttttcacctgtccaacagccacattgcacctagtctttgccgccacatacctaggaaaattggtatgtgtaggtctgagagcagaggttgtaagtccgtaaacatttgggaaaaactaagttccgagaagagttaaggccgaagcctgaacttggggtgtaaagctgggtgtagttgtggaaggggttagagctggaggatatcaaaaggtttgtacgtaagtgtcctcaaggatgataataccttgggcctttgacataaacccagtcaatgttttggctctctttctttacatctctccccatagcaaagaaccaatagccaatccagattgaagggccatcaacttcaagtcatcactgactttagttttggcagcgacctccataatcctttggattaaagcctttaggctttttttgtgttgctgctaaatattgatgagatagccgacttccatgttcttatcatgcatgacaataaactgtttgcggaaggctgactataagtctttccaactatcaatcaatcttggagccagtcacttccacaagtcttccctggacttggtcgatgttagggaaaaacaaaaacacatggcatcgtcgttggcacgtgctacttgcatcattttgttgtattttgccaagtttgctcatggattggtccttccctcatacaattcaatgtgtggcatcttaaagttttccaaaagaggggtctccatgatccgcctcacacagttttgggtcctcatcgtccaaatctgagaggtccccactcttctttttgactagcttggttagagctgctatctgctcctccaacctctttctgtctctttcagaaagatcatgtcccttcattttgtcactaaggtggttcctgaggtcacccccacgtggcgtcactttttcacttgtttacctctcgtacttggcatccaatcaccatagaagatttgttgtaaagcccgcttagttannnnggaaattatcagttgtttatgattaatcatgaaattatttatagctatttaaataatttattgtactgttatttatgttattcagtcgcttgcatattttgtatttccggtgtccgctattttggaactcggcgtttggctcagtttaaatcacaacttagtatgttag

SEQ ID NO: 114863 - DNA, 3932 bp, Cannabis sativa
  modified_base (2918)..(2925): a, c, t, g, unknown or other
gctataaataatttcctgattaaacataaacagctgctaatttccaaattaactaagcgggctttacaatgtcggtgcccctctgatgatgagattagagatattgtcttcaagttacatccgttgaaggctccgggcccagatggtttctcgggaattttctttcgcaaatattggggcacggtgggaggagatgtttgcaatatggtcaaagattttttcatcttggggaagtttgttaatcagttaaatcacacattcatttgtctaattccaaaatgtgagagcccaaacaggtttgaccaatttagacctattagtctatgtaacttcggttataaaattattgcaagaattcttactgacagattgaaatcaatgttggaaaaactagtttgcccgtttcagtctgtgtttttgcctggaaggtggattgcggagtgtttggttctagcttctgaagctttgcatgccatgaaaaaaaaagagaggaaggggtggatttatggggataaaaactgacatgaacaaggaatacgatcggttggagtggagctttgtccgtaaagttctggaggcaaatggtgtttgcaatcacttttgcaatttaattatgcaatgcatcaccacgataaagttttcagtcctgttgaatggggctcctttgaaactattcaccccttcccgtggtttaagatagggagatcctctgtctccctatctcttcattctttgcagcgaagtgctttcgaagttgattttacaagctgaaaatcgaggagaaattacaggtctcaggattgggaagcgggcaatgcccatttcacatcttttttacgctgatgatgccatctttttttgcaaggctaaggtggatcaggcaatggcgttcaaggcttgtgttgaaaagtatgaaaggtggtctggacaattggtaaataaggcaaaacgtggaattgttttctccccaaagattgctcaggctatgaaaaacaatatcttttcgactttgggcatgggtggtttatctagagaagataaatatttgggcaatcctttttttacttctacccgaaagagagaggattttgctttcctgaaggcaaaaattctggggcggttagagggctagaaaacaaaattattgtctcaagcaggcaggcttactctcattagttcggtactgcatggaattccgacgtatacaatggccacttcgaaagttccactgagtgtttgttctgaattggatagcatcactgcaagattctggtggaaagggggcggctcaacaatagattcgattcgctattttgctccaaagagttggagtgagatctgtcagccgaaacgcaatggtgaccttggattacggcgattcaaggacataaacttggctgttctgtctaaacttgcctggaacttgttgaataattcagaccggccttgggtaagtattctaagggataaatactgcaaaaatttaagtttctggtatgttgaatcgaaacagggtgactcaatggtttggaaggggattttaaatgggcgagatgtggttgttttgggtgcgggtatattggtggtaaagggcaactcggacatttggtctttcccttgggtacctggattcagtccggaagaattctgggatagcttctcctatgctattactcactccttctcagtagtggcagacttgttcaagccaaactcttgtgagtgggatgaaagagtcatcaatcaatgtttctctcaaccagttgcaaatgctattctacgggttagacctatgcaggatagggaggatatccttttttagagaggaagtaaaaatggtcgcttctccgtcaaaagtgcctactgttggactcaaaaggatcggctgcaacctgagaaacagatttggaaagaattatggagaatgaatattcatcctaggcaagccctgctaatatggagatgtatgtctggatgtctctcgctgcaatggcggggtttaatgactggagcggacaggctttgttggttctgtggtgaagaggctgagacggttactcatctattcagagattgtagtttcactagaagtgtctggtttagcagtccctggggtttaaaggtcgacagtatgacaggttcttctttggaggagtttatgctttggtttttcaataggcaagatgagatgctcgtgatgtatgcagcttctctcttcgagataatttggcttagcagaaatgaactgagaagtaagggtcgaaagccgaatgtaatggaaatttctcgcatgattttgaagagagctaaggaattttcggacgtgcggagtaaagaccagactgaggtgcatgatgattccatctccgtggacaagggtcttttaattccaattaagtgggatggccactttaaagtggatgcttcggtcaaagacggggaagtgggcacgggggttctgcaatgtgggattggggaggattctacaactgtgctgctacagcatttcgtggaaatgaccgtgttggaagacgagtttgatgcgattcttcaggctttacagttagctttgcaggaagggtatgagacaatcctaattgaatctgattctgctatagcagtaaaggccttgggtaacaaagagcttccgtttatgtgggggtcttatccagtgttttatgaatgtttagcgttaatttcaaagtttaagaagtgttcagttgggtttgttcctcggtgtaaaaactctgtggcggatggtttggcccgttatgctagagtttttcgttgttgtaagaggactgttttaagggaggttgttccccttgtggcaaccacttagttcttcttttgtttgaataaaacttgttttcctataaataaaaataaataaataaaagttcaggaggcatgatttnnnnnnnntcaaagttcagggggcaaaaattcaaattaacctattataaatatatgtatagactatagtatacataaagtgaataatgaacaataatattataattatataatctttctttaaaaaaaataaagtgtctgtaaattatattattattatgttatttttaaaccaattattattagtatgtatttaaaatatataacacatgttattgctaatatatataatacggttattatttgtattcattaaaatatgtgataattacataaggcattattttttattaaaaaattatatttttacgtttaataaattttttttttacatttttacggaatcccgtaaaaacaacacgaaaacaacaagaaaattacataaaagtaacataaaaataacatctaactaacaaaaaaatcaacaacaaattaacatgaatacaacataaaaagatcgtattttctgtaaataaaataaaaaaaatcgtaaagatatttaaaattccgtgaaaccgtatttttgttatttttgtgtatttgtgaaactatcccttaaaatatatagtgattttttttttattttacattttaaagcaacttttttatatttttacgaaaattcacgtaataatccatataataacttatggagcaacttaaaattcacataacaacccacataaaaattactgaagcaacccaaaccataaatttgaaaaaaaaaataaaaaataatatatggggtaatttcttaaatatatatacggtagaacctctatatagaatactctatttaagaataacctttaatttgttataaaaaaattaattctcgatatgggtcagttataaataaaaataacctctaaattataattaattagggataattgcgtcaaaagtcctcaaaacttaagattgatacagattagtccgcaaccttaaaaatcgacagtaatgtaaaaccgtaaaaatgtaaaaaaaaaaaaaaattctttaaacataaaaatata

SEQ ID NO: 114864 - DNA, 2067 bp, Cannabis sativa
  modified_base (29)..(32): a, c, t, g, unknown or other
acataaatcccggtcatgatcagacgccnnnncccctgaccataaccctaattgccgtgtccaacacgatactgagtccccctaaacacaatatgtcggtcatttttgtggcaaggacaaggtttcagttctaatgccaaaagtatagcttggaactcagtttgtaaatctaaaaaggcaggtggtcttggatttcgaaacatcatggcatggaacactgctgctttggggaaatttgtttgggccatagcattaaaaaaggatttatgggtcaaatagttcatagtgtttacttacaagatattgattggcgaaagtactctgcaccattgcaaagtaggttgtactagaggaaaatagtggctataaaagatgtatttcgacagttgatttcccaacatcactttcagttggaacattttcacatcaagaaagcttaccaacttctttgtccacaagatggaagagttagatggaacaatgagatatggaatagatttaatagtcctaaacattctgtgattgcttggttggctattcaaaataggctgaaaactcgagataagctactcaatttcaatattttgcaagatttgacttgtctcttatgtggtttggatgagaaaaatgttaaccatcttttttttaatttccatgtgagtttgaaatgcataagggcagctatggattggatgaactgacacactagtgctagctctcttgtctctttatataggtggataccttggactaagatgagccagtttaggagatgttgtttttcagctctcttggcttctctaatataccatttgtggagagctaagaatgaagttttgtggtcacaaaagttgacaagattgcatataattgtaaaaggagtgatagaaagtatcaaaagtagagttttgctaatttggcctaaacatgttagtagagaagatgtctttttgtttgagagtcttatgtcaagtaaggtaaatgatgtatagctttttcaggcttatttaaatcagatgatagttggaaaggatttcacacaaatagggagagtactaaagacttcgtcaatgaggtggtaaaaatagaccttctaattagtgtcattttggttatttcatgttcaatagattatccatagttgccttattgataacattttcattttcagtacaacaagatatgatgtataatgagcttcaatcacacaaccaatgactatcactggcaaccttcggtgaatcacaagtgtggtggatataagagtgatcctatatatgaagagaaactaggttataacataacatgtcataagcgagaagtgggcccataatgaaggggaaggaagggtgcctctggcaatcgcactcttaatcttagactgaaggatttgttcaacagaccatgtgtatgcaaggtggatggctaacatgactaggagttactgagaggatattgaacacgtatgttagcacatgcatcccaaacaccgtcatccacctaacttaatgagattccttaaaatggtccaatggtgagatatgtatatgaaaatgatctttcaaacgtcccaccatcgatcacctccatttatttttagatgttcattatctcaaccaaggacgaaggtgaattgtcataaatttttttgtaacaatttcaatcattagcacgccatgacactactacaatattaggctttagctttggtttttttaaatcattaaaaaaaaaaagcaaaaccatagccttccaatagcatctcccatcacatttatttagttgttcatatataacttcaattataataagaaaattgaagctaaaaagaaaaaaaataccgtggaagcctttaggcttccagtattcggaaataaccgaaaccatatatagggtactgcatgtaccttatttttttaaataactgaagcctaagggttttcaaacttctaaatgggcttcaacccataataaaacgggtcaagatgcaaaatagccctaaatctaacaattaagttaataaatgtccttttttataaaaacttaacaaaatgtccattttgttaa

SEQ ID NO: 114865 - DNA, 1823 bp, Cannabis sativa
ctttagagatgcaatttccttaacagcttcaaaagttgtcaaaaatttcgcaaaacagcatcgtgcaagagaaaactacatccatttcattcctgcaacatcaatactataatagcagctacaaggcatattagtagccttaacaaaatagtttcaagatgtggtgcaatgtatttttaatatttacatagacacacaaaacaacaatgtgtgccatggaatttacatgatgaaaaatattacaataagtattttattgtggctatctagaactcagagcagctatgaatgatttataatatcaaaaaaagaatgagaattggtgcactctagcaaacctggcaaagttactattactccactttcagcaaatagcttaacctgaaacttctgaactgcacttttcacttcttggtgtacctctgcctagggaaccgccctcacaatttcgctcgaactgcaacttcaatcttttgcgaaagaaaaactaatcgctcccccataatcatcgaacgaaattggtgacttattaagcccaatgcccctgaacttatacgactcaaccttgttctgttggtaagcataaactctatctccaaaatcatcgtcttgacctaaatcatataaggataatcagattatcaattagaatcaagggattgattgatacagagctatgtcatggaaataaaaatattccataacctccataagaaagtttgggtttgtgaaacagatttaccaacaaatttaccaaaactattgagactcaaaactaaataatagacatttagcatttgtacccagatttcttctctagtgttcaatcaacttacctcaattttatttcaaactccattaaaattaaaaaccaaataatagacattcaacatttacaaaataattattaaattataataagatattcatatatatttaggtccaaatgctgtaatagtttgcaatgcatgaaaaaattgtatttgttgttactaacatcttctcttctttaatcttgaaatcattaacaagagaagtgtgtctgagttagattgacaagggaaactaattttagaaaattaaataaaaattgagaaagcgaccgtaccaagtagaatctgatagcagtgtaatagaaatctcaaaatgaattagattatcctttactatggattaagaaccactttcaattaacctaatttatccactggtacggacatgttactcaaatacataaaataatttctaagttctctttaccttgaaaaccttcattgacaatggaagaaacgggaatggtatccaacctcttctccaaggtcaattgaatatttcttttctttttatttcccccccaagtttctttccatattttgaaccgagaaaactgataatctccttgttccctagtactttcagttttgcgatgcatccatgaccaaaatttgtcgttgtatcgattggttattaacccattttgtaggtagaaaattcgtaataataagagaaaacatgacatagagtgctcaaactgagtatttctcccattgaaatttcgtggctcaggtgtgaagggagtgggagtgaaattataaggtcattttaaatgatgtggagaaaggtatatcagtcgatggttaacgtcaaagtttaagggatttttacacttatgctctttttttacctttttttatttttatatttttatttattctcggttatttaaatttttttacattttttatttttaattttatttttttaaaagttcaataattacaaatatacttttaccatgtatatgtcatgttttatccattcta

SEQ ID NO: 114866 - DNA, 3216 bp, Cannabis sativa
aaacataccatcgttacaagtgtaatgtaactaaaagtttcaaataactaaaacaataacatttttaagtaataaaatagaacaaaacatcaagaaaataaatacacaaaaaaaccaagtgttacaaattcaacacacacgaaaaaatataattaatataaattatattttttaatattctttattatataaataactttttaatgtatataaatgtaattggattggatcaatttttaattgaattttgaaattgatatccaataactgatccaatccaattagaatctaacttttagcagccaatccaatccaattgtaattggatattcaattttttgtaattagattggattggatcagttcggttcaattgaattggattggatgttgcccacccctaattttaattaccaaaatacctcttacactatcacttacacaatcagacgatagttgcaaggtggttgttgcgtgattgcgcggtagctatatcagacgaaggtttcaatcagacgatagttacagggtggttgctgggtggttagtcgaagtgtgcatcagacgaaggtttcaatcagataaaagtttttgggtggtttgccgaaggttgcatcagatgaaggtttcaatcagacgaaataactggtagcaaaatatttatgcaactgtaatgcaactgttatgaaacattaaaaatcctatctacatgtctctttatgatttaatataaacaaattcaccattagaaatttgaaaatcatttactatagtattgatgtaatttttttttggattatacttgagttgaattgtttgggaactccagttcaattttttgagatctgcctttcatggatctgaaaattgaagtcagtacattagttttatgcaaattaaattcgatgttcggttgaattttagtttcgtagtagtttttctacattttttttcttcatgaatttgaaacagtccctgttttgattgattatgctcgtcttctcaggtgaagtcaccgaaattaatggcagttctctttcgggttgaatttttgtttcggttgcgttgggttgttcaatggttgcgcaataattacccacgaagcatgaatcttgagttgaaggtgtgtgtaagtggtatttgtataattttttttttatttagactgtatagttatttatttggccaactaaaattatttttgtaatattattattatttattttttttgattacaactgaaaaaaaacccaaaaaaaaaaaaattctctaaaaactttcccaaaattattttcatgcataattgtagaatgtaatatggtcatatatatcaatcaaattgactaattttcgaactgcaatccgtgcgtggcacgtgcgtccaacgtggattaaatagacatagttattagtcagaagacagtcgtactcagcgctatgggacccacataaaagaaaaataggcttaaccaataccgacactagcatgactcttttcccaaggaatctaatttattacggtaactctttttttcctcattttatacattatttacaatatctgccattcatcctctgagtatataatccaacgttcagtaatccatcatctccttaaatctaaatatccaccgtccgattagatccggtaacgtttcgtcaatcgtcatcttcttcatccttttcattttaattctaatttttatttctgcgttattcagatctgtgagcttaaaaactcataacactgtttctctctctctctctactatccgagagttttagacagagagagcttagtagaggggtggggatggtggaggcacagtcatggacgacacgtcgtatgagcaaccccagactggacaacaccaccgccattgcagaccaagccattgatataccggcgacgcctaccggagatgtacggaacggaggtcttggaatgtacggtctcggatcttacttctctccgaatgtattgacggctgtgattatagcttcttggtacttctctaacattggggttctcttactaaacaagtaccttcttagcatctatggctttagatacccaatcttcctcacaatgcttcatatgatcgcctgcgctttctatagttccatcgccattaacttccttgaggtcgttccgaggcagcacatactatcgcgtaagcagttcttaaagatcttcgctctcagcgccattttctgcttctctgtcgtttgtggtaatacttctcttcgttacattccgatatcgtttaatcaagcagttggggctacgggaccgttcttcactgctatttttgcttttgtaattacttgcaagaaggaatcggctgaggtgtatttggctcttttacccgtggtttttgggattgtgctggctagtaacagtgagccattgtttaacttatttgggttcttggtttgtgtgagttcaactgctgctcgagctttgaaatcagtggttcaaggtctgttattgtcttccgattccgagaagcttcattcgatgaatttgttactttacatggctcccatggcggccatgattttgcttccttttaccctttatattgaagggaatgtagcgagtgttgcgattgaaaaagccaaaggagatccatttatggtgttcttgttgattgggaatgccacggtagcttacctggtgaacttgaccaatttcttggtaaccaaacacaccagtgccctcactttgcaggtgctcggaaacgccaaggcggccgtggcagcttgcgtttcggtcttaatctttaggaaccccgtgacggtaatgggtatagtgggattcgcagtaaccacgttgggtgttgttctttacagcgaggctaagaagcgatctaaatcaatacagaagtaagagatttttacgaagagtttcattttattgccacagaaatggggtatggcctcagctctttcgtcattctttaattaagcactttatttttattttttttcctagttctttgattattcgtatctgattaatgatggaaggaagaaaagaaagaaagaaagaaagaaagaatgaaaatttgcaagaaaaaaaaaatatagatgcaattgaactgtataggatgtgaggaagggagaaaaggattatgcccttttaatgtcttttgatttttcaatttttgtttttaaattcttcatgaaaagggttttggatggagagaatgc

SEQ ID NO: 114867 - DNA, 3840 bp, Cannabis sativa
acaatcacaaacaagtaatacaatcataagtgtacttccagaaaatgatactgctaattcccttttttaaaagtgtaggctctctcttcctttcaaaaaatacggctaccttattttagggtactttcctttaccctaattgaaaagtcaatgtccatctagcccttcaatgggccacaccatccacctgactgagttgtacaaaatttaggccacctcggtgcctactaagcttcattaaaccgagttggtgttcagtcacacctctcttcagacttctaccaattgctacgtggtagtcttatagcaatgatgaaatagaatacacatttccctgcttctttttctttttgttccaaaagctcccaatcacctattttagcctcttttactgcttaacacacatgcaatcagttacataagtcactctaacaattgaaaacataaacagattaccatttactacaaagacacactaaactaaacacaattacataaaatagacactaattactctacaatttggtttacaaaacaagtttaatgatatcaaaataactctaaatcttcgagttatcaacaccccaaaattaaaattttgctcgtcctcgaacaatgacaacacaaaaataaaacacaacgaacagattatacacaactcaacacatgagagcttcaaatgattcataatggcctagcaaacaagttgctctcaaaaaaatggaattaggtggaatggtgaattgtttttgccttgcctaatatgatggcctttacatattcaattcactggatattttcaatatctcccaaaagtcacctagtcaatagtgcatacaagtgcattcaaccaaaacgttgagttcctcttcaactaccctttgattttaatatttatcatagctccataagttggattagtgcattcctctccactaatgtagtctaaacttgactcctttgatcaataggactttatcaagcatgtagtgtaaggcttaggttagggtatggttaaggatgtcctttagctagctcaaaacctaaccacttcacttgtcaagaatcgagcctctccctcatgatttttttctctcttgattcacttccctaaacttattatactcacaagtacttgttgtaatatacctttctcttgctactatttctactcatgtctactatctctctaaaaaaattatctatatataattttctcatattcctcttattattctgttgttttttttttcttttctttgttttagatatatatattttttgaacaaacatactcaaacatgagagataataataaatttatatgacatctagcaagaaaatgtacttgataacatgtaaatgtatgacttgtgacctaattcccccaccccagacttacaacccaacattgtccccaatgtggctaaaattataatcttgaattagctcctcacaagctacactcaccgcactcaccccaaacttaatgtgaaacttgactcttgacaagtgagagcaattaagttaggacatgtgtggtaaatgtatggtatgaatgatgtgatatgtatgatcgggttgaacagcaaaataggctaagcggctcaaaaattgggtgcctaaggagaaaatattcatatagggaaggttacaaaggctcaaacatccgaagatggcctaaatcatgtctaaggaacaagtctaactaggattttgcctcaagaaaagcactaaccaattcttgatgctaaccaaatgaatgtagctttcatttgaaaaactcaaaacatggtagaaaacccaagtacaaccctattgagaagagactaaaaggaaacatccatcatatccagcaatcgaacacacaaaggcaacatattgaactaggcaacaacatgcatgtaatgattggaaagtatcatcatcaagcagaacactaggccatagaaaatcatcaagtctctcattgacacattaatatacacatagaaaacatgacacaacagactttggacacaaaagataaaacaaaaatagcacatcataaactaaaaatagcatacaacagaaaatataaaatagcttatggattaggaaactccctctactcggagtcctcgtggggaatatccaaattcgatgctgatgaagttgtccatggatcaagaatctattgtggaaattgtgagaacttgggaacaactcgcggagttatcttcttgaatgtgcgctccataaccgcatctcgttgctgctcataggcccacatgatttgcaagcggctacacatttcttcttgcctttgatgcatttgttgctgcacttgctcaaagtgagcaaagcgctacatggaaggctcagtgactgaggttgacgctgaggaatgagttgttttaggagctgaggacgtgcaaaagcttataggccccttgggattcaatgacccttcctcagaccacattggaacgcctgcatctcgacaaagggaactgatggtggctggcaaaaatagtttcccttttccccgatgtgcacaatccaaaatctcatgggccaagacagtacctacataaccatgcatccccttttcaagaaaaacaacatccacgctcgatcacggtcaatagggatgtttgcatgaatgtgtatacacacttcatgtcgtgctctaggtcagtatgcctaaaccaaaggtttccaaaatcatctaagttgcattctgaatctggcttgccaagttccgacatcatatcaactagtaactcattgtccacctgaccttttatgggagtgaaactacaggtgatcggttccaactcaaacaagttgttaattgcttcagcggagaatgacacctcaatttcatgcacaatgacttcggttggccattcatgagacaagaaattggtgtagaactcctttactactttcattactgccggctcgggctgcttaacaaaaagttcctaatgtctagcacgaatcatggaactcacccacacaggtagctcatcaataccatccacatcagccactaaaccacgctccatgtaaaaatcctgaatgggcactttgttgtggtactttgtctcgaccgtcttgtgataaaattttggagtttcatggagttattatttctaaactttgtgagcgactttcttgacatttagaattttgttttggttcaacactgctcatccacaacaaattcccccttttttttaatcttcctaacaccactccactaattctaccactacttgaatctatctaagaccacaaaacttccaaagccacaccaaatcaaattcaaatcatccacacaaaaaaaaaaaatacaacagtctccaaccacaacaaattcccctctttctttctttttttctaaatctgcccaacaacatgccaataattctaaaatcacaccaaaaatttccacagccacaccaaaaatgttaagaccaacccaatactaatccaccacaataattacttggatagcacagcccaactttaacaatcatatatggaattcaaccaaataaattttcaatttaactcaacaaactagaaattcgctcgggttggctgaaatttgcgggttccgattttctagctcaatttaaatgtgtacctaggctgttgatgcgagtatggagagttgcttcgggtagatggaggatgttgttatgttttttttagagggaagggtggtgacaacggggtacttgtcggcggaagttgaaatggagtttctatttggttttgtgccctaaataaaacccatttcaatatagtcagatttactaataaagatcaaaaataacattttatgtt

SEQ ID NO: 114868 - DNA, 1364 bp, Cannabis sativa
tttttttacaatcctcttatatctactggaaaaattgattatgctcctaagatttggcacaagttgattgttcccaagcacaagtttatttgttggcaggccattaacaaccaactcttaacaataactgtcctgtttgtgagtctcatttagaaactcacgaacacattttcttttagttttgtttagccaaaaaggtgatgctagatgtaaatacttggtttggttattcttgctggccaagtagttctgagcagtggaagatttggtgtgagaaaccaatgaattgtttgcaagataggttgatgaatgttgtaatggctgctgtcattgattttctttagcaaaataggaactgttgttgttttaaaagctactgctggttttattagtagggaaattaagtatggtgtcaaatattgatttctcagcattttcttgaacaggttaaaggggagggatatgtatatccaaaatgtaattaagggcttgtagtttccttttgagcggttgtgttcggcaactgccttttgtttgtgttttgaataaaataattacattttttaacaatcacaatttggtcaaattttaccattcagattacctttcctagtaaaccaaataaagtaattctgattttcttttggacagtttagtaaagaacataataaaatattatttctaattattttatattgtaaacacatccaattgatttctgattctagatacagtttagtaaatgttccccctcacttttgtcactaatattagtttattcccacttttaacatggcattattttgatcttatatgacaaagttagtattgttttaccttatttttaatatttttacatttaatcctcaataaatagtgagaatatatttatatttatatttttaacataaataaataatttttatataaataatatttgacaaatctcaaaacatgtaaaatactattattataataattatatatatatattttaccaaaacattttataccttaataaataagttttcttaaatttagtattttccctaactaattggatgacattaaaatattattatattaaaaattaaatattattttataatgcactctcatatttaattttatttttaaaagggtacttgttttttttttttttttattttgaacaatgcacagcttgttttgtttttttgaacaagaacaatttactctttttattagtataatctcatttttttcgttttattataaatgtaaaaaaaagtaaatatattttggggtaagttgaaaaatgactcttttattcatcaattaatcaaatttacctccaattttatatttatttgaaacatacctct

SEQ ID NO: 114869 - DNA, 2366 bp, Cannabis sativa
tttctttctttctttcttttattgccaaataattgcaatgaaggggtttttattttgttagtaaaatattatcccccactttcttcctcaaaaatatattcctaccataaagaataataattataatatattattttatctatttattttttttttataaaatataggattttttttacactttttttttacggaatttcacacaaaaatctctatagcaactaacagatcaacctaaatcgcaaccaaaatccacatagcaattcatatagaaaccaatagagaaactactagatcagctcaaagcgtaaattaaaaaaaaaaaaaaaattaaaaatagtttatggaataactttcctagaatatattattcttactttgtacaactttattaatagttattatattaagactcaaacatctttcacgttttactttcatttaaccaaatcacacattcaacttcttatcaaaaaaataaaaaataaaattaaaaaaatcacacattaagcattgcccttagtcctctctaggtcggttctctctaagaacaagctggataggttgagtcccttcggtgggaggggttatttctctttcattatcttctttcttcttattgcgcttgagtccattatggattacgagcttgtgtctcgcctcacagaggttttgcaccttgatgagaacgatggtccagttctgtagctcaacagagccggtattgaagaaggtcaaaaatctatggagttgagtcttgtggggaaagttctaggtgctcgtccaacgaataaagaaagcgttgagaatattatgaagggtgtttggaagatcaatcatagttttcacgtggaagagctgagtttttccgatcccatttggggagtaaagaagacagacagcgagtctatggtggtgacccttagaccttcgacaaacaactgatatgttttgtgaaacttgtgggctgaggtgagatttccaaaatgaagtttgatcacacctcattttgggtctctatcaataacgcgcccgtagcttgtatggctgagatttttgttagggaatggggagtcttgattgggaaggttgaggatgtaagaattgccaattgtgttatgaaggttcgcgtacgcatgaatatcacccttcctcttaaaaaaaagtctgcgtgtagccattaatgaccatggaactgaggtttcattgctattgcagtatgaacgatcacccaaattttgttgtccactgaaggactttgttgatgatgatgcactaccgctccctctaggacattttggttcgtggatgtgtgcacctagctcccctcggagggactgtcgtcctgtccgtaaggtagctaccaaccgagattgtgacgatgctctgatcatgaatatgagggagattggcaagatcttagatgcagttgaacagtctaggacgcgtcttatgaggttgccttgtacaccttttttcatgtatccaccaagctagtgtactcggtgtactttggcttataatcctttctttgctttttcgaagtttcacttcaactttggttctttccatttctcttactctaggaatgactcacattatattctggaacttgcgcttgtggcttcgactatctgggagtgatactacatctagtttgtgccactttatactcaaggaaatgggtttgagtatttgcctggacggatgcagagggtccatagaaaagtggattgtactgaattttgagcatagggactttcaaagcatatcctggagtagatgcagaaggggccagtgcctaagagacttaaaagcttattggtaagcatcttctaaattgatgaaaccttgtgttcttgacataaactcaaacaaagtctcacccatttcctctgcatccctccctataacagaaagccaattgtaagtcgagattgtggggctacaagtttcatgtcgtcactcacctttgtcctggctactgcctccatcattcgttgaatgaaattgtttaggctctctcctgcctattttttgacgttggtaatcgaccccacttccatatcatagtccgggcggctatgaattactttcgaaaggcaaactgcagctctttccagctatggatcgatccaggagccaatctcttccaccaatcctcagtagacttggtgagtgtcagggacaaatataaacactcgacatcatcacttactctggccacctacatcatcttgttgtacgtagccaggtggatccttggatctgtttgtccatcataaagttcaatctgaggcatcttgatattctcagagagcgaagcttctatgtgttggaatttattttaccaggatcttaaatct

SEQ ID NO: 114870 - DNA, 1337 bp, Cannabis sativa
ttaattaattaatttctctccacttgcaaaaaagaaagataaacaggtttcttatcttagtcagaaaaaggcccatataaaaaaaatgtacatttatttcatgttgttaaattgttcttgcattattatacacattttttttatcatcatttttccttttgggattgattagattcttggctataataagagattggagtggtgtattatttgggtcccacccaaaaattgggtgtaattttttttgatgatttatgttgactatttttctataagataaataaacatggtactttcttccggtagtcctatctatcttcagcttgtggtacggcctgcagatgctgatcctatcaggcccttaaactagtgggccatggcccaaattataatggcccacacattctagaatgtgtccatcttatggggccatccaatgtgcattaggtaataattctcttcttaattaccaaaccattttttattatatacacaaaattttgtctttggatcccactttctatatgttttgggccttaaacaatgtaatatttatctttaagtaattttaggcaagttttattaaattactatgtactactacttcaccaaacttctgataacatctgaactctgagcatagtatagcagaaattaatataggtatcattaataatatttgtccctatttgtatgaacaagaatataattatgatatacacatgaggaggagcatcactatttaaattacttatgatttaatcctgtgggattaagtgaacatttatgtttattcttctataatcaaaatacttttttttagaaatactcagaaataatattgactcgtggaatatgtaaattaaactacaaaactgcataaaaaaattgtgttttacatatatttattaattataagtattaattcttgatttacaaaacttcatttattgttgacgaaaatctatgttaagagttgctatatgttatgaaacttatagtctccattattagtctaacactgagagtatgaggagggctttaagacgactttattttcgttcccctaagaaaggtattgaaccatatattgttaaggttgacttcctctttaggataggataaatattttagtgctataccaccctaaggtgacattactaagttaagtcatgaaaactaaaataatgtgttagactcagaaaataatgtccctatctttgatgctaggggacattattaatcgtaatgattcttatacacgagtatgttactctggcttcttcatggactgaaaactgaccttacagacgaacacgagtgtttccagcatgctt

SEQ ID NO: 114871 - DNA, 1934 bp, Cannabis sativa
tattttttaaataaaataagagaatatactaaaaaataagaaaaataggaagaaaaaatagtaaaatgccacctaaactcttcttgtgcattcctttatatatatatatatactaggtagagtttacgtgccaaagtcacgtattttagttttattctaaagaccagtaataaatctacataataagttggtaacaatcaacaaaactgatcaattaatgcacaacatttagtccttattcttccttctaacaatatcaaatcctctaccgcttcaaccattttaatgtacttacacaccatgtaaattatcaagcaagtcggtgattataaatacaaatcttcatcatcacagttctccatcagttggcctccaattcttgtgccaaccaatttaatactaagaaccctgaaatacaggttagtactacaattcctaacaataaaaatagatataaaccattttcaaatcatatgaaaattcaagctatatctgtagcccataattctgtacctcttagctaactggatatagtgacctttgaaatcccactccacgaatgagcatcaccttaagtatcaaattacctaaagttctaacttcgtcatagaacaaaaattacaaattacatttactttaaatcatttttaagccacactaacatacatttatacacttatacactttttgacttctatggttatcatatcaaattggtaatcaacatattaaatcaaaaccatgccctcttgaatagaaccaacaaacacttagtagtcaaattattattataaactgaaacacccattatacagatagataatccactaaaaatccaatagtgactatccaaatccataaatcgaaatcgctaaataaactttaaagaaaagaacaggcaaaaatattaaaatgaatacatatcaccaataaaaatattaaaatgaatatttttcaattaaaataaagaagctaacaaattctaattgagataatttgggcttagttccaatagcccgaattataaactacatacctgaattataaactactcataagatcataggaaatttaatattgaagagtaaattaaagtcatttggaattgcattgatcatatcaggtttttagtctaaagagtatatatgtatataattaaatagtttatgtatataaatcattgtgttttcagcaaaacacaatcaccctgaaatcctttcttaccattccagattcaagaatttcattagacaacatggcaatgagtgaaaatccattccagtatattcttcacgagcaaacccctttgtaagcgtcgttaatgaatcgtttctcaattttgtttctgactttgattttgatcctgattataatttgcattatttgcatctaattcacaattcgctcttgtatttctccaaaagaacacaacgattgaccttgaaatcaaaataaaatgtaacgaaatcaaatataatgcattgtaaaatgaataatagtgcaaatggaacttaccttctattgtaacacccaacctcattattgaaaatcaatagggtggtgcaccagcaaatttgatgttgtctgattggatttaaattattggcttcatcaatttgagcaaactcactttcccaaccatttttttctagtcgaacactctaaagaatcaatagtcttccagcaaaaagaaaaagaaaaaaatcgtaagagatgtcgctgagaaaaattgtgagagaggtgaggcttaaaaaaacccaaattctaaatcaataatcttaaaaaaaataaatcacaacagatggttgagagaaaatcgtgagactgtttttttcttttataagagttaacggagttaacttggcgttaaccttcctatctacaaaaataaaacgttaaaataataccgttaaaccaagaaatgccgttagata

SEQ ID NO: 114872 - DNA, 4752 bp, Cannabis sativa
tcctcttgatcatgccttcgataatatttttaaggatgtagcaatctaacagtgaatggatcataatttggtagtatcggcaataattttagtcatttgtcataccaacctcgctgggtcgttttggtttgggaagtcgtatcaccttagcatttaacaactcatcaaaaatttagtcgacgttatcatcgtcgaatgaatacttaacttccttcctttctttgagagttaatttcttttgtgactcccgtgccttccctttatctttgttgttgtcgatattgataaaagtggccattgattctcccttcttgaatggctttttgttttcgaatctcgatgagggtttgccacccttttaccgagaaatttttatctcaacgttgcaggccttcgagacgaactcattgaaagttttgggttctgttatgcccacaaaagttgccacctcagggttgaggtgtttagcacacattgaaaccaccgcttgttccaatatcctttttggacattggagattgagacttctctacttggttatgaactcattagcgctttcactggttcgttgtttcgtttccaccaggtcatggagacttatggtcttctttgaactcacaaattgtaccagaaaagctttttgcatgtcgtcccaaatataatttcagtattacatacatacatatatatatatacgtttacacatgtaccaagatgaataatttattccttgctgaccgactttgtatacagatatttttgtttattattgacttgatcgattcgtttcaggtatactgatttcatatttgtctttgttttggatccaacgatttggcatatcgcgatttttctataccaatctaaccattacatattaagatgtaagaacgatactgactcaatattttttcgaaccaaaattcatattttaccacagataattttgacagtgaatttgtggatgaaagcatctatttttcttttttaaggatgaaggcattctatggatgagagcatccaattttttggtgaaatgagagcattccatgaatgagggcatccaaattttttagtggaatgaaggcattccatggatgagggcatctaattttttttttttttttttggtggaatgaggacattccatagatgagagtatcttatttttttggtggaatgagggcattctatggatgagggaatctaatattttggtgcaatgagagcattccttggatgagagcatccattttcatttatggaatgaagacattctataaatgaatagagagaaataggaatgagagaggaacaaaataaacatatatatatatatataaaagaaataagaataagagcattccatgaatacttacccttgaagctttttgattgttgctaaaaaagtatcgtaatttttttttctctctcaaatttttcttccaaagtgtcaatccccttttctgttctcaactactcctatatgtagagcctatttttaatttattttatttttcttttattaacttcaccacccatgtaacgtgataggtgagagaaaataaggaagtgtgcagttaaagattagagagagtctcttgatttgactcttaatttgactgactattattattattattattataaaatcaattattccttttcaattttttttaaaagaaataataataataatttattttatattttttctcgttcaacagggacttgacaaatgtaacaatcttactcattctttctgagcctttcgctttaattttttctaacacttctctctttttcgataggcttaatccaagcttagtttatgcctacatctgttttaaaagtgttatccccttcgtcttcaatttgaccaaggaaagaactaggccaaaaagaaagctaaagatgcaataatggagttcgagttaaagaatgctcgaataggtgagttaaattttgaactcgatgcaactaagaaaaaagatcactgagcttgaacaacaactcaccgatcaagacaagattgatgtcttggtaaaagatttggcggcttagtcggcaagagtgtaggaactggaagaggaaagagaggctactcattaagcgcacaattctttgaccaatgacgttgccaagctgaagaagtccttgagcaaggagcaaaagcttctttcagaagagaagatgggtcatgagatagacaagcaaaactatgaacaactgaaatttttggtcttttatgatttctagtaaaagaacccaatgaccaacttctcttatatggacaagactgtcctaaacgagttcccaacgttcgcttttacccattgagctcttgaggatgaagaagaagctcgcaaagttggagctacttagccttctgagactttaaatgctaagaacttcttaatagacaagcaagataataatattttcaacgctggatatgatggatcacactgccctatggaacactatttagccgcaagcactaatataggtacctctattgcagtctattgttagatatgaaatccatcttttattcaaaagataaagttaatttttttagtacaaaactcccattcatgagttttactctaatttattttaaataatataaaatttagagggcacttgagaaggtttaatttaaattttttagaatgtacattgtagttattaagaatttacaaaaatttttgtaaaattttaaattagtataaaaaataaattttaaaacaattttttttaaactattcctaataactataatatatcatttaaaatatgttcaaaaatgttttaagggagttaagggtcttcgacaaggggattccatatccccgatgctgtttgtgttggtaatggagtatcttactcggttattacagcagggagcaagtgagaaggagtttcggtttcaccctcaatgcaaaaacctgtaaattattaacctttattttgcagatgatctcattattttctgcaaagctaataaaggctcgatggcttgtgttaaatgaatttttgaggagtttagtaacaagacaaggctcaaagctaatcttgcaaaaatcttaggttttctttagtggaattttaaaagggacaagtctgatttatttgaaatcttatagattgaggaaggggtgtttcccctaaagtatctcgaggttccaatgagaccaacaaagtgaaaagtggaggactgtggggttattctcaagaagattaagaaccagctgcacacttgggctagtaggcacctttcttatgtagggagatgtcaactaatcaactctgttctgttgggtttgaggtattattggatgaacattttcttattgcctcaaaacacaatcaagacaaactttgtatgtggtttttgtggggtaacaatggtacaagaagtaagtttcatcttacctcttggactaatgtttgcttacctaaggagcaaggaggccttggttttggtgaaggtgctaagtggaataaggctatgattgcgaagtatgtttaggctatcaatcatcatccaaaagctctatgggttcgttggatcaaccatgtgtatttaaaagggcaaagctttcggcagtatcaacttaaaaatgacactagttggtactggaaaaaactttgcaaagttagattgatgttttctcagcaagaagtggaggatgctacttgtaagggtaaattttgtgtcaataagttatacaagagcctttgtcatggtgattaatttgagcaccaacgatttgtttggaatcggtttgctattccaaaacatcgatttatttgctggcaggtagtaagagatagcttactcacttgggatcatctcttcgaattctgcatattgacagcaggctttgtccagtgtgtggttcctgtgatgagacaacggtgcacctattcttctcctgcattttttctcagcaagttttgaagggtataaatggctggttcggggctgcttggtcgccgactagaagagtggcaacaatggactatgcgactgggaaacaaaagggtaaacttagttgctgcattggtttttttcagttaccatgtattatgtgtggcaaaataaaaacacttatattttcaatggtttttgatatagtgttcaaaagattgtagagatgataaaaaaagatactaagtataaggtaagcaattttatttttaagaagttgaaagatgaagagaggttattgttgttaaaatttacctttttgtaaggtgggcttttgttgtgttgagttgtaagttgattgtttgtttgttgattaatgaagataaaaaaaataataataatttggattgtaatctactcatctgttgaaaacaaacaggtaaaaagagttattttaaaatatacttacaaaataataaattatttaaaattttaagcttgtagagtactcaaaatatctacgctgttatataaagacatgaattataatttggagtggaagcaattttccattacttcagtttacaattataattgactttatttattcttaaagcaagtttagcttacaaaaaaaaaggactactaataaatacatgtgaaaacataatacaggtaatattttggaatcttaatcccacaatataatacaacacattatgggctcgtttagaacgccgtattaattcgtattgtattgtattatattgaattagattatatatcatatttttatataatactatattaaactt

SEQ ID NO: 114873 - DNA, 3487 bp, Cannabis sativa
tttgtttcctaattattttatatttttttaagtaacttatttttagaaaatttttaatatttttcaatgataatgtattattattttaccttttagctaattaaaagagttagaaatgaattataattagttaattaccttctacttgtatttagtgttctcctttagttaattacatgttcttcgtatataaattataattttaatttattgttcttctttaataatcagtttaatgaattgtcatgtttagttaaaacaaaaaattattacatttatttgttactaattattataattttaactgtaattttgttagggctctttaatgctaatggaatatggtgctccaatgctgaagatgttttaaatattatcaaaatcttttataccaacctttttatgacttcttattctttggatgaggatattacaattgtcatatatcatcagtggagtctagagtgtcggataatatgaatcaatccttgttgctgccgttttcaaaagatgaagttaaaagagcagtattctccatgacccttgataaaagtctgagtgtggatggtatgaatgttatgttttataaaaattattaggattctgttagttcatcagttactaaagcagtggtagaatgtctcagtagttcgattgaactatcagttatcagctctactattgtgactttgattttaaaagttaaaatgaccaataagataaatgactatcgaccaattagcctctgtaatatattatataagtttgttcctaaggtcttagtccaacaaatgcatccttggctagatgatattatctacaaagcccaaagtgcttttatattgagggaagaaaaataacagataatgctatggtggcttatgaattgctagaggtgtgtaactaaaggaaggaagtattattcggtgatgaagttagatacgagcaaggtctacgataaagttgagtgaaattaatttctagaatcagtcatgcttcgattgggctttcacccttcctgggtaggattactgatgaattgtgtttgcactgtacaatattcttttaatattaatagagatgtgcatgatttggtttgccccactcgtgatctacatcaagaggatcatttgtcttcatatttatttttattttgtgcagaaggcttttaatctgttctttgccatgcagaacgaactaaagatctaataagttataaagtggcgttgcaccatcaattacacacctattttttgcagatgacagtctacttttttgtcggacctcacaatgatcttgtcaagtaattgctaatatttttaatctatattcaaatgcatctggaaaggtacatttaataaatgattataatttatgtggtagatagaatataaccttcttcttaaggttaattctaagttataatatatgaaaatattgtggtttaattaatagttttattacaactttgtatttttcagatcctagtaaatataataattttatttgcttattaaatttttttgcctgaactaagaagtgttaagttttaaagattacaatgtataatgttaaacagataatatttttcttaagaacttaataaataattaatacaaattatggtataaatatgactactttaatggttaaggcaggatgattacagtagtttggttttacaagtaaaatgattaagtttggattataatttttatgatgtcactttgttgttggtagtatactaaattagtgattatattaaggtatgatattatagttagacaaaattaattaaaatgttgggtgtataaattaatttttatctgttgtttatatataattaataagctaatatttgaaacctttttaagtgcttctgattctttaaatcacattggatcttatggttttactattacatatgattaattttaataagtcttctatatacttctccaaatatactagaaaatatccaaaattactatgtgaatatctcaattacaatggaaatagagaagtatttaatacttccaatgttgagtggaaagaataagcaaatgatttctgtagatgtaataaaaaaggtttgaaaaaaactgaactcatggaattcaaagctattttcatatggtgggctggaagttttacttaaaacagttatccaagctatgcccacatatatgatgtcttgttttcaaattccaagaagttgttgtgaaaatttagaatcaatgatggcacattattactggactaattcaatacaaagtaagaagactcatcggttggcatggtataaactatgctttctaaaaaataaaattgggttcggattttaagattttgagtttcataatcaagcccttttggcttcacaagcatggcagattcacaacaaacccgactcttaaccatcattgatctttaaaggccgatatcatcaaaacacagacttcctaaatgctacaggtggatgtttggacgtttgtattaagttttcattttagctataattattttatggttttccttattcactttcttttttaatttgttatagttggttttactcctaattatgtgtggcgtagtatagtttggggtaaatttttgttaaagaaagaattacgtagacgagtgggaactagtgattatattctagcttttaaagatctatggttgccttggccctattcgtttctaccaatgacagttgctaactcaaacccaactatattcttgttaaagattttattttagataatagagaaggttggaattggcctttggtgcaagcttatttcaatgtggctgatcaagaatgcatttgttctattccaataagtaaattttcaaaggcggacagttgtttatggcactacactactgatggtgatatttagttaaaagtagatatcatttagctacatctcttgtaacggatattccgtcatcatcaattacaacccttatggattggtggaagaaattctaaaaactacatttacattcaaagattttacattttgcatggaaaggatttcatgaagcatttcttacttcggtaggtttatacaagagacatgtgatttcagatcgatattgcccttttatgtggacatattgaagactcaaatggtcatgcaatattctagtgtgaaggagtccaattttctaacaatcattggactttgagtttttaaagataacttttttgttttaatatttccttccaacaagtgattctgaatacatcaaatgtgctttcacaacaagaatttgaattttttctatttttagcttggacgatatggcgagaacgaaataaagtaactcatggtcaagattttaaatcgttgaatattatagtggttcgaataaaggaattatttaaggaacacattcaaggatgacataaaaatgcagtttataatactgttagatgtatgttgaacgataaaattttaataataataataat

SEQ ID NO: 114874 - DNA, 3567 bp, Cannabis sativa
  modified_base (27)..(41): a, c, t, g, unknown or other
  modified_base (88)..(105): a, c, t, g, unknown or other
tgtatacataatcatgaaataaatcannnnnnnnnnnnnnnattaaatgttatttctgatttatattaataagtaaatttgattatannnnnnnnnnnnnnnnnnagggcataaaacccaacattgaggccctttaattttaaggtaattttcaactagacactaaaaatttaaatcaatccaatggaacactaaaaattatcatatatatggacttgtctatagtattatactattattagtgagacactttagagtaccacactaaaattgatttttgattttttttttagtttttaataattaatttttcttaatatatattatttatattatatataaaataataaaaattatacatttttgtgtgatttttaaatttgtggttggaatagaaaaaaaatattgttaaaattttatatttttagtgttagttcaacactagatttagtatttactattggagttttttttttttttgagggaaactattggagttgacctatagaaatatagtgttttaggaatatgtcaatctctcaagttcaccctccatgcatgaaatcaaatctagttttttttatataaagaaaaaaataaaattatcaacactactaaaaatactatttttaataataacttttttgttacaatataaactttttgcaactactttcagtcacaacaaaaataatttgttactaaaaagtaatattacttgttattaatattgtgttgtggctaaaataaattgtaatttttataattgatacttttaatcacgaacttttaatgataacatatgaatgataatttatatttagtcacaatttttttacttttaattataaattttattgtgtaaaagtaactttttttttttttaatagtaatagtgaaatttttttttttttttgttacaagtgattttaattcccatgacatgataattttctttcaattatttcatgatcatctgtcttttttttttttttttttccaatgtaatagctaaattataagtagctatttatttatttatttattttgaagaaaaaactagccaaaatgctaacctaacttgtttgtcagctataaggagaacaaaacaatattaataatttcctttaaaaaattggaccattatttttgcaagtgatgtgtcataagcataaatatcatttcaatcctcaagtacaattatagcctcaaaaaatattgtgaatcttcgattaggacaaaaataatatgaaaatatcattttagatgtgataaagtttgcttatattgaaactctaattggaaaaccagaatctaactttgtatgacacaagaaacagtttctctactctattttttaaaatacaccaccaaaacttcattttatcgattttacctcaaatttttacattatatcatacatcaacttctctatttttttctatatcatttaattataatatttttaatataatattttattcattgtatattaataattcatataatattacacatatataagaaagttaataaaaataatattaaaatatatttatctcaatgaatagttatctctacatttagctaagcactatttattgagctaaaaaatatgtaaaatttctaaggtttacctcacttattggaagctcaattttgtaattttttctttataatttaaagattgaactattttagctcatctattgggagtgctcttagaagctggggacccatatatatcatccaatattaaattacatatcttcatatgtatagcaatatcacattattatattatacgtaggataaatactatgttaaatcccgtattttataaaaattatcgattgatttatttattttattaaatgataaaataaattttatttaagttgttaaacatattgtaattaccagcagaagttatagtctaaacatattaaaaataagagagaagaacaaaatatgatttgagaatctaagtcaaaggacatagtgagattttgtgagttttagttctttggttaactgaatatatgaggtctaatgtaaatttgttatagtgatgaaataaaattgacttatttaccagaaaaaaatgacaaaataaatttgtattttctaaaatagtaaaaatgaactttgagttcaattttcaacaaattttttttactataatcaattggacaataattcttagcacgaacatatattaaaaaaaatataacaagttttgttataatacatctagatcgggttattatttttattttgacaaaaaaaatcagtttgagattttatttgtactatgttgaaaaacacattatttaacaaaatagaaagtctaattaatgatttttacaaaatataaggtttaaaaataaaatttaccgatatattagaattattaattaacttttttctaataagctctatttcttttaactcagtttttggtttttatgttactgaatgtcaaactttgctttcaaacttaaagtgatgtcgatttatgctttatcaaacgatatgcaaatcgtatagctcaccacacctagctagaacttccgttttttttgttgatgattgtacgtacaaggagtatactgtgcttgctacgcttttggatgtaattcaaaatgatatccaataaaatatacatattttattaaaaaaaaaactttcttctattggggccattatagcaaacttttctaagatatatacccaagtaatcaatactaatcattcctctcattccttttctagtactaccacactttctaaggtgaagtaattagctttgatagtgaatcaactttaatttgtttattattatgtgaattgataatcaaggttttgaagaaaaaaaaacactaaacactactagatgagatcatagcaaccattaaaaaatatataaagataaattattgagattataaatacactctttacatcattagtgtctaaaaaccatgttttaagagattcccaaatatggttcttcaactaatggtttatacataattattgtgtctaaaaaccatgtaattaagagttcataataatgacctttaaaaaagaaagcaataatgaccttagaattgaattacttaaaatagccttagaattgaattacttaaaataaccttagaattgaaaatgttcccatttcaattgagtccattgaaaatttatccaaaaaaaaaaaagcatgaaataatctttggtgggggcagcatgagcatgtgttgtgatttgtcatctaatcaagaaattcaaaacattccactacagtcaaaagataagatgccatgacataaaaatatcaaccataaattatcatatatatcaaaaccaatatagaattatattattgaatttttttacaatgcacattttaaaatagatttatctatgtatctttatctatttttacatttgaaataatttcttgttcattatttttagggtttttttatttttacacttcaaaataattttttttgcatttttacgaaattctacataaaaaaaattctattgcaactagcgctg

SEQ ID NO: 114875 - DNA, 1364 bp, Cannabis sativa
gtaaaataattccaacaccaacttgatcataccgttcggtcttgaaatgttccgcccataatgtcacaccaagtcttgacaaaccatgacattttatgcaatgaatcttccctaaatgaatccacgtttgttttgtgccaccaattttgttagaatctgtctaagtcacgaacatatcatcttggttgcaactttctagattacattacaacaagctataggtctgaagtcacgaacaacattcagacacttagtcttaggaataagagtaagtgtagttgtattcagttcctttagtaacattcctgagtgtaaaaaagaataatatagcttcacaaaaatcacctttgagcaagtcctagttgtcctaaaaaaataatagctatatccatctggaccaagtgatttgccacccagtatatcaaacatagcctctttaacatcaacaaccatatagtcttgtaacaagaatattttttttgacccaggcaatataggatccaagttgataatactctgtttgaccgattctctgtgcaaaatcttggagcccagaagagaagaataaattgaacaaatgcctcactgactgtggaggaatcatccacccaaacatgagccatattgtttgattgaacaaattctattgcttactcttcttgatcgaggacttgcatgaaacagagatgtattttcatctccctcttttacccaaaatacttttactttttggtataaaaaagagagataagtgttatgaatgtctttatatgctttccttacttcctgttcttgcttacatttatcttcatctagtggcctttgctatacaacattctaaaaatttagcaaaatatgataggcttgtgtatcaaaaacttgtatgtctcccactttctctttgttcagaacccaaaaatctacaattaaagcttttagctttgaaacaagtatgtacattggtgaactagttacctgcattgatcatcctttcctaacaacctcattctatccttcataaaatctccacattttaaagtgcttaaatggtcttttggctacatttcgatccaaatagaccgtcaaaactattggaaactatgatcaaaatgaccttaaaaaataaataccacttatgctggttcaaattttccaatcaaactttgaatagctaagacctatcaacttttgagtagatcttagcctctagaccctgtttattgttccaagtgaataatgaacctgaaaactttacatcctcaacttgaaaaacttccacaaactcttggaaagtcatcgatttactcaccttttctatcttccccactctttcttctgactttaaaacatcctttaagtctcct

SEQ ID NO: 114876 - DNA, 5431 bp, Cannabis sativa
  modified_base (1606)..(1619): a, c, t, g, unknown or other
  modified_base (5374)..(5406): a, c, t, g, unknown or other
tagtataactctatttagttataatctctcaattagaatataatttactaagtgtattcttggatagaggttttactgtagtaatagaatgtaatgataatagtaataggaatactattactatatttagtttattttataatgaacattgtaatcgaaattgaattgacaaaaatacttttgctttagttattatttataaagaaagagaaagggtaaaattatctttttattatttagtagtgattgtaatcctcattcattcatgtggtgtaggagtataatgagtattcatgaaattggtgtaatacccattacaatggaattctattacaaaggttttggtgtaataccaattacaatgaaattctattacaaaggttaaaaacacaaaccaaacattgtaatggtaacttttattccattacaatattcattccaataaaccaaacatgctcttatttcctagaagtgttcatcggtttggtcgggttatagtgtatttttaccaactcaatataaatatcgggttgcaaatatctaattgtaacccgtctaatgaaaaaaaaaaaaaatgttacccgcccaataatttttgtcggtttgttgaaatcaccgtctagatgactaaattgtatgtatggatcttagtattaattgtgattaatacggaagaaaagtattaacacatcacgttttcgataatagtgcattataaatttaatattttattaaaaatactcttaattaattaaattttaaattgatattatattaaaattaattataaaaaaagtctcgaattttgccctagatccctcgctagcttgagacagccctgctctattagtgtcgattataatttctccaatattataactcatccatccagttttagatgtacgtaacaacaacaatgcaaatgcaaaaccacgaatccaagattttttgattaacttggctaaaaaaagaaagagcaaaatttctattaatttaataaattaaataaataaaaaaaatagttatatggaagaacacatcctaagcaaacatcttatcttatcttataagtaataagtctcttattcccctccagcttaatttactttaaagcccctatctcagctgcttcgtaaattcaattgtattttcacactaaatcctgacacgtattcttccattttcttctaactgccattttaagtttaatctctagcgatacttttcttctactttgtttcatctatattttttttatgggaatatacacaatcagtacctcatgttttattaaaatatatatttggtactacattaccaataatacttaaagggtaccttatattatgaaaattagttcaaaatggtactttttgtttcaatttgatcaaaaaatatatttttatgaccatattaccttttttcatgaattgattttttattatttataatgatttttttaagaataaattaacaaattaaatatattaaaatagttatgtgggtgatattgcattggtgaaatggtcactattttccatgttgtaaattcgatggtaggctaattatctcattatttcttccatgctctctctctctctctctnnnnnnnnnnnnnnctctctctctctctaaaactctcatctgttcaatgtcatctggtttatgatgtttttggattttattaatgaagtattatcaaaaacaacatcttgatatagaaacttgatttgcagcaataagaaatcaacaagacaatgagaaattcatataggcaatattattgctctccatatgggaaaaaagattgtgatgattttcttggtagaagaaacaattttgggacgagagtaatgatgaagaaaaaacttcaagtctatagaatttttagatgatcgagctcctccaaagattaatggcaaaaataccaaaaactagctattagagaatttatgcacaagtgttcttttagtgatgttggttctttcttaatattcaagatgtaattcagttttgcagaaaaatatagtgcaattttaaactatgtactttgcatcactaatattgccataagcagaatattcatttaaaatttgggttataaaatgtagatttttcttaatggtataaaattgactggataaaacacaagtctttgtcttgtcttagcttggattgcaattgcattacaaaattaaaaccaatagaaaaatgacaaaaaagaaaagaacagacattcatctatcattgacagaataagtaactaaatcaaaagttttgctttaatcaaaatatatcactaagctagattccaatttttctttgtacttttggcaccttaaaaatagaactaacattgtctttgaccttggtacctaataaaaaggactagcattatctttgacttgcaaaataaaaccaacaacatgacatcaatattaagagatatcattccaagttttttgctataaaagatgatataaaacttaataaacatcaatgcttcaaaagatgttgctggttgtatatctgttaaatgatgcttcatgtgatatcatttcctctatagatgaaacctgaaatataacagtttgtttataagcataaccatagtagaggattacaaccaaattggaatcaagcattgaaatctaaaattatttacctcaaaggatattgctcttgctctacctctaccttggccgattcatgtgcctcgacctccactgttgcttgttgttggtgtttcttgtggtttagattgaccttgaaattcttgttgttgtggtgcaacttgtttttctccacaaattggttttcctttggctttgcgtgttgttggagcaacttgttgttgaggatctttagattgtggattattgcatgttctgttgttatggccaaattatttacagttcttgcacttcttagtactagaaactcccttcctacatttttgtttttctagtaaatgtggcaatggtctttcttctcctgctactcgtcttctgcgatgtttcttaggtcgccctggtggtcttcttacaagaggtggtaataatttctcatcattaaactcaggccagatagattcatcaggtatgggatgcataacaccctcaaaactttttttccacatttcagttgtaaagtatggtgagcaataatcagatatatatcagcccttgtggtgtttatgcaagcagctgcgtgcaaacaaggtattcctctcgcttgccattggccacatatacagtagccttcactcaagcgaactgtgcaactttttgtgtcatattccacttgaaattcatcattcccaactcttgtaacacgtgcatgtcgagctcttttgaggagttcttgtatcttatgatggacctttggagtaagcttgaaatcccatcgttcagcagtaactttccttgcatacatcatagatgtatgttgcattctaatgccttctagcaattcaatgggaggtttgtatcggtgatcatcaatccaatcattgaaactttcaacaaaattatttgtaatatgttctaccttcacctcagtatcaaacttgcttattgtccaatgcccaaagtcaatatttgatagccattcatgtgcttctgtgttgaattcttttatcttctccattatatgcttgaaattgtcaaaatttcttgtctcagctgctgcccaaaataggcctcttagttgtgaagagccaaatttttttatcatgttattttcgatatgaaaacaacaatatcggtgtgttccttctggtatggctgccacagcctcaatcaaaccctacaaatatgaataaagaatttatcattaaacttttattgcattaaacataacatattatttaacagtactaaccttttgtctgtcactcataatacaccatggttgtccattggaagtatcaccaatttctccccttaataggtccaaaaaccatctccaactattgacattttcagcttcaacaattgcataagcaatggggtagaaatgtagattggcatcgatccccactgcagccaagaggatgcccttatatggcccttttagaaggcagacatctaagccaaaaaaagggcgataccctcgtaagaaaccagttttgaccccttcataacaaataaagatcctaaaaaattgtggctgcatttttgggacttcatcattctcaccgtcttcattaaccgccactagttgactctggataatagcagcagaaccggggttagtttgatgaatcatatatggctgcatatcatctcaaattgccataggaataggcataatcacgacccacacctcctcttgccttctgcctagctttccaaaattgtctatttgtagcctcgatgccaaaattatctttcaactcagttctcattttattcaaggtaattttaggatcattagcaaacttactatgcaacttttttgcgatccaacctgaggtaactactctgttcttcactacacattgacatttatgttgaggattcaaagttttaataatgaattctcttccatcaggagataaggatgcatgtattctccatgtgcatccttctgctttgcacattgaagtcactctacttctaacatgcttcactttgcgaagctcaaaaccttcttggattgcatagtctttcaaaacatccccaaaatgcttatgatccctaaatcttaaccacctccttagtattatttttccatttacatatatatcctcaatttctggtattggcattttactgttaggattggcctcatcttcattcctttggactcttttataacatatatgaccagcctcatcactatcatagtactctccaaataatgcctctatatcaggctcatcacaacagttctcactattagaatcgtcttcatcatcagtcgaagtatcactcctccctcttctccattccaagtcactttcatcagtgggactcaacaattgatcatttagtgtgggtacatctagtgtggcttgcgtttcatctagtatacttgcatcttcaaattcagcaagtgtattttcattgatagtattaggaatatcaaatgaaaatggtatagaactttgaccaactttcttacgcacacgttgtttcatgcgcccaccactattaagtcctttaagatcaatcatatttacctattttattacataatataatatcacttttattataactacttttttagtaagtaactcaagaaaaataattaaagaaagaaaaaaaaatgctataaaagctttatatatgtagacatcttctagtatattttttcatggcacatcaattttgagttattcactcatatatatatatacagtagaacnnnnnnnnnnnnnnnnnnnnnnnnnnnnnnnnntctaatttgttataaaaaaatcaag

SEQ ID NO: 114877 - DNA, 2627 bp, Cannabis sativa
tatttggttaaatcatggtaattgtaatctagactcatttctttaattaattggttgacatattatattatgcttttagtttctctttttctttacattatcattatgtttatgttggttgtttcatgataatagatctcaaagcaaggaacaatactagagcatgaggcactcatgaagtgttgttttataataatttgtccatttttaaaataagtgagatctaatattgagttcacaaataaccatacaagaacattagtaggcacctgtgtgtccttttttaacatttctctactaataaatcaatcaatgtattaagtgggctttgaagttgtagtaatagtagtgtattaaacccaaagattaacataacataattacaatataacatcattattattattatgatgagggtgaattttcacattttactagagccaacaaggtacttagaatgccttccatgagcaataattttgcctgtatttttcttcctaagctccacactcacaacaccaattgctttcccaaggagcaaagtcttggcctccacctcaatttcctcctgaatatccacaatatccaatccaatcatataataataattattattatttctaattattgacaaacagaagcttcaagctttaagctgtaaagaagaataagaatgtcaaagcattaatctttaagaagaaaaagtagacacccacaccagcatatgcagaatccaatccaatcatatttattatattattctcctaattattaacaaacaaaaccttcaagctttaaactctaaagaagaataagaatgtcaaagctttaatctttaagaagaagaaacatacactcaaactagcataagtagaatccaatccaatcatattattatattattcttctaataattaacaaacaaaagctttatctctaagaagaagaagaagaagtagacacaccagcataagcagaatccaattaaatcatatcattatttattacttttctaataatagcaaacaaaaacttcaagctttaagctctaaagaagaagaagaggaagaatttcaaagctttaatttttaagaagaagtagacaatcacaatccaattaaatcatattattattaatattctaataattaacaaacaaaagcttcaacttcaagctttaagctctaaagaagaagtagaaagtatcacaccagcatgatcagaatccaattaaatcatattattattaaaatcccaataactaaacaaacaaaagcttcaagctttaagctctaagaagaagaagaaaaatctgcaattatttcaccattaacaaacaaaatcaaagctttaatcatctaagaaggctcttacttacacaagcataatcacaatccaattaaatgatcattattatattaaaatcccaataactaaacaaacaaaagcttcaagctttaagctctaaagaagaagaagaagaatctgctaatatttcaccattaactataaaaattaaagctttaatcatttacttacaccagcataatcacaatccaattaaatgatcattgttatattaaaatctcaataactaaacaaacaaaagcttcaagctttaagctctaagaacaagaagaagaatctgcaaatatttcaccattaacaaataaaattaaagctttaatcatttacttacaccagcataagcagaatccaagtaagatatattgatctccacagagaccccactagctggaactccatgggtatacaacacagctgaaccaatcaaatccaccatagtcgccgttgcaccaccgtgtagggaattatcacccttctacacaattcaattcactttcataatcataacccaaaagaagaaaaaaaaaacccccccaaaaaaaaagagaaaaaagctgaggtgagctgaccaggagacgagttgggactgtgagagaacatataatacgacctggctcaataagatggagatggtaaccttgactcaccaaaacctcaaacaatcttctgggaactgtttcaatgtcaaactcattctcctttttctccaaatacctcttggctgcttcctccattgaattcttcggattccaaattccaaagataaaaaagttctctatatatatatggacaatttttatttatataatattataaaaaatataaaaaaaaaatataattatgtagttttatgaatatttataaatatatatatatttataattttaatttattatttacttttaattaattttctaaaaaaaataaataggtaaaacaaaatatttaaatataaaatttaatacaatagaacctgtattcaaaaatacacttagaaaattatattttaattgagatgttataactaaatagagttatactaaataaaattaaaataccaaaaaatatcaatataataataataaacaatcattaatactatatcataatagaattattttagagtaaatataatatttatacatgtattataatggcccctaattaaaaattgaaaatattctttttttcaaggtaaatattaacaagttttttccttactcttacactcgttagtgttctgttaaaatctcacacta

SEQ ID NO: 114878 - DNA, 4435 bp, Cannabis sativa
ttatttgaaagatcattgttcttgctgtgtgttggtaatatattatattatagtgtttttctttttccttttggttgtgaaaaattggaaaagagagacaatagagatggaagatcaaagtgttactagttgcagtggcagcaaagctgttgctgaatcaaattcaattaccatagagaaatatcaaacatgtgtgtttctatttgactttgatcttgtttgctgaattgtctggttgtactttaatgttgatctttgatctatgcatgcatgcgtgttagtgttagtgtatgtaatattggaattttgtattttttgtgtgttggtgaatttttttctcattttcactgcttagccacactgcccccacccctaattttagggcttttgattctttggtcttgtaaactcatccattctttaaccatgtttatctttgggcatgttgcttttctttccctctcaatagcttagggttccattcacttcgaaagttaatggtctgaagccatagaattgttgtattagtatgcctgattttgaaagggcttttactaacaggatagagcaaaatccaaacatctgttattctttctagcccaatcacctcatgggagtcattacatcatagtacatgctatattgccatgtgcttcttgtttagtcctgaaatcaaagtttttgggtcattttgaggctcttagaaaagttgttgattgttgtcattcctcttcacaggacagacttcaaatttccctataacattcctgacccaaatatatgtatattataatgtaatacatacttggatttgtgttatttacttattatacttttccttttttaatcttaatctcacaagaaaaagaaaaatgcgggtttcaaaagtctgacgaactctaatttcttagaggtttctgccttgttttgcttacactgtttggctgaatgaatgaaataatccacacagaaggaatactggatatgtatatacacaccgaatattttttagcttagttcctgaaaggctgaaactgacaaaatgattgcaactaagttaacgtctgtttttctaattaaaatctcgatggtgataactgatctatggtttggttgtttgcttcggttaggatggattggcaagggcaaaagctagcagagcaactgatgcagattttactattagcatcagcagtggtgggatttggagctggttatgtgatgggctcgttccagatgatgattctcatttatgcaggcggtgtggttctcaccacattggtcactatcccaaattggcccttcttcaatcgccaccctttgaagtggttagaccctagtgaaagcgaaaagcaccccaagccacaaaggcagcaacctgtgatttcgaagaagaaatctaagaaataaatgggagctaggtcagtttgactgatcataataaactcgaacaatgatttttaggcgcttttttttttatcctcgagttgttatttgactgttctagcaatgtcaatggattttgttttaccaagacttcaggttcagtatatcaatagattttatcacttatcatctgccaattagtgggtaaatcttcagttgattttatttctatttgggaaatttgactaaatatgcttacataaccttaaaatttttcccctaaacttataattactaatatttgtaatctaggccaactttaaagttatcttcaaattacctttcccatttacatcagatcaaaaataaataatacacaaaagcaattggattcttcattggatcccacatcggacctcccattggatctatgcctcctacctcgcaaccttacagattcattgaacccatcagaccccatcggacttacatcggatgttatcggactttgccccacaatcacaggtttgacattctaaacctaaatctatacctaaatttaacaaaatctatctttaatagtaaatcacaaacaaaattaataaaaaaactaaaaatacaaaatacgaactcacctttgacattgtgtccgatttgtccgaggaatctccgtgcaccataggttatgggttgggtcttactttggttatacgtgcgtcgagggtcgtggatagggtcgattggggttcgtcgtgggtctattgaggtgcaccatgagtatgagtgagagggaaagagagaaggcaaccctaatttgttttttgaaatgtgaggggtattatgggaaaaatagaaatgttgacatatatggccaattttaatacatataggtttaggaaaataattttaaggtaatatatacataaaaaaatcaaatttttcttctattttctgttttttccaagcaaattaggtatgtcttttttacatgtagtacaactttttttttttttttgaacatgaaatatcaacttcattgaaataaagcattgaaattgcaagctggcattataatctgccaagacatcaacatcatgaatgctacgatcagaatagaaacaagaacgtctagccacaaagtgggcaaccttgtttgctgatcgtttaacaaaacgaagactaacattaggtagagaggataaaaaagatttacaatcatgggtaatcaaaccaaaaacagaagtcatctgttgttgactgaaaactgcttggacagtgagtaagctatcagtttcaacctctaccgtgctccaacccttgtctttgagccagcttagtgcttccttaacccctaaggcctcaacaacctcagcagggaaggacccatggaagtattgagccacaaaatcaatgacattaccttccgagtcacatgccacaataccatacccatatgcgttttcagtctcaaatgtagccccatcaacattgatcttgatcgtattatcaacgggtttagtccaatgctcaaagttgttaccaacatctagcgtagaaggtgataacaaactcattttatcttgagctttaatccagtccaagctgaggagacaatctgagacggagaagacatgtggtacaactaaataagagataagcataagagtcatttggttaggctattgaaattagaagcaatctattttacttgcgctacaactggagtcttttttacttgtttaacattttcttttagtaaaatagaggccagctagatgaagagtgtggaatatgatatgattaaagaaaaactattgaattatttatttgtaatagccatcataatttgattccttcaaataagaagataatataataatatctacacatatttatattttaaaaaagtgtaatttgtaacataaatatttttttttttgaataatatagcataaatatttaagtttaactcttgttgtaaataaatatttaagtttaatttttagtggtaataatatttaaattataattttagaatttctgtaagtataataggtcattaatttttttttttaaaaataatttaaatatacaaataaaaaaaatgacacgtgaataatgattaggtacctacggagttttagaattataatttagatattccgctaaaaattaaacctaggtatttaggtacctatgattaggtacacgtgaatactgtaaattactcttagaataattagtaattttgctcttgaatttttgacaccacgtgatcattccttctaaaatacgacttgttaaaaattctctttgaacttttgcatttacaaaaatttagttcttttgttaggtttcatcttattattccgtttaatgttgatatgtctttgtaaattagcaattttttttcttctaaaactttgacaattatcaaattgtatcccatctaaatgtaaatgaaaagattcaatatttttatggtaaatcttaaaaaattaatttagatcttaaaaaaatcatttagagtgattaagaaaattaaaaaggaaatcaatattttaaattgattaagcaatttaaaagattaattattatttttattaaaaattcatttaaatataaaaagtatatttttcatttgatttttgtaaaaattaaattttagaatccatatagtatcaaaaattcagaaaacaaaaatactaattattcttatatttatttatgaactatctatctagtaatatctaatatgtgcaatgaaagagccccaccccaaatgataatctccatttgtgattttgttagtgatgaagagaagatcccatcccgagtgagtgtgaagaaagttgggatcaagaagaaaattagtgggaagcaaccagactctaaaagaccctctaaaaaaatctgtacacacccacatgtaaatgaagtatccaattcaaattccggtggaagaattattcatgctccatctataaaggtcctttatttttggtctttttttctttgttagttgttattttttttttttgtttttttt

SEQ ID NO: 114879 - DNA, 3057 bp, Cannabis sativa
  modified_base (33)..(40): a, c, t, g, unknown or other
gatgttaaacaatatacttgtgagtagatctannnnnnnngtaaaataaattccaacattctttaacttacttttataagaatattttttatatagatttagataatccttaattatttagagtaattttagaataataattatgtaatacataagatagatattgttgagcgctaaggatagataaagttagctaaaaaaaaaaagaaatacaaaaaatggtctattgggatttgaacttgtaaccaaaaatatagattgataagtctttaccaatataccaaaatataatctttatataaattaacttctatgattttatttaaatattagaagaaatgtaaaaggatattagtattgcatatttcattgtcgtagaattaataaataaatcataaacattgattctaatacttaacataagaattctattagtttattttaagtaaaatagcaaaattcataacttaaaaaactataaaaatgatactaatatagtacaaaaatacaaacacataatgtaaaatattaataaaaagatagataatatacaagtacttagattaatgtaaatgtgtatttatttaactttttaatttaatttttatttattcttattatatataatttatacttaatttaattatattaataataaaagaatatatatatatatgaaaattatgttaaaacacaaaattgtaaagctaaaaaactaagatcctatggcgtaagttttttcataataatcgacgccataggaaccctatggcgtcgggttttttcataataactgaagccataggattcctctgccgtcggttgttatttaccctacaacatcacctgaaatagcatcggtaccgaatttcgccaaaattgacgctaaaagcccttaaaaatcgcctctaaaacctaattttgtagtagtgatactttatgatagtttaggtaggtaatctacaagcaaataatataaacacttactataccatgagtcaacctgtcttcgcagcaaatgtacatattcgaccagtcttgaagaccattaaaactatagctactctgacaccaacttgtaacgcctactctgataccaagttgtaacgccctattccatagggacgccacgtgtgtgattttataaactactttagtactaataaagtaataattgtattaaaagttttgtgataatattaaaaacttcactaaaataaaacacaaaaaattgacatcataacgatactaaaactgtgtttcggggatccctgttgtaaaagttttacaaaaagactagatacgacaacaagtcaaaatattaaataaaaataaatggcagatacaactttaaaacaactcctcacaactcggcacataggccggtaggatcaatatgtacattgctggagaagactgtcacctcatggctgctctagcttttctttacctttacctgcaccatatagcacccgtgattcacgaggacttggcaagaaaagtaatagcaagaataatataatgcattgatcaaatattgtcatttatactcagataatcaaaaacaaacaattagacattgctcataagataaaatctaaatcaacactgacatctatcacaattaaacgtgtgtgtagatatttggtaatataaaatcattctactaataatagaagatattcatttaataattgttgtcaaaatttttgtaagtttgacacatggaacctaaccaaggaagttgagataacaatcaactggataatgcctcaagctctagctcccgcgaagggcttccacaaaggatactcccgcgcaaagtggggaagtgtggagcattcgcatgccatgatatctcccagtccttggagcggaagccaagcctccaacgaaggctgagagtttccttaagtacgccatgcgggtcgcggaaggactaagaaagttgtatccctgttcagtatcacgggagagcttcgcccgatcagattagactacaaaggagacaaccatgcttatgctggtacaatgccaggttttgtcccccacgccggcccacaatacagggcatgcatgctaacttgtacctgcccaagtgatccaacgaccatttataagggaaattcaaaaagggaaggccttggagttaccgtatgagatgttcggatagtacgagctgacacccctatacaccatgtgatggattggccacttactaaatcaacggtcgaatctgttctagtgagatcaatccagcaagcatgtgaaagaagaaatcacatataaataccattgcatttcgtgagataggagcaacctttgaaacttgaaaaaagttaagaaaaaccatagtctacttataaaaactctactgaaattcctattgagcttcttattcttcaagaggaacgtgagggatacagtgttctagtccataatgtaacttcttgtaacattaactacttgtcgatgaggctaataaaatggaatcttggactaaggatagttaatgcctgaaccacgtaaaaaattgctcatctgttgtttaatatcatttattttcttaagctcttattagtttgtttctaaaaatctcggtaaatattttgctcatttcattgagatctgaggaaagattgaaacatgcacagtgttttccatcacaaatctcaagttgcaagaaggagaacccatccaaaaaaaggaaaaaagacacagcttgactaccaaccgagatctggtcagaactcgaaggctcactgaccaagggcattgtcgacaatgaaggcctacatccctacctaagcgaggagaatggagaagatggatgtaaacaaccttggagttaatgcagtacccaaacacatttgggaaaactcatatccgatcggtcgacactctaaaagcgctgcaggccagtggtgccttcaagcttgggcgccctcctactcacaaaagcgcaaccatgcagaaacggtgagatatgagaaatgttaggttttatgccctaaataaaaccccatttcaatgtaatctattttattcaacatcaat

SEQ ID NO: 114880 - DNA, 3016 bp, Cannabis sativa
aaaaaaaaaaaaaaaaagcccaacctcgagccaatcaagacccgattcatccagacctgaaacccaaaaaatcgaggtcacaaacaggtgggtttagttcatattttctagaacccgaacccaaaaactctaaaaatttacctaatgtgcactcctactaaaagaaattttgaagatgtaactaaataattgtatcgtcaataattatcaagtgaagccatttattatgactcgagtgatattttcaaaaaaaaaaaaagcctagctcaaaccagatctcgacctcgattcaccaaactcgagccaacctgtacttgattcacccggacctaaaacctcaaaaattgagatcacaaacgggtgggtttggttcctattttctaaaattcaaatccgaaaacttgaaaaatttaccactcctagtaaaagaagcttttagagtaattatcaagtgaagccattttttatttaggcaatcgaaccaaatagataataataaaaaaaccttaataacatttgctgaagctctcttttatctagaaggcgattcttattctattctatgttgaagttgaagcctaagccgtagccgccgcactcgctgtcgacgacgatcgaagaagacggaaactctacactcgcagacgatcaaagcgtgtccatacaatcaaaactctttcagtccatcgagcagagagagagggaccaaaggcttcatcatcaattgaaaatggccgacgatgattacaacgaagtcgatatggggttatttctctctttctctcttcatatatataacatcatcttatctgagaacaaactaattcaacgaatcgaatcttttagcgctattttaacttgattgagttagacctgattttgttgaaaactcaagggattagaaagtttgaaccacacaactacaagttcagtctttgattgtagttatgtaaatcttgaagtatgtcatggggttttgcatttatcatgtgtgttcattcagaaaaaagttcactaatttcagtcaaatgtgcaataattttgtgccaaaatgtctttagcttagaacagaatgaatattggtacttgagcatttgataaaagtagtgagcaaatgttatacaaactctctctgttttcaattattttcattacagttacagaactttatgattgtgttaaatgtatgtatcaaatttctgtaattccctccttttttttttttcatggcaaaatagtttaatttccaaatagcagacttctaatatataatatcatttcttttaagaaatggaaaatttaatcttagttaggatctctataaaacaatatgctcaaagttactataattattgattgatgtatgttttagaagcttcatttctaactagtttttgcttgatattctcttattttgattcaatggagatttttttctttgcgaaactatttcaattcatctttactctcaaaaattgttatcagtttcgaatgtagattagttcttcttctctacactcacattttttttaacattaaatttgtagaacttcatctgatgtttggagattgaggtcttaagattgaagttctacgaatttattggaagcactttgttaccaaacattaaaattgaggtcttaaaatttgagatttcttgcttgtacatgaaagtagatgatacgccaaacgataatcataaacgaataaatctccaattttaaatcatacgtcaaaggattaacctctaactcttcatataaaatttggcgcatttgttgtacggttgtgtcaattctaactgtcaacgtcaaattgtcttcggctttataaactcaattaaaactctctacacatcaaacaccatcgtacaagacaacaaaaaacacaatcgatcttgcaatttaaaacaaaaaaaaggtaaattaggataaattgccaaaaatttataaaaaaaaattgataccatattaataatattaagttgtggaatttttgtccgatccacaaactatcgatatcatatcgataatgcacattgcatgtcatacacgtgtacaattagacatttaatgctaattaatttttctcacatttccaatttctattcttagagtgctaattaaaatcttctattacaatttcttcattaatttttttaattaaaaaaaaagttgatttttttttcaatttctcttataatggtgtttgttacgttacaacatcattataataaaattttaaaagattaagaatagtttattgcggaaaacaagtttgaagaatttttaacacatatagtaaaataaaatatcaaaaagcacatgagaacgagaacgagaacatcagtagcagggtcggcccaagcatatagcagtttggaccattgcacaagacaccctatattaaaaggcctcggtttgttatcatcttttacatatattataatatttttttttgataatgtatagtatacatataataaaagttcataactatataaaaaaaccgttaaaatattgtggtcccaatacacatgattttaaaattttcatctattttaaaatttataaagtattttttttttcaaaattgaatttatgtagtattaattaataattgtttttaataaaaggcccaatttttattttttgtccaaggccccaaactgcttgagtcggccctgatcagtatctcatatttttgtaaataaaaatttaatgaatggtaaaaatgttcaaaattcagtaaaaaccgcacttttgtaattgttttaattttgttgggtatttataaatatatctcaaaaattaaaggaataattatataaaacactaattaatttttgtaaaaacatttacacttttaggtttaaagtttttttatatacatatttttatgataatttataaaaatacaaaaaacaataagaaaaacacatgaaaataatataaaaataatatcaaaataacaacaaaacaatataagaaaataatatataattaaatcagattta

SEQ ID NO: 114881 - DNA, 1323 bp, Cannabis sativa
atattataaatataataggatataaaaaaaattaacaaagaaaccattatatctatatttataatcgtttagtaatgatgtttatatatattttaaaactagaaatatttcatattttcgaaatatatttatcacatttaaaaaaatgaacatatttaagtacatacatgacaactggaataattttggctctttcagaaaatgaataaatagtgaagaaaaaaaggaagaaagaatgattattttggcacgttcctgggaataattgtgtatatgtttcctgtgatccttccacagacttatcctttattcaatatttaaaaatctattttagatttctccttttattttacatattatatagatatatatgtttcaccgtcagaaaattatatttaaaaattgaatttactcacgattttcttaaaattatattattctacgttaaagtaattatattattttaaattttctcaaatttttttgttattattttagaaaagggaaagtggactgaaattttccttattctctgctttcgtttcaacaaaagattagttttataactttattataaaaggtgaaggtcgttaacttgattttttgctgattaagttggcaggtacaatcaaagtagtatttttgaagagatcgactattttatttgatgaattaattactcaaaacctctgactattcaaatctctcgtcgttgccaaaataaaatacttttatttttttggaccaaataaataaaatattacttgaataaagggagacttctcaaaaacaaaaaaagagaaataaaaaaaattatggcgtcactatttccaacaatagctaagtttatttaactttgagaaatataggacagtgctaaaactcttgtcatgtgtaatattataattggtccaatttaatattaatttctacttattttattttaataaatattataaaaaattactaatcaattataaaatattatcccatgattttaggcaccctatattaatgctcttttaattttagtcggggaagagattttcttcttgagtcctaaccaagaatttcaaacatgtcaaaatcattgaagttttgggaagcggaaaatgattgttagtgatctttgaaagattagaaaaaccttgcctagtttcttctatctttggttagcgcctttaaatcaaaatttgttctctgtttaaattactaccatttaatatgataagcccttccataatcaatctaatccacaaaaattacaagaggaataaaatgaagtttcaaccttgagttcaagcttttaatccacaaaaatac

SEQ ID NO: 114882 - DNA, 3624 bp, Cannabis sativa
atttatacccagctaaatcaagaacccgaaatagacagttgttaccatctgaacaattaaaacctaaaatatctttgctgacgtggactaatactaacattacgaattccaaacaaaaacactacgaattccagacgcaacttgacataatttatcactacaaaaaatactagttcttacatcatctttcacacattttattcatttttttgcagaacataaactagaggagattcaagaaaagaaatgaatttaatatggactattgtacttttattttttttgtgttgtattatgttgtgttttagactttagacttttaactatatattttaatttgtatggttacacttataatatacttatataataaattagattttattttaccaaaaaaaaaatgcaaagttcgattttgggcagtttgaaccgaccaaaccgtggtttggattggtcgactttaaataagatcctggattggtgggtcagttttcagattgtaccaatccagaccgaaaaccaaaatttagatttttatatgaaaaaaactgaccaaactaactgattcttagccctacctcatggtataatgggttggattcaagttattgaagtccgaacttccattctggagatcccgaagtcaaactgggtgcaaggctagggtctccttccaggtcaactgctatgactcgggtctactctactctgtaacattatcttcatatcacgtgtcaaacattgatgttcacgtcaccagagaaagtttctgggttaacaggtgtcttatacttgttcaatttcttagttagttgtattaggtaagtgctttttgtgtttaattgtcgatttgttgttttacgtaattgagttttaagtttctttttgtcatcagtgtcgaagacagctccagtgactttttcggcgctgatgacaactccgacgatcattgttagttgatttgtttctaaattttattaaaaaaaaatctaaagggtatttaatgtttttataatacaatttttttttaatgccatattttatccaattaagttttcttactatacttattatgtaaactagttttttttcttaccatatttatttatgtaaacagcctccttcagctctagtgcagttttgtcattttaataaattctttttgctcaatgttattttgataagttttgtcattttaattgtaaatttagtgatgtcaaaccaagtgactcagctaataagaggcaatcttctgcatttacttgagtgttatttgaaagaaactaaaaaaagagttgtcttggtggtgtgtattggcaaggaaatatcaaccttagacattgcatcatttggttcaaactcacactgcaattactttctctggtttcatttttagttaccactttctgtggtaatgctacttttttttttttcttcttttgtcccttcttattatttcgtagaaacacaccataaaagtctttaggaccattttatcatttttagtgatacacttgtgccatatttaacatgttttggtgtggtagaccctctattggtggccgagtaagattccttattctaattcaagtcattaaagcagggacaagtatgcaacaaggtcaacatttgattagaatttgtgaccaactaagctgagttgtgatgatgactattatatgtgtgtggtctattgcattatttcttttcatgagtgtgaaattgaaacaaaacatcctgaaattgaggtaatgatgtaacatacaatattgcagcaaagaacattccagaaccagaatggcctatttttcattcttctcttttttgggggaaattaaccatatgggcctgtgatttaaactaaatgggcccccaaaagcacttgtgttttagaattttgacatcgatgttgctatagttgatttatgttatagttttgggtttgaatgattaagagagaaataattgttaatattcaactaattgatatgtgtcggcataataaaaaatgaaagtaaaggaaataagtgtttctaaaatcaagtgttcaaaccgaatatctcacacaaaacagaaataataaaacaaatattgggttcatctcaacggtaacaccacaaatttttataaggggtccctaaccacaaaagaaattgggtatattaaccacattaagaattaactacattgaaaccagattggatcaaattcaatttggaaaaacattaaacaaggcagagcagatctgatccaaaattcaataaatcgaaaaaattaaacggggcggaacagatctaatctaaaattcaataaatattagaatattttagatcgaaagtgatccgttagatcggggcttcaacctgctccaactaaataatctttttgacatgcctaacctggagtaaaggttcataaatgaacaaggtggattataaacaatagctttgatgtagacaatttcagctattatattagtgaatttaaaaaaactttaaatctcactgaatgtaagtataatttactagttgaagcattgattggggtaaatttgttgtatgatagagtttgataaaggtttgatcatttaagtaattttagaaaacattttatttcttgatgtagatatattaaaaaaaaaccttaatgcaagacttggaccccggacttggagcccctaggacctgaattggacccgcccaagattcaaactcggacccggacccaggcccaggactcgggaccggaacaaggacccaaactaaggaccggactcggacacccggacttggacccagattcggacttgaacctaggacccaaacccagactcaaattttggaaaccagatccgaactcaggattggacctgaatgcaagactcgagacccaaacttgtggtcgggacctggacccaagacccgaactcgggaccaaacctagtcctgaacccgggacctggacccagacctaaacctaaatatggaccaggactcaaatccaaatccagacccgaacccggatccggacctagacccaaaccacggacctgaacccgaacccggatccggacctagacacaaaccacggacctgaacccgaacccgaactcatatccgaacccaggactcaggactcgagacgtggactcggacccaaactcaatctattaatacaagtcaatatcaaatataatattgtattaaataatactaatacaaaattaaaatagatataaagttataaatttagatataaaattaaaattctttttttaaaaataagtcgggtcaaatctgatccgatccaaatatgtgatctagcagagcgaggcggggcaaatccttacatgatctaattcaggtcagatcatagccgaatcagatccgaatggatttatttacactcctactccagctaaaatcactctttttagttcttctactaaacaaggttttatttttgcatatgcttcttcttcttctgtcttagtgtttgtccaacacacaagaaagttactcagtgttgcgatattttgcacacgcaagtgtacgtatcgttataagtagtaaactcaccaggagtgaggtcgatcccacggggagtgtagttaagtacgttaaa

SEQ ID NO: 114883 - DNA, 1796 bp, Cannabis sativa
ttttgtttttgttttaagatactttacacccaaagaggaaaagaacatcaacagcgaaagtatgggatgtcgaatcagagcaagaggagcactctctttcgctttctcatagttcctctccatcattatctgatcaagaacagaccacgactcaaagagccgctgattcagttaccggttctcaaggatttaatttgttcaagcaactaaacgagactccaaacaatgacaaatctcgaaatgtttcaagtagacagaaagagtcgataaacgctgtacaaaggacttcaaaagatcaccttttaggggaatgtcaatcccagactaataatggtcacttgggtagaaataacactcacttcttagatccagggtcaaatcagcacccggtaaattttcgctaggcatttattgttcttgtgttcttttgattagttctgcttctcatatactctctttgtccatagattggagctgaggttcgaggaaaagtcgatggagtattcgactcgggttatttaatgactgcaactgttaatggaaagctattcagaggagtcttgtttgcaccagtaatcttcaaaagcccaatgccaatcatatattatgctcaaagtttaaatctttacactgaaaaaaactcatctttttactttaaacttttttaagcagggacttggagtcatcccaagaggaccggctctcgctcaaaacccacacacggctgcaactcagcagtttcctagctcgcctcacactgaaccgcgctataggcttttccagcaaccgacgaagaactcaagtccaagatctgctcaaagcttcccacaagctcatcaaatggctagaccatttcctgtggttagacctactccttcttcaactttgcccaaagaatcaccaagccttagaagtgatcttcaaggtgtgattttaacactaggaggacccggaagcagccaacattagatgaaagttttcatcttttttctgcttcattcaagttttgtaaatcatgggatatgtttagtccattttgggctttttgtgttcttgtagagagttaggtaagttagttggtcttagtaatttatctaatttttgtatttagttggctgttatttatgttttgtgaatgtaatgtatttttatgagctttttcatccattacttttcacaatgataatgcactaaggaaaattgcaattgaattttttttttcttgtggaatggttatccataaagtttatccaaataatatgccactatctattttttaaaaatatatacattgaaagtgtatatgtaataattatcccattttggtgaattgtcctaatcaaattatataaaatgtcttgaatataaagtaatgtgatatgtatatatatgtgaataaatacattccatctatttttgtcttactagaaaggaaatcatataatacgctaccgtgtccagattttatgcactatttcatatttactatttgattgttatatgatatgacatttcatattgcttatctcaagataataataaaatctcacctcaaaaaataataaatacacataataaatacgtacatagtgatatgaattatggtcagtgttaaataaaagaaaatatatatagagtgattctactatgtattttctttattaaaaaagatgtacggatatattctctacttgaatcaggttagctcaagtggccatagatgggtgtgtgtgttagaggtcttgggttggagtctcagtaaaacatgattgtaatatataaacgcttaaaaaaaa

SEQ ID NO: 114884 - DNA, 2834 bp, Cannabis sativa
  modified_base (50)..(54): a, c, t, g, unknown or other
  modified_base (1754)..(1773): a, c, t, g, unknown or other
tttttattgtcactaaaagtcacattaagtcacaaaaaatttatgttgtnnnnnaaaaattatcactaaaagtagcagttttttatagtgtttgtacatgtcatgctaacccgactcatatttatttatgttttttaaaatacgagttttgttgttccatgccacagaaaaatatgggatgtgtcgtgccaatatttttaaacagtaggcccagcacagcccataagcccgatattttcatatcgtgctcggattcgtgttgtgatttactcgtgtcagcccgtatttcttaaataggccatcctattcttatatccaggctcgaattcgtgcttttatttttatattaatttttttataattactaaactatatgtatattttataactttagctatatttatataacttctcaataatattttacagataatcatatacaaaaattattagcattattagaaattgaatatttacttataaatactcaagtttttatattacactttataaataaattgatatacttttggtattacatgttttaatagttttggaatcccaaaacctcgagatcttcgatgaaacaatttggtggtcctaaatataaaatccccaaaccccaagacttttagatatgagatccctaatgcccagatctgacgattctccattttttatgtgttctctatttctctctcgctctttctcttttctctgcgggtttacagcttttggcattctcatcgtgatttggatggtgtttggcgttctttgtagatggacaatgttctcgtcgtgatttgaacaacatttggccttttctatagataaatcttgcaccgccaagaagggtattgaagctttcagtttaggtgggcacgatgtggttactgggaacatcaacgaaattgtagaggggtacaataaaaggaaggttacatcgagggattacagggtttggatattgacggaaagaatgatggtattgatgatgaggttggggaagatgaagataaacccattgaaggttatgtttgatactctgtttgtctcttttctttaggaaatttaaattttggtaattaggtttaaaacggatgtggtttaaaatctgctctataaatttaaatatgtatatatttgtgtcttattatgtagtatatgtatttttttttcaaatctgttatttctctctctctcccttatctaccttgagagagatataccagatgaattggtttaggaagatgagaacaaagtggattacattcttgatttgattcgggcatcgtaagttaggtttgttgagccattctcgaaggtggaaagcgattttgggttatgctagacatgatcgatagtttttggctattcatggtaatttctaatatgctttcagggtttgtggttgttcgtggtcactgactaagaatagataagtttcaatgacgacaaaagcttgaggtagccttagcagttctatttcttgttgtgatagcagtttcagacgatggtgcaccaaaatgtagcggcgtacattgtgggatagagggatagcaattatactcattttggccgagtttgttgcgattaaacttttttatttgttttgttgcagttatactagttttggctgagttttatacatgttaatttattagtattttttttattaacgaccacttattattattattattattattattataagagatacttaatagccttttattattattattattatnnnnnnnnnnnnnnnnnnnnttattattatttatttaatttttttttaaaaaaaatctattgtgttattggtaaagtgtatcacgttattttaatttttctagtttatatttggttattatatatggaggagttcttcactacattttgagacacttatatggataaatttttttcttttagtttgtaattaatactctcatggtaaatatttacttttacaaggactaattattgattttgttgttattgtagggagtttcacaatcatttaagtagatgcaatagaactaatgatagttctagattgtcagttattcacgttggagttgttacattaaagtcattcaagcagaatcattagcattattggtagttatgggttggtctctcacactcccctcttgattttgtggagtctaattgtttagctttggttcttactttttctaagtgctcttccttttgtaatgagctagattttttattagatatttttgctagtttacgttttaattttcttaaggcatctctagttcatgtttgtgccataaattagcagtacatgcctagaaagccctcatcatctgaagaaactcctcctcacttccctcattggcaactcctttgccctttccctcaacggcagctggatggacaggtcaggcagcttgtttttcttcagaccttatcaccattgggatctccccccaaggaagtgccctactcatgtctctttgaaaagccctctccctcttggtttccttcctcttctcgggaatcttatcagagggagcctccgcctcaggctatttcctcttagtccctttctttttcttagggaccttactaaggggagcagaaggcttgttcgtaggatacaagttgtacttaataaagttctccttttgtggcaagggtagagatattacgcatgttagcaagcaaggaaaggatgtggttggccctaccctaagcttcaaggtggggattattgggattttataccctaaataaaacccatttcaatacaatctgatttattatcaatagaagattagaaattatttatgtttacatgt

SEQ ID NO: 114885 - DNA, 1581 bp, Cannabis sativa
tgacagtatttttgtaaaaaattagcaaaagttagtataccatgtaaatttctctattcttattgtgattaaaactaaattaatgataacttataaattcactggattcactcagcttactttaagaattgggggagttatgaagctccagaagactctattaggtagctggtgttgaaaaaaagtagtgattattaaaaatttgattaagcaaaacatgagcttaacatatttcaaaggtatgaaatttattttacttttaaataatgtatgttaagaaatgttaattggtttttagatgctatattgttctttggtttatttttaagatagaaaataaaataaaataaaaataaaataaaaagtttgactactttgtgaataggttaatttttttttaatttttgcttttgtatttcacactatagtcattgtatgttatttattttagattgtattgttatttggttttttttaagaaaaaaaaatacatttcaaaatattaagtgtgaatatatcttgaatattaagtttgcaattacattattatgatatcttcaagcgtcaattatattaaattattagaactaacatattgcaatcagtatttaattattttatattgcaacaccatcatttaaatatttgaatataaataaaaattactccacccaatgaataaaaataaatttttcttgaataaatcactttattaaaaaaaaattcaattagactataataataaattaaattatatgattatttattgaatcattttcattatattataaaacattagtaaaaaaattctaacatggatgaaagttcaatgggcatgatttagtacatatcaaagtttgagaggcatgatttgatagatatcaaagtctggggagcatggtttagtgaataaacaatcactgaaacagtaaaattgaatcaaattagacaaaagtccttaaatttaacaatcttaatagtttggggggaatttttaacatcttaaaaagtttaggggcacgatttactacatgtcaaagttcagggggaaaaattacaaattagcttttaaataatattgttttttttttttaaacaaaataatattgtttaaccagttggtatgatctatagttgtccttttctagggttggctctggcctatgagagacttacgcctacgcttattttgtaggaggagccaaattaaaaaaataataaatatacatattttttttgataattttaaaaaaaaatattatttatttttataaaaatgaaccaaaaagaattacatttcttagaaaattaactgagcaccggcggtcaagtccttttcactgttagggaagacaattattccaaaacatatatcaaccaaaaagcaaagtcatgatgaattattacattcttcatgtcaactattagatcacaatacattcaatgaacgattaggttcatgcaaatcattgttaccttatatttactataagtagaagttttatgggttaatttcataaatacacaaaaataataaaaatacaataaaaatatagtttcatggaattttaaatattttta

SEQ ID NO: 114886 - DNA, 2539 bp, Cannabis sativa
  modified_base (2502)..(2504): a, c, t, g, unknown or other
atgtattttgaaagatatagtagaaaaatttattagagtaatttaataagagcacggagcttttgaggatcaagttgagatatattaatttcagtaatttataaataaataaatgaatatataaaaattgtagaatattatttcagaacaagtagttaaatatcccatatctcaaggtcttggcaaagaatattatattatatcgtttagaacaatgaaaagtgtaataaggcttggcaaatggcaaatgcatgcgtactatctaacacatatatacagccaacacaaatattagacgaccttgctttagtccggtattcccaaagaaattattacaaaatgtaacaaagctaactacgagatcgagcaacataaatatcttccttcccactatatatatagtagagtttctcagtgtttcttattcaatattttcacctttttatttgttcgtttggcaagtgaaaatgtctccaacgaaggactattctcaccaaaatggaagacttatgacgtgtcgtgatcagacggtggccgcagatacgaatgagagtgaagactatgatgatcttttacgattattgaatagaagtaggcccttaaatatagagaggaatatatcattggttgaaataaggcctttcttcggtgaaatgtcatccaccacaaacactagtacccaatattattataataattgtcatcacaacagaaataataaccatcatcatcatgtatcttctcctgtgagaagatctggttttagtacccccagatccaacggttactatgagtcacatcccattattgccgatgcctgggaaaacttgaggagatcattggttcacttccgtggtcaacctgttggaactcttgctgctcttgaccattccaaagacgaacttaactatgatcaggttacttatattataattctcttttttaattaccaaatatattaattaatgttggaatcaattttactatatagactttgttctttgtttatttgttttaatttccactaaaacatgtttatttttttttttattaaagaattctaacttagaattttctaattagaatcttgctatgtaacaaaagtacatacaacatcaaattaattattcatataataaacccaatgtgggtggatttttacgagttcaattctgctgagcaaattttgataaaataattaattatgttctaacaaattattgtaaaacctagaaaattaataagcaattatttgtaaacagaggatattgagcaaagatttgttttgtaaacagagcaaccgcccatctttagacattccatttttttttatatcacgtgttaaatgttactttttttatttaaatattattttggaatttgtattttgcaaaaattatccctaagacttttatttgttactaaatttcttaaaccacaatagtacataacaatttttgtcaattttatttattattttcataaaaaaaaaacttgaatataagcaattagttctattatcaaatattaaacgaatgaccatgtttaaacataggtgtttgttagagattttgtgccaagtgcattggcgtttctgatgaatggagaggaagaagtagtgagaaattttcttctaaagacactaaggctccaatcatgggagaaaatagtggaccagttcaagttaggagaaggagtaatgccagcaagtttcaaagtgttacatgatcctgtaagaaactctgagactatatttgctgattttggtgagagtgcaataggaagagtggccccaattgattctggattttggtggattatattacttcgtgcttacacaaaatccacaggagactcctccttggctgatatgccacagtgccaaaatggtattcgccttattctaagcatatgcttatcagaaggcttcgacacttttccaactctcttatgcgcggatggatgttgtatgattgatcgcagaatggtacgtatataagttatatcatatatggcggtattcattataattagagtacgcttgctttttatacgtcttcaaaaaatttgcaataagtttggattttgttttcaacaccacaaactattccattttttgtaaaaatatatattgtatatatatgtttgctagctacaacaaacactatcatcacttaaaaaaactttttaaataggagctagcgtacagtcgcacagtagattcacacaaaaaaatacatattttttatcgtgggcctattatgaatttagaaaatttctaaaacacatcaatagtgcttattgaacaatattgtccacattaattgaatgtaaaaatattaaactattaattattttatttattactcatttattttgagttggaatctataatttttgtgatggaattagagtgatacttgattcaagtactagtaaaatatatattgggcttttttcataaatgtacaacaaaaataaaataattacaaaaaatgtgcnnnaaaaaattattttaaaaatttatacattttgaaaa

SEQ ID NO: 114887 - DNA, 3468 bp, Cannabis sativa
  modified_base (95)..(104): a, c, t, g, unknown or other
cacccactgtaaggtttctcataacttttatgtgtttaaattaaattgtttaaaaattcatattaggatgttaaaaacatacatggtagtaaatnnnnnnnnnngtaaaatatattccaacaatttctttccttatgtgaataacgttctcttctatgcgacttggacggctgacttttcccatgtgttctccttgacccactaatttatgtgctcgatcctgtctctcgatgttaatctcaagttggccttcgcctttcaaagacatttacaacacaatctctactcaggtaagtgtacatactgcctctttcatttcagtttggacctcacgaaggacgtggagggcaatctgatctattcattgggtgctcatctagatctcaaattttttcgtcgagtttgtccaatattcgcattcctgcaagacaacttagggtcatcgagtcgtgtttgcctgttattttcattcctgcaagttagctcgaggttatcaggtcatgtttgcctcgtgtttgtattattgggattttgaggattttctctgtgtattagaatttccctagtattccctggttgttcttcttggggattcgtagggtttccttgaacattctcttccacaagtatatccttattccttctagtccttgacccacacgaccttcctcaatgacgtctggtagtgcatctagctggtgcaacctctctttctttctctgaattccttcggttagattctgctaatttttatcggagttgcctattctcaagttccactaatggaatatagcgtgtaggatcgtatgcatcctagttatgtctctttaggatctcatcaattgtttcttttgccatcccattcagtagagtctctcctagcgttttgattcttagtggtattcgctccatgagttctctgagtttcttttcgaggacgctggattgtttctcttggatgatcattgttgtcatgagaagaattttccctagttgggaaaaagacccaaataatattcaaaagaaatgcgtttgtcagatttttttttttcaaaaagctctcaatgaaagcaccaaactgttaacatagattttcgttaactaaaatactaaacctttttgacaaataatctatacttaaatcaatatgaataataaagacaaagagatttttacgtagttttgaatttaaattttcatagtccacgaatatatcttatttctaatttttgaattatataaaatacaagaataatatgatggttatacaagaatggttctcctcctctccccttgacctttctttggttttgggacccctcccttatttataggattttagaaattacagttattcctctttgatcttaactttgtaattattcatgaaacgtgaataattctcacgttttatatttacaacatgtcagataaattaaataacttgtaattgtttttattcttatctgaaacaattatttttctgagaggacatacttgttgcttgccttacgcattatggtgacaagatgacttatgcgagacaattgcttaaacattcttctcgcattagtcgttcatgattaagattggaaacttcttatataagctttagaataagcttttaagatatctcttgtgctccttacattggaaaccttcacaacattttttactcatatccttagttaactaaagaaagatttaaacacgtctacgattagtattctccgaggcgagttagccaaccttccatatttttataactacgagcaggttattgtccaattcttatattcgtgtcgtggctatattactgctcgaaatataagcatatagattctaaattatttaataattactttttacactaaattttacatgccatccttgtgaagatgattcatttgtgattatgtactcttttttttttttttcgaataaaacttatgtttcaatagataagcaataaatacaaagcaaaagcaagttacataaaaggtagagaattattccaaactaacttattatctagtcttaaacctaacttagcaaccttacgagccacagtatttacatctctactataacatgactaataggtaagttaggactgaacgataacaagttcttaatacaacctaaaattttatcaagagaactattattccaggtacaaaatttaagtttatccacaatgatttaagtttgtgactatgtactcctgtacattataattttcacgacaatatgtaagattaattatgtcaaaagggaaataaatctaattttatatttctttcattttgccaagattgagcaaatttaatacttgaattcaccacaaagcaatgcagaaacttaattcttcattattattattattttcttttaagaaattcaaccgtatttttaacataaaagaagaaagtaaacatgttaatttgctaaagaaaatatttttgcatagtaaattatctaaattgtagaaacattgtagtttggtcatgagcactactactagcactttgaaggctatcatatgaaacctaaaaactacagctaataagaagtcaaagggagagtaacaattctgagatagtgaagattcatatgcagtcaaatccaaatagagtgagattaatttatatagagtcaaaatgcattgttaccaccacggtcacaaccactgccaccgccatcagtatgcatcattgcatcaatttggtcatcatctttcatcttcagctacatagtgaaaatccgtgcatcaacactttattaaatcagatctattaccatatcaattagttgcacaattttgacgacttaattaagaaaaatagttcaataagttgaatgattctattaaaattccattaagaaagaaaaaaaaaataagaaaaaaagaaaataaaaaaataaaaaaattattttttataatttatctatttttataatttttaaattcttttttataattttttaattattttttaaaaaaaaaaacgaaaaagaaaaagaaaaaaaaaagtaaaaaaaaaatattttaaattttttttctaattttttaaatttttttaaaatatttataattattttgtaaaaataatattacatggaccactaaaaacttgccacgtatacaagtgtacatgtggacagtccacagtggcactggtttttgtggttgagtatgacaaaacgtaaagttcaagtgatttaaccgccaatatctcatgatatttatttgtaaaaatattttttttactattttaattataaattattgtaaatccatatataaataaaattccttgcaaaaaaactctttcggttttataaaaacaacattttggaaattttctatcaagaacatatagatgctataaaattcatcaatatatatatatatgttataaattttaaagggaaatttgattttatatacttaaaagattaaaaaaa

SEQ ID NO: 114888 - DNA, 1888 bp, Cannabis sativa
ttactaaatctgacctctcattcaactactgcctttgtggttgtgctctctcatgggtgcagaagttttactggtttgaattgtttttaatacaatgttgacattccttttaagctttttcctttactctcatgcaggacaagggtatttatggcgactgtactctcatggatctacctagaggcagaggtgtgcagtttccatttgctgtaacagaccgagtcatcataaaggttagaatagcctgaagcttagtatctatttgtattcgatgttacttatggtaatttattatttatgtgtaaatggttccaggggaacaagaggacaccacagcgctttgtgggacgtgaggctgttgtaacaacacagtgcttaaatggatggttagtcatttgttctgttatgttgatgtttagttaactttaatcaaagatgctacttgtacctaacttaagattattattcattcttattccacttgaaaattgtgtgcacaaactcccctttaatagtagatattaattctgaaccccagaccatggagctggacaaaagactaggaagaatttttccctcattactagtagacacttgacatggatttttttttttgaaaaatatacaacaaatatgacgtagaagcttgtgtgaattatgcattagataaagaactcaagctcgtgtatgtacgtataccaatatatggagaaactgtaggcttattactggtattgtacaggtacgtggtaaaaacattggacaatgcagagagtgtgaaattacaatatcgctcattagctaaggtttcagatgaccccataccgaagcccatgtcaagcaagatggtacctaactggctctagacatacagcaaataacaatatggtaaagattagggctttcattcacactcagctgcaaatctgccatgtttaagttgcttttactaactgtatttgttttaggttcctatttttcctgttgtatttctcacaaagcaaacagggtgtattgtccaaggccttgtaaattatagaagccttgtcatatttgctttgaaggaacctagaaatgagaattagataggaagaaaatttgtaatctgttctgttttgaaacattcgagcagcgttatatttgagtatagctcctgtaaaaattgcataaagcttatgtaatcattttttggtttatacgatccagtggccggtgatgtttctgcccagttcgtttccttcaaatctatactcttgcctttttttttttcaagtgtcatatgttataatccttgagcttcaataaggtccactatgaacactcttacaagaagaggttcatgctttttcccattcattttttaattgaataactatgaattctgtttttgaattattccttccttcaaatcgtgcttttgataacaaaaatttctaaatcattactattaaattgtgcttctgtgtttaagtctaaaatttatgagcatgttttggtagttgcatgacataatttggtagtggtagtaatttttggagaattttcaataagtacgtaattaaaggtaacagttttaaattggtaataggttggggtaaatttctttttttattagctgttattttttttgtttgtcataaggtgaacttaattttaacattgtagtatatgttatatcctatgggagagcatacgtaaatatattatttttcttagttagcttgcgctaattataaatggaaaattcgatttaactaaaattaataagtgaaattaaaaagttgataaaaatggtagggtgggtctatttttgggtatacttgaaattattcttagaatatattagctatattaattgtatttagttagggaaaattctacaatgcac

SEQ ID NO: 114889 - DNA, 1245 bp, Cannabis sativa
aagggattgattaggtgtatcaattattttgacagaaaattagtttacgatactatttagtactattttagaaaatacgatgttcaatttattatttatcaaaataaaaaatttaatcaataatttttataaaatacaaggtcaaaaataatatttactcttttattattttaacataataactaattttattacactttttaatgtagttaaaatactactatgaaaatatcgtggggtttaaaagatttaaaccctcataacagaaaagataatctttaggattatccttccctttcaaatattaactaattcaaaatagccctgattaggtactaacagaagttttagaaatataacttatgtattattatcatcaaaaattaaacttacgcatttatttgcaactaaaagttaaatttaggttacgctgcaaaactacataaatattggcagtaaaatcacatgaattatatgatttatcacatttaaccttataaaccaatttttcacggtaaaatcctccaaaccctcattctgcttggctatttactaaagcttatgttaagtgtcacagtaaactatcccatttcatttagggacaaaaaatattctccatccccgtcgcgttccccatttaaataagaaattcctatccatttaagggcaggtctcagggccctatccccatgagaaaaatgtacattcctaactatatagcgtttatacaaatttttaaaatgatatccatcttaatattttaccacctaatatgtctaccttatcctttaaatttttaccataaaagatgctcttagtaatcaaaaatgagaactaatgttataaagaaattaaaatcaggagactaattttttttttaattaagactaacttactaaaatatgtataattagggacctgttgacaaataaacttttggattagggcagttagtaaatatgagcctctaatcttccaaagagaatcagctctctctggctacgagccacttcacaggtggaagagattctaggtacggaaccgctgaataaaagacacgtgtcactaagaatatttgcttaaacaggctcggctcatagaatgtagcctagccgccaagccgagtttatttatcgtccccaactttgagtttgagcctatttattaattaatataaaataaattcaattaaataatattgggaagaagagattagataacagcaacatctctacatatatatat

SEQ ID NO: 114890 - DNA, 2573 bp, Cannabis sativa
aaaatgctccaaacataattaaaactcaattaaaaatatactaaatttaatctaaaattaatactaaaaataacctaacaagtgcaggtggaaattagggttacatggaaaaaaaaaaggtaaaagaaagagttgaagaggaaaaaagaaaaagaaaaaaaattactttgaattattttttgtaatttttaaattattttttaaaatatttaatcaattaaaattatgtagaccactaaaaattttgtgtacattgtggcatgtccaccatggcagttaacagattcttttagacggaatgggtaaatagcaaatagaagtgagatttagagggttttactaccaaaaaatcagtttatgtagttaaatgtcactaatcatagagttcagattcttttgccgccaatatcccccacttttaaatttaccacgtgtacacttatgtacactgtggtatgtacaccatgacacttaacaaagccttttgaacgaaataggtaaataactaacagaagtgagattcgaaggattttaccacaaaaaatttggttatgtggttaaatataactaatcataaagtttagataattttactgctaatatcccttatcaaaactttgcactatatttttcttttcattaatcattacaacatcacacattattttatttttaattatttattgcttttattatattttattaatattttatgttcaatttttatttcataaaactttacactattttacttatttcatttttttcaaaccactattatgtttttctttccttaacattctacattaaacatcatttattttttacttttactcgacatttaaaagttaaaatttaaaatttaaactaaaactaaacatatgtgcattatacctaacaataatctaatgtgtatatatatatatatatatgaaaaattgagagtaaaactaaacataataaaataattaaattaataatttgattgaatttcaaataattttcttaaatagttaacactacttttataaaatttgcctaaaactttttggccttaatttgtacacaaatatgtaaacaaaaacaaataagatttaaaatttattaattcatttggtaagtccacaattaatatttgcacatgttggtgttgcttgcattactagttaaccaatgttcttcatatgagatattgttctcttaccaaaccttaattatacacatttctttgttttgttttttttcttcttcttctatttatattatctaaaataaactaaaaatatataaaaattcaaaattttgctaagtacaacaaaataatagctcatgtacttgtgattctttaatcaatacaaccatcataaaaatgatgaatacatacggaagaagtacattttatcatggaagaaattatatataaattgcaaaaaatcagtcacttatcatcataaattaatcaccaaataaattagggcaaaaaaattagttaaagttatccatcatgaatgcatgtatgtagttagaaatctttccattactatacttgactttcctaaacatatggaacaatcaatgagaaatccaaaataccattaagaagtcccatttgtaaaggaaattatgtaataaaaacatttatagcacatgcatatgtgtgtctatatttatatatatgctaattaacttcttcacaataatcaatcccaaatttggttaaaggccaaaacttttgtctcatctaaatttggaagcaatgtttggaaacagtgttattgtaacaacccatttgttcctccttaaattatgaacccttgtatgtctcttgatataacattttcttctcttatatatagcttgttaaatgatccaactgtaaatgtttgaaagttaacatagaattattagtgtgtgattgaggcacaaggaaaacgtttcatttgactaaagccattatggttgcatgcatgtgcaaactcttataactaggaaaatatactagttttggtccttgttttaactagggttagcagcaatttaatattataatgataattgatttatatttaggcagttcctaaattataggatacaatattttactaagttttaatgattgatagctagatagagtattaaacaattgtaagtaatgccattggtaagatcccttaagtttgtagtcccattattcaacggaatattaattagttgatgtgatttagctaattaattagcttgttttaatatttaaggtgtgtttgcttggagtaatagagttttcgttttttgaaattttacatgtattaaattatgcatcttaaactttttaggtcattaaaaaaattctaccgaactattaagattgttgaatttaaaaaattttgtccaattttaataacggaagcctaacgtggatgaaagtttaaggagtaggatttgataaatatcaaagttcaggttatagagtttggtagatatcaaagttcgagagacatgatttagtatgtggacaatcgacgagttagtaaaattgaacagaattggacagaagtccttgaatctaacaatct

SEQ ID NO: 114891 - DNA, 3080 bp, Cannabis sativa
atcattaattccaacaagatagacaagatagagcatagagcaagaacagtgaaatcgacgttaaaaaagtaaattatgaacaacaaccgtaaaataacactaaaagaaacaaaaaaaactaaaaaataaatatagtatactgcagtatgaaacttataaaaatacacaataaaaaagtaaaaaataccgtctcacagtattttcgtaaaaaatgacaaaagttagtatactatctaaatttcccaaaacaaaattgagtagactaaactcaggtacttacgatggcccaaactctacagcgttagagaccgaagagccggcccacgtataaaatgctcaattccaacctccacaaaatcgtccccaaaatcagagttagggttagggtttaaggcattcgtccaaaaaagtcaaggggattgattcagtctgttttttacgagccatggcaacggcgaccacgaacgttactggaaccgtcacagaaaagagaaaaccggtcttcaagaaggtggacacccttaaaccaggcacgaccggccacaccttaaccgtcaaggtggtcagttccaagaccgtgaaggttggaagcaaggctaccggacggtcgacggcgatgctcatgggtcgccctacgcaaccttcgcggatcgctgagtgcctcgtcggtgacgagactgggactatcttatttacggctcgtaacgaacaaggtcaatgagttttctatggctacctctgctttagttattgattccttgatacggttttcagaaatttatcttctttcctttttgctatatgggattttcgaatttatgtgtttagttttagttttcaccgcgttcgagttatggtctttgataaattaatcttctcagcctaatgcactattgggtacccagaaatttgggccactctttaatgtctgagttgaactatacccactgaattgaaggcatcattttaagaatcagaaatgatatatatgactaatgtttttttttcttttttgtttttttttttgagatacaataacaatatataactatagttgaaccctgtaaagttttggataactaaaattaaaagtctagctaggtttgaacccttagggccaaactactaatgttattaggtgatttgggtttgttgtggatgaaatgatatggattggtgtattgcaagtagtcatctaatcaatgcagattttatatatgaattggcttatgcagtggatatgatgacgcctggggctaccatcaacctacgtaatgcaaagattgacatgttcaaggggacaatgaggctagcagttgacaaatggggacgtgttgaagtaactgaaccagctgactttgaagtgaaggaggacaataatctttccttggttgaatatgaattagttaatgttgataactaataatttaatgtctagagtgagagtgaacggtatattgtgggagtgaatattttttaagattgctgaaaagatggatttgtgtttcttacctttaacggttaactggggttggttgccatttttatatatgatttacccaaattttgttgaagatgttatatttatcaatgcaaaaggaagtctcatcttcactgatgattttatgagttgacatattaccgatttgtagaatgtaaacaagactgtttgctttactatcttgtaaatcttaatccaatttacatgtggactgatggggtctttactaacaatcaataattaaacttccatttaacaattactattctgtttcttccaattcaagtaatgcataatgtatctccatacgagtaaatccaattgatacaaatgttggatcacacaatttcagtgcgattttagaagtgtaaagtgttggatttgtattattagggatataaatgtagtttatgatacaatgtgttgcttatggtgtgaacatagattggtaaccttatttccggccttggatcatattagaaggaatattttgcattggtagcattattaggctttgtcacattttcgtcgtcaatcaatactagttgggcgaaccacatttttatatgaagtgaaattaaaaggtgtgataataacatttttatataattattattattagtttgtagtatttaaataattagattttaaaaaataaaaatatattatttatacttcagctaaaaaataccatagtttaaattaattataagaactttaatatatgataaatataattgagtaaactttgaataaaataataatatagtataaattttaaacatcaacttcaatatccaaatacaataaaaattattaactataaagtctaagttttaagttaaacactaaaatgtctaaactttaaatataaaataatttaactaataaatgtaatttatgtaatatattatacatatttttattaaaaaatatataaatcattttaattcggtttataattcggtttattcgagcggtttattcgagttaattgagcggttgttaattgagcggtttaaattgagcggtttagaatagagcggtttagaataatttataaaccactcaatatattcattggccggtttggatttttattgtattattttggatagtattttttatcgatttattaaatttagtttgagcgatttattcggattggaaggtttgtaaattttattaaacacccctattaatatttatatatatttcgtcgttttttatatataaaaaaaaagcatttggaactttttatgattcacaaataataatttttgatgaacagaaaagggaaagaatcttcgaaggtggtttttgacacacatactaaaaaacaaaaatggtgcccttttgatataaatattttttttttgaattctagcataattcctaaactgcgtattaaattaaattattaataatacagccaacagaattgaaagtcatattcagtttctttccttaaaaaagaatctattcatatgcagctgttgcactcattaaacaaaaaacaaatctcttttgtgtgcaataccactcaacacaaaagaaaagaaaagaaaatggagattaa

SEQ ID NO: 114892 - DNA, 4462 bp, Cannabis sativa
aagtatcataactaaccagccccctcttaagcaagccacctaaagccacctaagtatttagatcccctaacataagtatatgataggaagtctaacacaagtaaatgactaaatacacactaaaaaggtgagacgtgtaagccccaaaaaacacaaaaacaagagcaacataattacaagtcctggtgtgtagctaaatcagaaaactaacaattacaaaaaagtagaatgcagtttaaatttacaactgtcttaacctgataagctgatgggttttcttcttctccgcttggtcccttgaatggaagaagcttagccttaggcttctccaaagaaaacacaacaggaatgccaccctcaatcccataagttttcttcaaacgatgtcttacctgaaagttaaaatattaatgaggatttgtagaccaatacttttccacctccctataaaagtagtgcatataaaagaatgtgaaaattgccctcaaatgtttcattttcagattaaagaaagaatactactaataagtaaactttatcagtagcaaattaaactaattacacaataataatttcccaaagttaaatataaaatcactgatcattgaactcagacatagaactgtaggtatctttgcttttacataatgcactgccacttcctaacaagatcagagcaacaaaaaatgaaattaaagccaattcagtttaccttgcaaaccttgcactccaattcagtttacaaacataagaaagctctcatttatccttatcattatactagacagccactcaagacagagcaacaaaaaacaaaattaaatcaacctttgaaggatattacatacatggtactgttctccctaataataccactgaaaaccaaataaaatccattaaaacagaaaatgtttaagcaagaagagaaaatagcggcagagacattacagaacgtgataatggatcatttgttgattccctcagatcagccacgcgtattcttgtaggatcagctctagcaccagctcccattgctgataagactttcaaaccccgacgcacacatgctgcaagaagtgcaacctaaacatacacacatgaagatataaaaattgatagagcaactcaattcatttctcttttatagatctgtgtagagaatggtggtaaaatttgtaaagctagtgtcatgtgactctacttttcatttccatacatcgttttgtattttatttttatttttatttttatacttcgtattttccccaaatttgaaataatatttttctctgccataagtgaggaattataaataacttgggaggggtcggtctaagacatatgacatctatttcttcaaaaaaaaaaatcatttttctttagaggagaaacaattttttatttttttttttgaaaagagaaagaggtcacttagatcggtccccactcaaatttattgacaacctcacttgtggcggagaaaaatcgtggtaacaataatttatagcacaattagctaaatacaaaaactcaaaacaaactttgcacttaatcctagtacgtcaaaatattccattctacataaatctaagaatgaaaaatcctcaaaatgtttagtcttaaaaacccaagaaactatccaaaacctgattttctctcagaaatgtttagaggaaaccatatagacatactaaaagaaaaaggagtacaaaactagaaggaaaattccccacgctaaaaaaacaaaaatgttcaaaaaaggttaatctaaaagtatattacaagcataatacccgtaatttattttgcatctttcactttaatatggaaatctcacgtcccatttgagcatggtggaaggtttgagtcattttgcaccttttctttatttgaaaaactatgccctatcaaagtgtttggggttgttggcatagagaaaccttcatactcaaaaaaatatccagcataagaaagctttcctatatgttagaatatattagccgaacaatagttgaaaatgagctaattacttagttttctattctcttacttagtttcctagtttagactccctaattttgtataaatacatgtcatttgcttgaataaaagatacaagttcattcaccattttatacatggtatcagagcatctcttaaaattgagattcgaaattcaaaattagagttcatctcaaaattagaattttttttagagtttgatattttttagggtttctttatcaaagagtggttccttgttctcaccgcctgtccacagaaaaatcccacctaccactctgcctgtcgtcgaactttggtgcccaaaagccctgcaagtgagccacatgcaccgccgtcctccgctatgaaagctcccacacgctggcacgtgagagcaagtgcttatgactctagtggtcagttttggttcggtcgttcacttctagtttttcagtcgttcagtgctcatgtttttcaatcacttttccagatttatggctcacaaggtttagttctcctagtgttgggctttcgatccttttgttagtctctttatttttttgttctcttattggattttggttgtgagattttgattgatggctcgctatctcagtttgttcccaacttttatctgaatttgtttgcttctttatcggatttggatgttggtttgttgtttgagttagtttggtgggacgaacatagtatttataatggcttctaaaagactagttcttgtttttgcagatgaatatgccaaattcatacagtatcaagagtatgtctcttaagtattcacatctccttctatcaccactattgttgattctggtaaaacaaatgtatgttttctttcttcaagtttcaaatgggttaataattctgttaccacagaccatatgacaaataattctagcctcttttctaatcttcaacctcatgcttccacttctattcttaccttagccgatggatcaccatctcgtgtatctcgtgttcttgagtctgggacaattactcctactccaatgcttcctttgtcatcagtcttacatataaataattattcttttaatttattttttagtgatcttaattgttgtatctcttttttatctgatctttgcttatttcaagatcttatgacgaagcaaaatataggtaaaaaacatgaatctggaggcctttacattcttgatacaccaatacttaaatctgttgctagttctggtgtacaatctccctttgaggcacattgtaggttgggccactcatctcttcctttgtttaaaaagttgtgtccacaatatagtaagttgtctataatagattgtgaatcatttcagttttccaaacatcatcgcactaattcaagccctagagtcaataagcatgctaatgtttcatttttagtcattctaatgtttagggtctttctcttatcttctctaaacctaatttatgttattttgttacttttgtagatgattattctcatgtcacttaattgtttttgatgaaaaattgttctctaatttttgtgcctttagtgatgaaattcaaaatcaatttgatgtgtttgtttgtactttaagaagtgataatgccaaagagtacaaatctggtttatttcgcttttatatggttcaaaattgaatacttcatgaaactttttgtattgatactccatctcaaaatagtgtagcggaacgaaaaaataggtatctccttgaaacaattagagccctcttatttcaaatgcatgttcctaaactattttgccccgtgttatttcttctgcatgttttttgattaaccacatgccatcttttattcttcatggtgagatctcttacaaaattatttttcccaaaaacccactatttcctattgagctaaggatttttagtagcacttgctttgttcgtaaagttcttccacaggtaacctaattagatctcaaatcattgaagtgtgtattccttagttattctcgtcttcaaaaagagcacaagtgctattgtcccgtcttaacaaatattatgtctccattgatgttactttcatggaatacgcaccctgtgttatgttctctatcaattcttactcatcatgggcaaggatgatgatttgttggtatattctatcacattccaaacgggtaacctattcctcaccctgtatacttcctaaaaagacttccattacttaacatatctcaaccacagcccctaacaggcctatgcctcctccgcctctaactcctattaaagtgtactccaggcgtccacctcctgcttcatgtcctgaacctacttcttcgtcatcaaatccagagcccggcgatgatgatcttcccattactctatgtaaaggtaaaagtgtacttatcctatttcttctttcatttcttatactcatttgtcctcttcttcttgctcttttattgtttctc

SEQ ID NO: 114893 - DNA, 2214 bp, Cannabis sativa
atatatctactttttaaacaaataatcattatgtgaagttttttgtcattttttagtttgacttgatctaaacaaaatttataaatttatgaaacaaaatcatatgtgaacttcattatttaacatagtaatgatacatatacataaatttataaaagagtactttctttacaaaataatctctgcatcaatataaagacatacaaaataatctctttacaaaatacaattatgaatgatttaataaatttcatgctataaaatccacactgaatgctatctgtttgctccggacatgtgtactcaatgaagtttactgcgactaaccgtcggtttcttttctctaggtagtacctctcaagagcactacacaaaaataatataaagttaatacatacattaatgacaattagagcaatatgcttagagctttgaactactagaacatatgtttgaaaacatcttttaatattttgaggaatggttttgtttttggaatccagataagatgaaaagtctctatctattctataccattaaaagaagtattcaactcagaataaacaaaaaggaatgtcaaataactcaaaattcaatttgttatatatataaatacaatatgtatgcatgtaaataaattcataaattaccaaaagaagcgaattgttaaactaatgaaataaattcattaattaagaagaaatgaggagaaaatattaatggagaagaaatctggggttataatagaaagagaaaggatgatgtggagaaaattagagtatttcctattctaataaattgcctatgttccaataaattttattcaatcatatactaaatttattcaccctgtttcatatccattatagcagaaaataagccaaattcccattaataaacaaaatagtgtgataaaggccttgtgggagatgggttgccaaaatttggctagccacttttgacacagctaatgaggaagctgcccttgcttataatgaaacaaaggcttagataattaatgatgagaaaacgaccattcaggcagggttcgataaagagtgcaagaagcaacactatagtttcgacaatttttaaatgtcaattgcaccaaataaagtttaataattaaaacaaatcttcatagacagcaataatcaatatcctatcacatcccattctcaatcacaactaattaaaaaataagtaatgttagaacacaattaaattacattctattttatattttttttacactttttttatatatctcaaaaaggcaattatgtccaccaagaatattgactcaaaaaaattaacaacattaaaacaagcaattaaggtaacaaacaacaactaaacaaacaattaactagatcaaagcagtcccaattgaaaaaaaaaactagattaatgtaatgttctctgctttataaaccagcaataacttttattaaagtctaaacctttgtagacaaattaacttgtctacttcttagaagcatggttacgaaaagaaagaaaactcaaaatcaaacaaactaaactatagaacttattacatagaaaactcattaatattttcccaaatcaaacaactcaaatatataaatacggtcttaagccaatctatactccaatatttctctccagtgtagactctcaagtactatccatatgtttatcacacactagactaaacacaacttggcactaaggttttgactgccaataagttttagacagattgtttaaacttgctcagcctaagtcactggttctaacaaacaaaacttattctcgaatagaaggaactcgcattatccttgttttgatttgatgaaataaggtggaatttgttggattgatttgtctgaaattcctcatttgtttcatgtccttgacagttaaggtggttatgttgtaaacacacaacacaataaaagttttctagatcctacatagaaattacaattacagaaacaaccatgttttatagttcggccaaattgtattggcctactccaatttctcctaaatgttctactatgaataaacttctattataaactaatctcgaaatagcaatgatccatctaagattaatgacaacactaaacaaaacaacattcccatatgaaaatcatttttcaatggcagaacatcatcatctctaataactacacatggttgtagtaagctttccatcttctcata

SEQ ID NO: 114894 - DNA, 2436 bp, Cannabis sativa
actctaccaatgccatacccaaaccttggaaggtcggggctgcttattacgccaatgttaagctcatcatcactaaataaaactaaaattcatacaagaattaaatgcttattagattgatggatctctttactacgtactaattaagttctagttaatatatagatgtgtagagaataagtaattatgaaaattatgtgtttcatttatgttttattattggatgttgtttttcttttcaatgctttaaaagagaataatgggtccattggactttgtacgtactttaattggaataatagagattgtatcatcaataaagcttatgaaatttgttattatattttataagtttttgctaccattattatatagcattactattaggcatgagttttgagatcgaagacaaatctgaattgaaatatagaggggatcgaggttgattatgacaaatgtgcacctcatatttgaaactcgtgcacacttttttttctcattgcacaaatttacacccaatgtctacttataatatacttaggactcgtttggtaatccttgtaaaagtcgtattatattaaaggtaaataataagaaatactatatttggatcaacctttgtattgtattaattaatgcaaccataatttttaaacaaaataaatcgcattatttaatacattaaaaataatctatgttagcttgtaatataatatttaaatgaggatcccaaagttaaatctagacctcggtcccaaaccccaaaccgagacttcagactcggaccccaaactagatccatacccgaccctggtctcaaatctagatcctgaacaccatcctcgaatctacatccgaaccccgactaggccccgacctaaacctagacccagcctcagccccgacttcgatcctgaccccaaacctcagaccccggaccccaaacacgaatgcgaacctcagacccaaacccagacccaaacatgcacccccaaactagctaggccccaaactcggtcccgaaacccagactcagactcaaatctcgaaccccaattcatggccggagtcagagttggggtcgactttatgtaaatagtataagtttacacaacctattagtatgattaaatatatactaaatattgtactgtattaaataatgctactacaatacaatacaatctaacacaatagtatacaattataatacaatacaacacggtgtatcaaataagtccttaaatgattaaattacactagacaatccatgttagcgtttcagaatatgaattaatgagcacgttaaatttgaaaaactaaagtggagactgggaggtattgccagcaaaattttgacctgtgcgttaagttgccaactaaaagtggagtgggatgtcttaaaggaaatcaaaggactggacaggaatgccataaccttgctccaactacggtcaacagggaaaatacctccggtcagagttcagacaagggaaaaagcatcgcccaataggaagtcgcccaaggcgaggacgaagacatggatccccgacttggggaaacaattacaaatgttaggccaacagaagaattagaaaaagtggaaatcaatccagatatcctgcccacgaagctcaaaactggtaaaggcttgctgctcgaaataaaattagccttaataaaatttctgagagcaaactttgacgtttttgcattgtcacatgagaatatggtcggtatttacccattgtcatgtctcacgccctgaacattgatctaaactttcgtcgcgtccagcagaagagaagactactggacaaagaacatgcacaagtactgaaagaagaggtagaaagattatgcataaaaaaaattcattattgaagctttctacccggcttgggtggctaaccctgtactagttcccaagccaaacaaaaatggcgagtatgtatcgatttcactgacctcaacaaggcgtgtcccaatgactactttccactcccatgaattgatcaactcgtgaatgcaacagccggacattgaatcttgagctttatggatgcctcttcggggtataactaaatcataatgcatccacttgaccaagaacatacaagtttttgaactgatatgggtttatactgttataaaggggtgtcattcaatctgaagaatgctagggctaccaatcaaaggccagtaaacaaaatgttcaaaaactagatcggacggaatatggaagtatacgtggatgacatactcatcaaatccaggatggttgggggcatataaaggttctgaatgaatgcttcaaaatccttagaaagtacatgtaacaccctaaaaaaaattaggcacgctacccaaaatatttatgaaaccctaatcccctaatcgggattactaatccaaatagcgcagaatttaaacttt

SEQ ID NO: 114895 - DNA, 1593 bp, Cannabis sativa
tgtctttgcaggatcatcggaaaagtcctcagaatatgtttcgaccccttttatccagtgtcccaagtaccaccttttatgtgggaaaaacaagttctgcacatcgttctttaacctctagaaattcatcagtcacaacaagtagcaatgcaagttccgatcaaggtgcttgtgcagcacctgatactgaagggaatgatcacaaccaagatgatgtggctattgaatatgagagggtaccattttctgatgttcctgaggaagtgtttgcctttgataagatggatgtcgtaaatgaagtcattggacatgaaattgatgacgggtcaataaataatgtcgaatttgatagaggccctaaaactgagttcgttgttgctgaccctggagaattccatcaccacagtattgtcacagaagttggtccaacttcagaaacatcttttgttaatgatgatttttcagaagtggacagtattgaaaatatggcagtttgttctagatgtggttgcagatatcatgcttctgagacagaggagaggttcaatggactatgtcgagaatgtactatgaaagataaacttttgaaaataactactctagagacagctgtagttgttgataccttcccagtgtcatctacacacattaccgaagagaggcattatgatgatttgacatctatggctgtgcctgagctgtcacaaaatactgatgagagggggccaaagagttttcaggatgaggagaatgtcgaagatggcaaaagttcttacaatgagcaaaatcatagttacttgcaagaaaattctcttgcaaagtcaaaggaggaaggaggagaggttaggtttgccaagcagctagaggatggcccgttagctgttggtcagggtttgcccagtaatgacactgggggtcaaaaactgcatcatgtcactgactatccaaatttgagatttgaggtttcagagggtgcaggaatttcagtattgctgaagagaacaagcagtaacaaggggaccgttgttcgaggcagaaatttttcagccgctagcataccgtatgatgatctgtcatatgctaaagatagtgtaagcagcatgagaagctcaatcgggcatggcagtttctccacttcatcctctgttgattttggtacccgacaaacagatagccgggtgcaacggcagttaagtagtggaaggaaatcagacacggagcactacagaaatgacaagaacacaagacctcaaaaccatggcccttctttctctggagttggaaacctatctcgtcaagcgtcatctctttcaacaaacacacatgaagataattctcaagtttccatgggcaatgtggaatacaatctttcaaaggagacatttgtattatctcaagaacattcggtagcttcagagcaaactaaagcagatgttaccgacataccttcaacacaatcatttgttgtcgaagaagatgattatgaacacaaggacagcagaattgttgatgcctctacctctgaacttcatactcccgtagctggtattggtttagaggaaaaattggtagcatcgtatacaaattacgagg

SEQ ID NO: 114896 - DNA, 3690 bp, Cannabis sativa
tatggaaatataattccacacaactaacttaaattagaaaaaagccatagattaagtaaaatcataatttctccatatttatcaaacttgaagagaaaaatccatattctacatatcatacaaaacgtttgtacacatatatatatatatatatattttttttttgttatatgtcaaactattattttacactaataattaattaatttttttatattatttttatttcttttttttttttgaataatttagtgacccctaataagcaaaaattactaatatttattaaaagtcatactaatagagtcatacgaactgtggtaaaaaaaattagtattatttaattaattaattgtacaatcaaatatatttaaaacgttagttttatatgtccaatgtgttcataatatttaatttctaagtttcattatatatcaaaacaaaaatattgtagaagtgtttcaataaaaaaaataaaaatgcatgtaagacaccttatttgaagattttttagtaaatgaagcttaaggatccacaatattgaatattagctaatttttcttattaggggtcactaaattatttaaaaaaataaataaataaaaataatataaaaataattaattaattattagtagtaaataatagagtgacacgtaatgaaaaaaaaatatctctatgtagagacattttttgtgactacctaagcattttcctattttatttattcattttattagtatcctataaaataattaaaaaaaatactatattaatactctatactaatattacactagtaattaacattgaataccacactcaaaaaaaaattaattaatcaattataacataaatgacaggtataaatttccatttgtaagttattgttattattgccgtcaattccccctcccccaatatcaaaaaaaaaatatttattgttactatattttttttttttagcatcaataatgtctagcaccttttagatgtgtcattttgtgattggctaacgataatctctaaaagttattacattaaactagactcgataattaattgcaccaataacgatagtaacacacaaaaaagtgctaggcaccattggtatcttttaacatttctctttttcttttgaatgagaaaattaaattgactaaacattatggaattatttattataaatctcatttatttttatctcgagtctttatcaatttaatgttatattttaatttccaatcatttttttttttttttgactaaaaagactcaactagcaataagcgtactctacaaaataggggtgggaatttattcaaagatagcatccgctatcaataaattctgaatacaatcatttttttaatcttttaagtgaaagtgaacaaaaatgtattatgaagtattcttttcttttctttctaaaatgttagaaagtgaaaataaactaatgttcttagattttcatattatagtaataaattattcaaaaaatttggcagcaaagatattataccaggtgataggcttgtagctaaaaaataaattgtctaagtcattgttttgaaaaaaaaaccttagaattcaagaaatatagaagattcttctttatatttagaatctactatgtgatcaagcatgtgaatttgtatttaatatacatattaaaaatgttagataaatatttaataaccatatcatgaaccttcggtatgcagtcaaatgcgttataaggaatttaaggagaacaaaagactacatgctcacttttcaaaattcaaaaaattttggagatcattcaagattctaattctaattttataaagaaattagttgtacaatttttgtcatgtggctgtaaaattaggaatggtaatagaaaccattaatgacgtatgttgtgacaataaatcaatgaagttatattttagtaacaatatgagttcaacaaggtcaaaggcacattgaccttgagctatttgttattaaaataaagttcaaagtgaaaaaggtgtctatagaatataataaggacaaactcaatttttgggatccggatcattaaggatataccacttaagatttttcatgagcttgttgctcatatatagatgtggtattatttaagattgtcctggtttagtggaagtttgtatttgagatgttctatcaagttgacacatatttatgatttaatcctgcagataaagtatggacttaaattttgagtactctgaatgtattatttctattgaggtttaagcataaggttagaaagactaaataattgatctcaactaaggaggattagttggagataggcatgctaagatcacatgtgcatgtaattttaatgctacgcatccatgattaatttatgtcatttggttgtattgatatacattactattgatggatttagccacactaaatgtggcgaaagccgctttgatcctacattagtataatcaatagacgagattattttgaaatacctataattatgatagcaaagtttgagcacttataagtttatatattggtagtggtctccaagaaacaagtgtcattctattctcataatcctcctccattaagagagaaaatttgaaaactctaagtcttgcattcttagaagatcattacccaaagatccagcctacctatggacattactaaattaattatctatattaaggaattaagtggagaataagcatcgactaactctgtgcagcagccgcggtaatacagaggatgcaagcgttaactggaatgattgggcgtaaagcgtctgtaggtggctttttaagtctgccgtcaaatcctagggctcaaccctgaacaggcggtggaaactatcaagctgaagacaggtgaaccggacgctattcctgtaataggatcgcccttggtagagttattgcgcggaagtgcgtacgctttcgctattcatattctttctactctttgaatcatcaaggattttagatctttggttatacacttataataatatgtaatattttgtgtgtgaaatttaatcttaatatagtacattatatgagtgataaagaattacaatatgaaattagctaatttataattaaaaacaaataaacatatatttgatgaaacaaataaaaatattaaacataaatacaaacaataaaaatgaaaatagttaagatttgtattattattgatatataaatatggggtattaatatagtaattttatcaaaatatacatttcttatactagaaatgcgagtaagaagaaaaaagaataattagcatataatatagtccttctatcatattttattcaattttatcgtgaacagagtgaagtggtgaatgataattgactaattaatgcaaattaaatacccttcacaatttttacgttaatgaataatagaataaaagatttttcttttttataataattatatttatacattattatttttttaatcattaaagtaaaaatagtaaaaagatatttaatttgcattcatatattaactactatccgataatgtaaggatcacattattgtaaaagttatatttcgaggggtatattaacgagtcttatactattggagaacattgtcccacatagatcaaatgtaaaagtattgagccatatataaagaacatgggctacttcactcat

SEQ ID NO: 114897 - DNA, 2363 bp, Cannabis sativa
  modified_base (89)..(105): a, c, t, g, unknown or other
  modified_base (2337)..(2338): a, c, t, g, unknown or other
aaacttaataataatctgatttagagatgttatgacaaaactagttatattttctgtatctattcgtattagaaattgtcttaaagttnnnnnnnnnnnnnnnnnaaattgttaaaaattgagctcaggcctcagggttctatttttatcattttggaaaatatagggtccattttatcatttaccaaaatagagagtccaattagtaacttttgtaaaacacatgttccaaaatagtatttactcttaaatatttctcataagataattttgcaataataacataggaatataaaagaaactttaatttatttatcaatttacaaattttataaaagcgtatttttgaatacttattactatgcaatactaaggtttagcaataatgtgtgttttggagtacctgggtatagtgtatataatttcaagttcaattaaatgaactttaaactgtatatccatatttatcacgccaattagtttgcaaaatctttaattttttttaccttacttgtgtttagccatttgtctaaaattcttgaaacgtctcaaacgttctagattctttgagcataaggtaaagaatgtctaaagtaattatctaagatcgatagtgatgaaatactcataaccacctctggcttgtacattctaaagtttataaacttttataccagctcaaatagttattagactctatatttctctttagagaacaaatgtttgatcattttgtcttctacatagaattcgtagaatagtaacttacctaaggtattttattccaaaggttacatttggttagtctatttgaattccatcatagtcaaatatgatcaagatgtaaatgctatagatatcttatcattatcgatctttcaagatttatagtttttaggtctagttactttaaagagttctttgttaaatgtaagtggttcacttggtcttagaatatagagttcatttccatgcattcaacacagtttagatctatataaatactttatgacttgtgaaggtcttaactcattgttcttgatgtaaatctgaaattaaatttctactaaaatttagaataacataaacgacttttgtccatagaaaaacttttatttccaaattttagaggtatttttctagcttggaccgccacaaaagagaatattaaaaactctaaagagcatattaagtaatttattaatgaaaaagctatagaggaattttaaagtgcaatttcaattaaaataagaatccaacaatgttcagtttaggtgagagttaaatttatttttattttatgagttctctattgttttagaattataaacactagtctaagttgtcatctagctattggggatgagccaactagatttcacacttacaaaatgcttctcagttgagatctaacactttagattgtgtaacgaatgaccatcctttggggatggtcccattaaaaataaaattgatactacataattaataataaaaattaatactagttcgatataaatttatacacaattttcatcaatttgtaaacatttagcaagtaatgaagatatgaaaaaatacattaataaacatatctcaaacattttttaagatttttaactaaatgatatacaatgttctgtattgggcaggatgcaaagatatcaccagtcaaatagagtagtcagctcatctaaaatagatacatattattaaccttttattcgatcaaaataagaatttaatgttgtcccgtattggacgggatgcaaggtcaatcaagatcttaggttgtttgattgtctaactgatgaccacctattggggatggatcccattataacatattaaccatgtaagaccaacaatggagatcaaatattttaaattaaagctcattgttttgaaaaaaaaaatgtattgttatcttaaatattaattttaatctatttattttaacatttatatatatatttgattaaaattattaatttagataaagtaaatataaattttaatttaatatttattgaaacatttacttaggttaggttgatctgaaaataaattaaaatttattttccatccttagtatatatatctcgcaaataaatattataaaaattacttgctttaagttggtctaaaattaattaagaattactttttaactcaaatttacttttctataaatatatattaattataattcaaaatctaatatatttagaattatttttgaattcattattaaaataaaataaaataaatcttgaaaattttctaatttctggtaatctaaaattatttacacttgttgagaatcatggggttccnnctcaaaaccaattggcaatgagtgg

SEQ ID NO: 114898 - DNA, 4771 bp, Cannabis sativa
  modified_base (214)..(219): a, c, t, g, unknown or other
cttctagttgtaaaaaaataattctatatcatttaaaaatagttaattatttaaaaatttattatacaagaagaaaactctaatttgtataaaagaaaaaaagtctaatttttgtaaaaaaaaaaacgtttcgttgtaaatattataattaaatgacttaactgttaaaataattatagtagggatttatataaaaaaattatttataaatatnnnnnnctaaaagaggtcttgttaaatattgaattaattattttaagaaaataattaattataattaattgctaaaaaataaagttaagctccccaacaaaacgtagcaacctcaaactcgaattgaaaaactcatacttagttcttttagttgtaaaaaaattaatttaatattctttaaaataattaattatttaaaaatttattatacaagaagagaattctaatttgtgtaaaaataagtctaattgttgtaaaaaataaaataaaattttattgtaataatattataattaaattgcttaactgttaaaataattatagtagggatttatataaaaaattatttataaatattaattgctaaaagaggtcttgttagatattcaattaattattttaagaaaaaaaattaattataattaattaattctataaaaaaagatttttttttggcgtgtgatgctcctgctttcctcccatggcgaagaggaaaaaaggggtctcgaagcctagttcgaagggaattcctgtaccgagagagagtcctaaacttccttcaatccaggaagatgatgttgcggcttcaacagaggtgttcttggatccctgcgaagatctagaactagagtggaaggaattggaatcgaaacctacgaagacgactccaactgcgatgagttggacagacgaggctgaagcaatcgatttccaggagtcgactaaaatatcttggagcaaatttaaagtgaatcaggtgagaacccctacttcctaattgaattttaccgaccctttaaaaataggagatcaggtggtagctaaacttgatttagaggaagttgaagttgaggtgtcattttggagatcatcaatagtttgtattgtattgggggccaatcctccattcaaggtgtttgaaggtttcatcaagagaatttgggggaatttgggagtggaaagaatagtgagaatgcactctggtttcatattggttagtttcaaagatgaagttacaagagacataattctagaaacgggggtaatacaatttgataagaagcttgttgttcttaggcattcaagcgaagacatggatacttctcagatgattagattagtcccggtatggattaggttgaatggattaggtctccaatattggcaaaagaagaatctaagtgcacttgttagcacaattgggaaacccattatggctgacaaggtcacctcagaaagatccatgataaagtttgctagagttttggtggatgttaagattaaagatgaacccccgagatccataacgtttgttaatgagaaaaattagcttgtggagcaaccaattgaatacgagtggctgccaacaaaatgtctagcctgttgtatgttgggtcataatgtttcaaactgtaacaaaggcaaaccagtaagctagaagaaaaagcagcagggggacaaggagaggaatgtaaatgtagaggttgcagctggtatggagctgccacagggagataaaaaagttagcacaacggctgctatggaagatgctgtctcgtttgttaaatcgggtaaagatgaagttgaaaatgagaaccaggctatacagaactcaaaatattagggggaaaaccaagccaaatagaactcgaaatcacaagggagtagtgatactacaaattgggttacacccaagaggaagggctctaaagtggtaaatcacattcagcagaatgctagaatcagcaatggctatgatgtattgaaggaagtacatggggatatggtttcaattccagttaatggatcactacaatattattggttggaacgtgagagggctgaataaagttgagaagcagcgtgagttgtttgattgttgcaagataaataaagtggattttggggctctctttgagaccaaaattcatcatgacaaagttgaaagtttggttaataatccggattggaagttttattctagtcaggaaatctcgtatagaatcttattattttggaaagataagttggtgaaagtgaacatcttattggaggataagcaattggttcattgtaagctcaaaatggtaggattcaaggaggagttctaccttacagcggtgtatgggaaaaatttggtgaatgaaaggaaggacctttggaataaactggagggaattggtcacttgaaagagtcgtggattattattagggatttcaatgccatttttaactacaaagataaatgtggtgggaggaaaatcaaggatgtagagattcaagataaccaaaactagcttgctcaggggcaagttgaagagctcaaaactttaggctcgttcttcacttggtccaacaaacatgaggaggggagcatagtccactcaaagctggatagaatttttgccaatgaaaaaggcttgatgcttttccaaacaccaaagccagttttagatggggagcgatttcggatcatagtttttgtctcattaaacacttagcaatcagcaacagaggtttcaagcctttccagttctacaaccactggatgtcaaaagatggctacaaggagaatgtgctaaatgcttgcagaaagaggaatactgcagacctcaaaagcttataccaacagttgcttaggatcaaattcatctctaagatgatttgtacaaggttctcagaagtgctccccgatctcatacatgagaaaggagcctttgttaagagcaggttgttagcgcacaatattctaatcttgcaggacttgctgaaatggtatacccgaaagaatatatcttcaagatgcatcatgaagattgacttaaccaaagcgtatgacatggtggactagtcctttgttgctgatctattaaaaggcctctattttccatccaaattcattttatggattcaaagctatatccatggagccccgtactctcttatgttaaatggaagaatccaaggctcttttaaaggcgagaagggtcttcgtcaaggagatcccatgtctccgctcctctttgttctcattatggagtatctgacaaggttgctcattcagaagtcaaaggagaagggttttgattttcaccctctttgttaagtctcttggcctagtcaacctgtgttttatggatgatctaatcatcttttacaggggtaatgagaaatctgtccagctagttagtgaggctttccaacagtttagtgaagcaacaagtcttttgcccaacaaatccaaatccacagtgtatttcggggggattcaaaatgaaggcaaacaaaatctcctgaacatccttcaaaatgatgagggaagctttcccctcaaataccttggagtgtatcttagacctactaaatggcggttttcagattgtggaatcattatagataaagtccataagcacttacataactggactagtaggaatctgtggtttgcaggtagagctcagttgatccattctgtcctcctgggagttcagaactactggatgaatcttttcatgcttccccaaaaagtcactgcggctattgataaatgttgtaggcactttctttggggctcaaatggaaactgtagcaaaatgcacatcccttcttgggagaaagtttgcctccccaataaatttagtggtattggttttagggaagggaagaaatgaaatgttgctcttatggccaagtatctttggtccatctcgagcaaacaagacaaccaatgggttacgtggattgaaaccatatacttgaagggtcaaagtatttgggttgctgattttaaacaagacgctagttggtactacaagaaacttcttcgtctccgctcggtaattggtgaagatgatgtcaagtcagcggagaggaaaggtaaatttcagtctaaattgttttatgtctcttttgtgcaagatcagattgctggctatgcaaagaacctatggaatagaatgattttgccaaaacataaatttattggttcgcaaatagtgaatgaacagctgccaacaagggataatataagcagaataatgtcgattcctacagatgtttgtcctgtttgctacactgtgatggaaacacacagtcacctattcactagctgctacttcactcagaaaatcatccaagaagtcatgtcctggtgtggcaacttcagttggccaagtaatatcagaaacttgttgtcttggccctcgaaaagtctgagggagaaggtattgaatggtattgttttagctaatatgtactcggtttggaaaaatcgcaattgttgtatttttgagctgaaatgtaaggctgctggggctgttagcgatgaaattaaaatggctgtaaaacttagatttctaagttgtagcagtaggaggaatgaggctctactcaattatatatgcaatgtaatagatagctggtagtgtggtgcggctgtgtgtgcctgttttgtactgtatttttccttgcttgttttgaataaagatcattttcttgttcaataaaaaagaatttttacctattggtaacctgctattacaggtaaaaaaaaatgtga

SEQ ID NO: 114899 - DNA, 2900 bp, Cannabis sativa
aaaaaaaaaaaaagaataaaaaacctcatcagttgtcttgggcagaagcaaaagcttacttgaacctctatacttctccatccaatcagtatttgcagtcaaaagcctatcttcatcctgaactacattcttctctcccaatattcctttgaaatactcaatgtcatcagagctcaacatcgaaaacgaagggtttctctcaggcactgtagtagaagctgagccaaaacacctaaactggaatctaactccatttccatgaacaccctttcccttttcaattgaagctcttacaggaactctgttacctgttaagtaacgaaaacaatggtgtagcttccaattttgataattcccagaacctattataattatcaacattacaaaacaatttcaattacctagaaagattatcagaatgaaatttcgcatttttcaaaattgtcatgtcatcgcaaaattgaaacgatgatgatgatgaattagattgtatagtagtagtagcattaccggaaacatgcatggggattggagtacgagaattagggttagatcgaggggttgtgcatgaggagaatctgagaaaacgacgaccagctctccacttctccattttctggcttagactcacctctctctctctcaccttgttactatatttattaaagattgattttttttttcttttttaagggatatcaaaaaaaaagattaggattataaaatgacataatatttattttcaattagattacataatggataatattaaataaaatagtaattattatttatggatagtgagctgtgtttgttaataaattaatgattttttttttctcatttgtagtcttaattgttttacacttgtcctcacaattttattttgttgagacattttggatgagtttttactttttagtgtcttaaaatatgtaaccatatttatttaaagaaaacacaataatttaatttttttttttttgaaagaacacaataatttcattaaaatgcacaaaacctgtaaggtctcaaattacgaaacgagcttagaaaattagacaactaaatctataagaagacatggtcatctaacatgtaacacatctagaacaagagttggctttgcaagagaatgagcaataatgtctttagatctattacaatgaaacatgaatatactattaaaagatttctaaacacgagaactatcattacgtaaaatattaaatttattgtgttgaatgtctttactgtccacagcaagaacaaatcgtagacaatcagagaaagttgtaacttgtaacagtcttgtactccaactaatcaatcgatttaattacaaccgaccgtcaagcattaaatatacaattgtgatcagattagattgaatgttatttttgaacttctaattggatctgattggatgtttaatggtgtatctaaaaatctaatacatttaatatttaatcgaaataattaattttttcatttagtttggatgagtaattagattttaagctgttatagataaagcatatattaaaattaacaataaaaatttacttttttttttattaggtagatccaatccaatcaaatacatatgagatctaaaatattatatggatctgaccctatctaaaaaatactaggtttataagattggataaactcaaattaaaccaatacatatacatgaaatacatccaatggatacaacctatccaatccaacatccaatgagatcagatcggagggaaatatctaatatccaatatatgatttgatcggatctggataggtctaaaacattaaatgtgttccaattaacacccctaacctcaactgaaggcaaaaagagagcccatgaagcagagctttggcctctgcgatataaggcttaaaagtatcaacactcgaaaaacacaccaaagaagaaaacatgatcattgggatccgaagcaacaaccccatccttatttcgcattcttcatcaggaagcctagcattcataaataaattgacctcgcctaaagtcaggtctagtttggcagtggtcgcatcacttggccccagaggagaagacttattagacgaagatccaacaacactagcatcttggtacctccaaatatagttaatagctcaaggactgaccttattatgtgagagaatcttatgatcataaacaaaagtattacgcctatgtcaaatgcactagctaaggacaatgaactcctctagttcatgtttactcgaaatatccatacaagccaacgaaagttcataaaaaagagaggcgccctttagagaatcatgctcttttaggattcaattaaagcgaatagacttgagcgaagggcaaagctaagaagtatgaatttaaatgaaaaaagtgtcaaataaccctatcttgcctatcaaataagaaacaaagaatagacaatatagcactagcttccatattatcaaataactcttgaaccaaagaggagttccaacaaccaaaatcaaacttgagatcactaaccacttgcagatgaaggccacccgtgtaagaataagtccaaccaacatggtccttaagaatccaagcagcctcccaaatttttatagaatcttttgaaccaacaagccaacgacatccttacttcgaaagatcacgaccacacaaaatactcttttaaaggaatgaggcccgcttcaacaaatttattttttgaatttgttgaaagacaaattttaaagtaaactaatagataaatgctaaaaagcatcaataatgccttttatggaataccattaactattttgaggctttttcatttttacacttcaaaacaatttctttttgtatttttacaaaattctacacagaaacccctattgcaactagc

SEQ ID NO: 114900 - DNA, 3063 bp, Cannabis sativa
  modified_base (3032)..(3034): a, c, t, g, unknown or other
catagctccattccatttcttttggtctttgcttttcattgcttgtgcatagctggtaggctcttcctacacaatctgattagcaacatgaaatgtgaatgctattaaatcaacatgttcatatctatctagagcttttacttctccccataccctgtccctagccaatttataacttttcagatcatcatttctagaaatcatcttctgaatcatcacttcatgatttgtaggtgtttcaacctccagtcttgctggaggctccacctcaagctcagttacatgtgcttcaatttccttttggtcagatatggcatgacttcaagcatggttgtcaataaatcccataattgattcattaaaggtcacatacttgctaattacatattttctcattttgagttccagcaccaaagtctataccctttgaatcctttcggataccccaagaaaatacattttaaggctcttgcctcaagcttatcttgccttatgtgtgcatagcaaacacatccaaataccttcaagtgttcataacttattggctttcgtgatcacacctcatttagtgtcttgaaattcggtgttgttgaaggacatttattaatcaaataagttgttgtagacacagattctgcccagaacattttaagcaaaccaacattcaatagcatgcacctcaccctttccagaatagtcctattaaacctttctgcaaggccattctgccaaggagtctttctcatagacctgtgcctaaatattccttcattcttacagaacacatgaaactcatttcaacaatactctaaaccattgtcagttctaagcctcttcactttctttcccgtttgattctcgatcattatcctccagtgtttaaatttttcaaacaccttagtcttattttccaaaataaacacccatgattttctcgaaaaatcatcaactatagacagaaagtacctgcttccccaacgtgatgctgttcttgaggttccccatggatcactatggatatagtccaatgttcccttggtactcttgccagttccgatttgaccctacaagacttaccaagaacacattattcacagaaatctaaatgttcaagctttacctttctgagtaatctttgcttattcagttcatacaaccctctttcacttacatggccaagtctcttgtgccatattacagtttcattttcatgcttgcttaaaaaacaagcctttgtgtttgtcactgtggtgtcatctagaggataaatcctatttgatttcctacctctcatcaccatcatagaacccctgcaaactttcataattccatcctcaaccttgattggaaaacgttaatcatctaacattccaacaaaagatcaagtttgttttgagatttgacactaatattacatcctttagtaccctttccatgtcatcatgaagcttcaatcttacaattccaattctcatcatcttacatgacttattatcaccaagatacacagtcccatagtttctaggtttgatttattcgagccaagatttatttagtgttatatggaatgaatgcccaaaatccaagatccattctaaatctgatttctaaaaggtaataagcaaagcaccagccgagtcataaccatcactcatcactgatcttgaatcaccaaactttagcctttccagacacatccttttgatatgccctgttttcttacaatgaaaacatttgacgttctttcagtcatttgactgtgatttcgatcttgattttccttttgttcctttatggtttcccctcttctcacttctacctctcgtatataatccatgaccatttctagagttctttaactaactcctttgattcagttcttttgaattcaaggctgattgaacatcattgagtgtaattgactctcctccatacaatattgtatcattgaaatgtacaaataagttcagtaaagaactaagtaacaacaatgattgatcttcgtcttcaatggtaaccccaatattttcaagatcgatgattaacttgttaaactcgtcaatctatttctaatagatttatcttccatcatcttgaacgaatacaaggactgcttcaggtatataatgtattcaccaatgattttatcatgtacaaactttcatgcttcaacaaaatccaacccgctgtggcttctttggtgatctttccgagaaccttatctccaagatacaaaatgattgcactatgagcctttgtaagaatctatttcttctcctttttagacatagaattaggaacagatttttctccaagaataggctcatacaatccttggtgaaccagtagggccttcatcttcattctccacaatccaaaatcattcgcgaatcgctgaacatttccacaatgtattttgctacaaccatgattgcgaaccttgctttgatatcgatttgttctgaatcaatcaatgacttacgatgaaagagcactagattaacaaacaagcactcaagaacaatactataaaagaatcacaagaaccaaataatgaattaaagcagtaaaacaatgagaagataacaacaaggtttaatgagttcgagccatgtgcaattctctacatctcggttggaacaccagcaaccatatctttattgatatttgtttgacaaggttaccagaatctttcatactttcacagagattttaagacaaactttctcttcacacttttcgactccctctttccctaaccttaacaacacgattaatctcaagctatcaaatgatctgatacccgatggattacaaaggtgatagctacataaaggtttgtattgttgctaaaattagcttcgctgatattaatgctaattaatgctgagtcagctctagaaccacattcaacgtcagctccctcaaacgttcggatatttctttccagccacattgcccatactatatagccaaacttgatgtttgtcacaactttaagttgtgtttactgttgagaatcatggggttcnnnctcaaaaccaattggcaatgagtggagta

SEQ ID NO: 114901 - DNA, 4139 bp, Cannabis sativa
  modified_base (3035)..(3043): a, c, t, g, unknown or other
ggatgttaaacaacatacttgttattaaatctaagatcctggtaaaatatttccaacaacttgctattttcatcagccattaccatttggagagacgaacatttcgagttatgcataagggagtcgatattggtgttgaaaaatattgaggattttcccaaattaactttttgccttgaagcatgttcaaaaatttgtagtagttcccaaatgcaattagcttctgacattttggctttacaataaagataactatcgtcaatgaatatcatgtgagaaacacgaggcacaccattggccaccttgtaaccatgaatccaaccattgagctcaaatttctggataagagcagacaaccccttcggcacaaaggataaaaatgtaaagagataatgggtcttcttgtctaatacctctcttaggaattattggacccatctttttttcgccatgaagaatagtatatgaagttgaattaacacaactcatcactagttgagtccaaacatcactgaaccccaattttctaagaattgcttcaagataatctcactcaatcgtatcataagctttacccatgtctaactttaaagccatataaccctcttttccttgccttttccgctttaaaaaatgtaaaacttcaaaggacatcgtgatgttattagtaacaagacaacccaggatgaaatcactctgagtatctgaaacaattttgtccataaacggcttcaaatggttagccataaccttggtaattaccttatacaagacattgcaaagagaaattggtctcaaatatgccattcgatctaggtttttcttttttcagaatgagcacaatgttagctttgtgatagtcattttcaaagttaccattcaaaaagaaatgctggaccataagaataacttttgaacccactattggccaacatttttgatagaacgctggagtcataccatcaggacctgggcttttatcgggatgcatgtcaaacactactgtgcgaacttcaacattataaacaggttgagtaagctcaagattcatttttggggtaacaacattcttaacacagtcaaggacaacaagcggattggacatggaagaactaaaagagaattgaagtaatcgataacaatagtagccaaacccgactcctaatccacccaattaccttggtcactaagcagcctctgaataaaatttgttctttgatgagtgttaacaacgacttgaaagaatttgatgttttgatctgcctccttaagtcataatttcttagttctttgcttccaaaaaaatctctttttggtctaacacataaagtaattgcttcttcatttctttataccgttggactgaggcactatctcttttactttttgagtgatccaactccttcttgcaatctctaatccttcttttgaaatcacctataaccccatgttgaaagcttcccgatacacaatgaaattttagcaaacaaaccttcttcagtcggagtatcccaacaatcccgaattatttgatagcacataggttcttttaaccaagcattttcaaagtgaaactgcttcgtacctacaacatggttagcgacaatcaggacgaggaatataggactatgattcaaagtcgaacgatgaaggttatgaggttgagcattcgaaaacatttgaaaccaaactatatttaccaaagctttgtcaaggcgaacctccacccagttaaggtaacccctatttttctcccaagtgtattgatgacctacaagatctaagttaaccagatcacagtctgaggggatgacttgttgaaagctttcaactaagcttcttggatacgggttatcgccctttttatcaccttgactactgacattattaaggtccccaatgatacaccaaggtaacgaagatagcttatgaagtaaattccatgtttggctacgtaactctcttttcggttcgccatagaaatcagtaagcctccaatttggttgcccctcaatagtgacaagaaaatcaatgtagttttgagagtaccctgttatacgacccccattctcttccttccaaaaaagagcaagaccatccatcgtctctaccttgggcctcaacacaaaacttcccctcaaaacccaaacctctcccaacccaatccactatattcttcaaacacttcgtttcacacaaaaagataaattcaggcttcttttgagatacaaactctttaaggaatcaaaatgtccataggttcccaagcccacgacaattctaacttaaaatattcataattcttggcaggcctatataccaaaactcgccccaattaaggttttttttttttttttttttttgtaaaatgccactagtattttccttttccaaattggctgcaaaagccaagtcttagttaaccaggcccatttccacatccacttgttaaggcccattagaactttccaatgatagccttcctttttttttttatcactgataagaagagtgttatcaccatccaccttatctacatttaaaattccctttgactatcgtttttcattaccattaatccctccagtaacaatgacctcccaagatagcatttcgctctccctcaatctttcttcatcaaatcccatagtatcctctcccataaacctcatgttagcatttcgctctccctcaatcttacttcatcaaatcccatagtatcctcccccataaaccttatgttagcatttcactctccctcaatcttacttcatcaaatcccatagtatcctctcccataaaccgcatgttagcatttcactctctctcaatcttacttcatcaaatcccatagtatcctctcccataaaccgcatgtcaacgttaccatatgtaatgaccgcatattagaatatagattagtaaaggcaattagcattaattattgacatttttatagttatttatgattttattatgttatgggtcctatttttagaactggcattagagttataatttctcaattctggagnnnnnnnnnaactctaggagtattatttatattaaatatgaattatgtaatttttatgatttttgcttggcaatgactgaaaatgcgatggatggccattagagtcacatgggtaagtttagaacctatttcttaaccggacaaatatttaagatatttagaataccgagtttaagtgtgattatagttctggactattttacccctaggcttattattgcttaagttataagttataagttaaaaggacattttgggaaattcactcattgatttaggtggctggttgtgggtgtgacagatggccattagaaacacttcaggcttggtttattgaggaaattggggaaataagtaattaaaaagaaaaaaaaaaagaagaaaaaacacactttcttgctccttttccttccttgttcgaaccaacccagaccaacagcaagtttgagatttcttcgtatgattttgaggaattttagctggatttaactagagtaatcctaaggtaagatccctagctacttcttgctaagttttataaatgtttttggtagttcaagcatgttaaaatggtgattttgttgctgtgcgagttagggttgatatgtgattggtttatgttgtttagtaaagttgttttagatatgaatttactggttttgatgcttaattcttgggttgagcaagactcaataatggcatattgagtttttgtgctttttggctgttgtttttggattgattctgttattcgatgttggtacaggtgttctgaaaggtttggtatggtttggacacgatttgggcaagatttgaacttgtttgggtcacctgatgtaaactggttaaccaattttacaggccctgtaaaactggttagtcggatcaggggcaggtttctcgaaatgttcgatttgtcggttcgtgctatttttagagccttagttagttatttccttgatatttagggtgttgttataagaaccaccaatagcagaacccttagtagtgagttggcactactacaaaaggccaaattcgcgacggtcccaaaaacgcttttttttgggacccgtcgctaaaaaaattatctgagtgttaaaaa

SEQ ID NO: 114902 - DNA, 3162 bp, Cannabis sativa
ttaaataaaattgtaacggcaagtaacaacgacaacatagtgaccattaaataaaaggtaattttgttgaattaacctctttggtagttgagcaaaatatcttggtataaaagaattattcaaatgcatcctaacaaacattttctgtttttaaaaaagaaaaacatatatattctaattggcatacataaaaattaaattattattctaaatggatctagcttgctgttgatggagcaacaaattaggattttattctgcagtttaattttattaaattcttttttttttcttatttatgtgaatggagtgaataaaagaaaaacgtatacttgtgtgtgtccactaaccatataaatacatttacaccaatttctaagaaatattgataagattcggtggtaacaaaacaaataaagtggtggcacaaaaaatattattaataattcaattgaagggaacaaatatagttaggtaatatattttggtatttttaaattggaagagtaggcattaagaatatatttcataatggcatctaactttcactgaaatttcctttatttacttttgttttcttctttatctttacttttctttccttacttttcttcccttccccaacataacaatcctttacttccacttcaaatagcatacttcagcttaaaggaagttcttcaggaataacttttgaattaatcaatgaacccaagagttgactttggtatttccaaagtctaaatttcaatttattcgcaatttattttcattaaaaaataatattttccatgatgagtgattatagtctttactccaataaattcatttcctctcaaaccgagtcgttgaccattatcaaaaaccacaaaaagatttgaaaagaaggcaaagtgagtgcgttactactacgacgctccttccaagtgggcccccaccactacctacctttagacctttacagcaactactattttgtcttctttcaatttttcattatagtttttttttttttaatttttgcttaatttacccctaaattaaaataataacgaataaaaaagtccaaccaaatctccgccattggattgacccagtaagctttgactttcgaccattcagttttcttttccatttcattttgtatatataaataagccctctccctcattcacactcttcccaatcaaaatatcaaactcttcgcatctctctctctctctctccatttgcgagctccatcaatggcgatcgatcttatgggtttcacaaaaagagaggatcacatggccgttcaagaagctgcctcagctggattaaaaagcatggagaatctgatcagagttctctccaatagtaattcatcctccgccatcaaaaaccaaacactgggccatctcgatttcagagaagccaccgatttcaccgtcgctcgattcaagcaggtaatctctatcctaaaccgtaccggtcatgctcggttccgccgcggcccagcaccatcaaatccccaacctgagaatcctaaattaaatcagaccgaaatcgttccggtcaagccctctttttcaactgagacttcacgatctgagttctcaatgagtcagaaatcgaaagactgtttaactctttcccctcctctgtcttctaatacttcgacctcgtttttgtcctcgataaccactggagacgacagtgtctcgaatggaaaattggggactcttctctttcctccgcctgttccagttatttctgccggaaaacctcctttggctagccggaagagatgtcacgatagtgttttctctggcgacgctgccggcaaatcctctgtttcttgtcattgccacaaaagaaggtactaaatagaaacaatatgaaagtaattttatttttatttgatatgaatttatttctgatgtctaataaccaattttcatttattttcagaaaaaataggtttagaaagtccatcagagtaccggcgattagctcgaaaatcgccgatattccacaggacgagtattcgtggagaaaatacggccaaaaacctatcaaaggttcaccttatccgcggtaattttatttccataatatcttcaattttaatactgaatagctttcttttttttttttttttaatctcaaaatcataggttttctaattttcaattgtaaattttgcagtggatattacaagtgtagcagcgtgaaaggttgtcctgcgaggaaacacgtggagcgtgcaagagacgattcaaacatgttaatcgtcacctacgagtgggagcaccgtcactctaacaccacgcccgtcacgggccttgccttacagtcaactcggtgaacaactccatgtagtttcactttcaactgtctttctccaccgattgatgtcgtacgatctacgatggaaggtcggtcccgtgccttgcacgtgagtctctgatcgttgccgacgtagcgtaacgtaacgtagcaggaaaattaaagtcaaagccctaaaagtcaactataccgtgtaaatgaaaaccagcagcagaagcaagcaaggtgttttgttttgttttttatggctttttttgatgtaaaaaaatctattcgtataaaatgggagtgggaatggaatataaatatttttgttggttatcaattaatttattcttttattttattcgtatttatacaatcatttccttattttttcttttttgaaaaaaaaaataaagtaatgtgtaattatttcgataaagtcttcgagattggaatcctacattgaaaataggtatgcatatggaggaaaagtcaaaagtgaaggttgaattgtctatcttctggtccatcctagaaataattagacttttttattgttttttttgtcgttttatgcgtacttagctgattggagttactgttggtggatgccattgccagctaaattagtttgtattttgaaaataatagaaaaaaacgacaatcaacaaagttaaatttaatttatctcaaaaaaaaaaaaaaaacttaaatttaaaagtagagttgactgtgtaccctttattctgggcccactgagagcggacttttttttttttttgaaagaaaggagcccactaggaagacagaaaatcaaataaattgcaggggtcgtctccaatccaaacg

SEQ ID NO: 114903 - DNA, 3069 bp, Cannabis sativa
  modified_base (1076)..(1115): a, c, t, g, unknown or other
aaaaaacattaaatcaaacaaatcatggtagactaacactttgtattatatatgatattccaaatgtgaattaatatatagaatagtccatatgagattgcattggtgggaatttgcagggttatggaatgacagaaacttgtggaattatttccattgaggacagtaaggaagggtgtcgattttctggttcaactggcatgcttgtacctggaattgaatccaaaattatgaatactcaaacatggatgccccttcccccaaatcaagagggagagatttggcttcgaggacctaatatgatgcaaggttattttctttctttttttttacccctttcttttggcagttttaacttttaagtcatttctaaatactgtcttgttttgcaaaatagatattttatgttatttttgtaaaggagattctttaaaatggtattcgtaacactgtaaaataatttgtataaaagaaatcattaatttatcaaaattatatattttatgggtttttataaatttataagaaatatgatatttcttaaataaattttttttttaaaaaaaatagtataatatttttctttttccttatttcttttttgtttttttaattttctcgtaaaatattttttccaaaaaaagccttatttttgtaaattttgctaaaaaaaaatcatgtaaataatatttaaaaaaatctattctctcacaataattatgctcttttttcttttttataatataataatcaataataattaaaatggatatgacttgtttcaggctacctaaacaatctagaggcaacaaaaacaaccatagatgaacaaggttgggtaaaaactggagatattggatactttgatgaagaagggcaactatttgttgtggatagacttaaagagctcatcaaatgttatagctttcaggtatatttatatattataattatttatattattggttattagttaattcgttcatgttaaattactattatatacaattaaatgctcacaaacaattaagatcaattattttatttacgatactgaataataataataataatannnnnnnnnnnnnnnnnnnnnnnnnnnnnnnnnnnnnnnntaataataataataataaacataccttaatattaggagtgttgatcaaattgctcatactgcataaaccggccgcactgtactataccgcataaaaaaatatggtttgaaatcttttgcggtgcggttgcatttttttcaaacctcacgatgtggtggaatttgcagttttaaatttaatatttgcagtttaaaccacaccgcactatatattacaaaattactaatttttacaatatgattcttattctattttcatataagaacaaatatatgtaatatatgtgtatattgtattatttttttaaagataatttaatataatgatttaatgattagtatatatgttatgatgttaaaactttaatatgattcttttttctttttttgtattgttaaaattttatagattgatttttaaatttttattataatcttcgataatgatgatagtgtaaactgctcaaactgcatcacatttttgtagtgtgatttttgcagttttaagatgatctcacagtagtacgtttgagaaattacaaaaactgcatatgcggtttggtttgaataaaaggtcacaacccataccacccacatcgcgaacacccctatttttaagaaattactcaatattgagcattccctatttgtgagtctccttgattcaccataatgtcttctaagcattgagggagcttatggaatgcatccattagtaaaaaaaaaaaacatttaccacctaatcacccatatatatatatatatcatatttcactaaaatcacatacataaatatatgctaatttaccctaaagggtaaagtggacatagtttagactcaaatgctagtggtggtggactataacttaatgggccaatttatagtcattaaagtactaccatgtgcttcaaatacagttaataaatccaaccatctccttatgatcctaattacataattggcatcataccatgcatataaaatataagctaatattatcattgtgtgagcaacacttaattatgtaagtccatataaaatattctaacattctctcacttgaactgcataattacaccaatatgtgctcactaagcaatagtgtcaaaacacagaaatctcaaaaaacactaatgtctacaaaactaattatgcatcatattatattgacaagatacaaatataatgcataataagacatttgagattcatataacacaacgactattgatctggatccactcgatcatagtaccgagactaagtcactgctcacatcaacaagtgtgcacacacaacatcaaagagttgtccaaaatatgcatgtattcaacaaccaataacaattcttaacatgtttatcatacatgaaaacaataactcccactgaccaaatacatctttggctccaaataatcaaaacaagaaaagtcttttttgtacatttgttcaggtaagttgtatcagtgtatttgttgacatgttgtctgtaagtgcatgttatgataccccatgactttctcactacatatggaacgtcatcaccattaatggaccaataatactcaagttccaagagaaagatatgattccgatatttatcacataagttcagtaaattcacaacagagtcaactagtcttaacacgaaaataaaatatcgcaattataatgtacaatcaatgtccttgtaacacaccacacactctacctttacaagtgaggatgatataaatatgcatacaacacctaatcacatataactccccatactattctactcgctttgtatgagagatgaagttgtaggtgttcatatgacaattacaaaatagctcctcctagaatcatgaatgcttataagtagattttatcatccatgtagcatgtccaattaatatcagcagggccgaccctaaaaatatatgggcccaagatgcattaaatgttgggg

SEQ ID NO: 114904 - DNA, 2097 bp, Cannabis sativa
aaacatattacataggacttcttatttatataataatttttcttcaaatgctgccaacttaaaagctgccgaaacaatttacattaattctacgaaaaaaaaaaaaaactcatttcacctataaatcatttctccctcttctctaaactctctccacctccaaaccaaaataaataaataaaataaatttaaaaattaaaaaagaaaaagaaattgtggagagatcgatgtgtgtatagcccaactataatcaaacacacccacacaaaatgagcttgattttaggcttattttttagtcaaattcttcttattaccacctctaatgctcagcttagagttgggttttacggcggatcatgccccgccgcagaggccattgtccggacagtagtccgaaacgccgtcgttgcaaaccccaacaccgccgctaagctccttcgtcttcattttcacgactgttttgtccaggtatatatatatatatgtatgtactatatgtcataatatgtatacattttaaaaaataggtgattcatgagatgtatatatttggatttttgggggatggagcagggttgtgatggttcgattctgattgaaagcgttcctaatgcggagaaagatgcatttcagcaccaaggtgtaggaggttttgaagttatagatacggccaaaagagaattagaagtcatttgccctggtgttgtttcttgtgctgatattgttgccttggccgcaagagacgccattactttggtatataattatatattattattattgttcgtatttattttggtaattatttgtgaaaatgatgaatatacataatgttttaggctcggggaccggtttatgaggtgcctacagggcgaagggatggtcggatttcgaatcttcttttggcgagcgatatgccagaggttagtgactcaattcagctaataaaggccaaatttctaaggaaagggctcacagatagagaccttgtagtcctaactggtattcttttcttctctctcttctttctcactctatcatctcattatgcatgcatgtttgatgactatgtgtgtttggtgaaaaaccccaaagtgatcgatatatatatatatatgatgatgatatgaataatatttgttcatgtatatttactttaatttttgctataaagtaaaactaataataacatatatatatacatataaatacactacacatatacatttacttattgcatgtcgtgtattattataaaattaattcactatttgttattattatagtcttattaagtaactatattttccaagaaaaaacacagatagtggtgaccaggtgtttggaccttttatttagtgtacatacttattttggtctgaatgtattgtgtcgatgagattatggttggacatgagaggctgcatgttatgttagataatcgatttattactcaatctgtttttatgtgtgctttctttgcatgtcttccattttcaaaccatatacagacttggctgtctttttcctctcatttattcaggttaatttattattatttataccataaaatcaacagaaaaaaattacccataaatatatctatatattaattgtggttatctcttttttttcaaaaaatgtagttctcttcattcaaaaaaaaaaaaaaatggctatgtaacttttttaatttatatttttctattaaaattgacggttaaactaataccgttaaatcaatcaattaattaatttttttaaaaaaataattataaatatttaaatttaatttaagagtaataataaaattagataattattattttttttatataaaatttgtataatggtcttattattagagatagaaatttatactatggggatgggtaaccgcggggacacgcccctaatggggtgggaatttcccgtcttggtggttaatggggcggtgatgggagacaatttcaatacccaaaacgggtatggggcgagacagggataatactatccacaccatatccgactccgatatagatatatataatttttttttattcttaacatatatatagtatatatatcattgata

SEQ ID NO: 114905 - DNA, 1453 bp, Cannabis sativa
  modified_base (1137)..(1140): a, c, t, g, unknown or other
agcaaagaactatccaatcaacccaagttttaataaaaccaataaaatttaatgtaagcccaaataaaagtctaacaatatgtacatatataattgttagattgagaatgaatatgagaatgtagaagcagcatttcatgaaaaaggagcctcctatgttcgttgggcagcaaaaatggctgttgatcttcagactggtgtgccatgggtgatgtgcaagcaaagtgatgccccagatcctgtggttagttgtttttttccatttaaaatgtgaagctgaattaaagattgtttattatatataaacacattaaaaagttgacttttcaatatttgattattaataattatgcatatatagattaatacatgcaatggaatgaaatgtggagaaactttcaaagggccaaattcgccaaacaagccatcactttggacagagaattggacatctttgtataccacctatacctttaaaaaaattgcattaaaaaaatatatatatatttctttcacaagttatacaaaattgttgaaggtacgtttaaattgtgggattattttttttttccctttaatttaatactattatttgataacattgatctcagcttgcaaatatatggtggggaaacttacataagatcagctgaggatattgcttatcatgtgatactttttattgcaagaaataatggaagctatattaattattacatggtatgacacactaattatattatagaattattattgttatgtcattcggtagtgattcaattttttatgcttttgttttaaattatcaatgtcattttaacttaattattaattaattataagaatgttggccaatgtctttcttgtactatagtaccacggtggaacaaattttgggagaactggctctgcatatgttataacaagttactacgatcaagctcctcttgatgagtacggtaatattcttgtatttcattttcacttttatagattagataagtaatattaattgagtactaatgtgggggctatatagccccacaaacaaaaatattgtttttcatgtaaattttttaatttgatataattataaattaaaataattgaaaaagttctcacaaaattaaataaatnnnntaagagtgataataatataagtataaatattttcttcatgataaataaattcctacaaagtaaaaattttgaatccatcactatttactaccatatagatttagtattccccacaaataatgttctggtattttgttctttattttttatatggagctcaaatataaaatggcatttcatgattgaaaacaagtatatatgaagtaaattaataaaaataatataaatgttaaaacctcttattatatatattgaaaaatcgtgtttttgcaaatgtcagttgtatataagaaaatataaaaactgtaagcgt

SEQ ID NO: 114906 - DNA, 1068 bp, Cannabis sativa
aatctttacgattaacccattcatcaccgccaaacacaacaaaacccctctctcttcatgactaatataattcattttttgaatggtattttgattgtttatttttttttttttggaattcttttctcaacgaaatttgagtgagcgattgagtattcacgatgttgtagtttaagcagaagaaccagactaaaagggcctattatactcgttgtcagtgaggaagaacttggcactgttgttatcgacactgctttcaaatcatatacacacaaaggccatcttccaactctcggctcatatcttaatgatttccttctatactgtcccaatattgttggatcagatggtaagcaatttttaaaactttattcattaattgacactacataatcattggattagactccttttttttttggttgttcccattgtcaatgtgaataagtgttatatcaagtaacttagatgaaaaaataacaattatgttgactattcatgacaaaagcgtatcatcaatgacgatcatatgtatgtgcaaataattcttgtctaagaatctaattttcgagatttagaggcagacactaaatggacttaacaactggagcaatttggtgatgatctaaattagagactatgctatttggcaatatatgtcctcgttaccaaattaaattcttaatttttggatgtattttatgatgaaattgctcaattagatagaaatttctcatactctattttgcggctgtagttagtgttgccaaataatttcttgttccaatttgaatggataatatttctatcaactaaaacatgtattttttgatttcggaaaagagagaatggtattgaattggatttttatgcatttggtttgttttcattttgtattaaacataacattatttaatataataattaaaaattataatacattattttttataagaaattataatacaactaagtatacgtgcatcgcacctaatttcagcacctattcattcttaaaattcatgacttctggtaggctgacagtggtagcttcttaggaatacttgt

SEQ ID NO: 114907 - DNA, 3113 bp, Cannabis sativa
  modified_base (3067)..(3087): a, c, t, g, unknown or other
ttttttaaaaaaaaaaaatggttaaaccaaaaattgccaaaatcgccaaagacagccataaaccgtctaaaactaccaaaaactatccaaagatgccaaacttaaaaaccactaaacactgccaaaaaacatacagtcagttcttatacggttattattttgtaaaaggtcggttacattttttgtaaaataaaaaccaaactgacagatcggttataaatttgtaataactgaccataactgaccaattttcacccctaccaaaaatatgcctgtctcattttttttggacaaattgtcacccccaatgtaatctccacaaaaaccttcatgaatttcttgcattatcgcatgtgcttcagttttagccatgcacctaagataagacatagttagtcccctcaaatatagcttctcattaatcataatgtatcggggcccttgatattgcaacttcctagacatggccctatcctggggtagctctccgaacgtcaaaaacttaatcaaggaatccatccaagttggtccttgattaactacttgaacttctatcttggacaagatactaggttccataaggtaggaaatggggactagccccagtttttccatttctttgtcggataccaacttagccaggcagtctgcttgggcgttattttctcttggtatttgttcaagcatatattttttgaattttggagtagttcctagatacacgagacataagaagccatgcgctctcagcgagcttaatactcccctttcacttggttcactaccaattaggaatcattaaatacctcaatatgcgagcccttaccactgtagatagtcttagcctgattagcagggctttatactccgcctcattgttagacgcattgaacttgaaccgtaatgcactttagagcttcaagccctctaggaatatcaatatgatatcggtcctttatttgttctcgtttgtagcaccatccacatacactttccaagttgatatggcttccttgactacattggaatcctagttgccttcattacattctataatgaaatctggcagaggttgccctttgattaaaatgcgtaggacatactaaatataaaattggcttaactccatagcccatttgaggagttgaacggaagattcaagtttttgaagtacttttcaaagagggtgattagtgtacaccttcattacatgagcctaaaaatatggccttagcttctaggaggcaataagtaggcagtaagccaacttttccatcttccagtagcgtatctccgcccccaccatcctcttgttaatgtaataaaccgggtgttgaactttgtcttcctcccgcaccagaacagcactgattccatgttttgaaactggcaggtataggtataggttttcaccctccactggcttagataaaattggatctctaaacatgtgttcctttaagcttatgaacacagtctcacatttttctgtacactcaaattttgaatatttctttagaatgttgaagaacaaggcgcatttgtaatttaacctagaataaagtgactcagagcttccacttttttttatgaggctttgtacatccttgtgtcttctcagggatggcatatccaacaaggcttatatcttttcaagattggcttctacccccctttggttgacaatgaagcccaaattttttccagattttaccttgaaaagtgcacttcttcaggtttagcttcatcttgtacttttgcacaaccgcaaaacattccctgaggtcacctacgtgatccttagcggtcttgtatttgacaaatgcatcgtctacgtagacctccatgttacgacccagcaagttttaaaacattcagtttactaacctctggtacgtggctttggcattcttcaatctgaatggcatgaccaagtaaacgtatactcctttgtcaatgtagaagctagtgtgttcttggtccgcgatgtgcattttgatttggttatatctagagtaggcatccatgatggatagcaactcatggttggatgttacgtcaactatctagtctattcttggtaaagggaaacagacttttgggtatactttattcgaatcggtgaagtctatgcaaatttgcaaggtcccgttgggctttaagacaaggaccaggttggccaaccattttgggtaatatacattcaggaagaagatgttggctaacatattttgcacttctttctttaaagcttcgacctttatgggatctaagggtcgtcttttgtgctgcactgtgagcacatttagattcaagttaaaaacgttacagatctcatttgagtcaatacctatcatatctttgtggtaccatgcaaagatgtctgaggactcctgcagggtgttcaaaatttcctcctttacctcacggtcaagattccttcctctacgaatgagcttgggcgggtcctagtcacaaatttgaatttctttcgtttcctccatgggctccatcaccctctctgcccctataagcggatccaacttgtcttcctcgaattggtggtttatgtcccttctttgatcgactgccaggatcgggtgctttgaggctacatatgtaacattttttggcctcagcttggtttccttgaatagttactaatcctgcagactgagttcggaacgtgagacataggtgtcaaatcgatgttatgtccccaaactccactagagctggtcctcccaagatagctttgtaggaagttgggtagtcaatgataacaaaagtacaatactttgaggtactctgtggagtatcaggacacaaggtgattggtagccgatttttctcatgggaactaatagtctcggaagtcacggacatgtttggtgattttgaagggacaatgcttcttcaaatacttttcaagttggtaaaacccaatcttgctagtattggtctgcatcagttgaggcttcacatcgtaataatacaacacctcctccagtcctagaagctctatatctcagatcttacacatcacattgttggaaattattttacnnnnnnnnnnnnnnnnnnnnnaagtatgtttattaacaacctaaata

SEQ ID NO: 114908 - DNA, 670 bp, Cannabis sativa
tagatatattttttaagaatatgaattgaaagaaaaaagttaaaaaaaaattagtacaagaaataaattttatataaattaaaaataattaaaatagagtgtctttaaaattttttaaagtgtgaataaattttttctaaaaattaccatagtatccttcctatcaaacatagtaggaaagataggagaggtgaagggagagaatataaggaggagatcgaatccattgtttaatgatagaaaggaaaaatggaggagagttaggatggagactttttctccctcaaaatctcaaaaatctaatccctccacttttaaaaagatttcgaagaaagacaaatttaatatatcaaataccaaatatttatataaaaaaatattgtggtaattttactaatttactcatcttagtctttccaacttactcttaaaatcggagagttacaatcatcttccttcatcttacactctgtctatcctaatctccctacttcttaccaaacataactaagccacctaggtagactacaagtaaatggttcatcttctaaatgtctgaataattattttatggctaattaagatttttgttcactgaactctgacatgtactaaatcatggtccttgaacttttaaggtcgttaaaaatacccctgaactattgagatt

SEQ ID NO: 114909 - DNA, 2886 bp, Cannabis sativa
tttgtccatggcattatcccattctagtattccatgagcttggttgaaagtagtagaatctatatatatgactagaaatggaaaatatggttgcattgaacattcgagataacttggagtagtcaagaacttaagataaagggcgtgcaatgacaaatattgaggcttgtgaacaaaaagaagaggtgttagtggacaaaaaacaatgataatgatttaagaatgagggattaacaaaagttctagctggtctacaattctaagatataaaattgggagctgcaagaggcgaaatatcagattctatctgtggagtagaagatgaaatatcagattatgtatctaggaattgaaacatgttatgatactgaggttgtaatgattcagtagtaacaaaaggaaacacatggtcatgaaatataacatctcttgaatagaaagtttattaatgtttagatctagaagttttttagccttcacgccaataggatagcctaggaatacacaagagccagacctatgagagaacttagacctagaagtaggcagtgtagaatcataggccaaacaataaaaaactttcaagtgatcatagctaggaggcttagaattaagaacttcaaaatgagtcttgtgtttacctatgctaatacactcattctagtattctaaaggtacataggattaaaaaaaaagttccttagcaacattaagaagatgttggtgcttcatctcgatcactgaattttgttgaggtcattgtacacaagaatagtaatgtaaaattccaagagaactaaacaaggtgggaaatttaaattccttagcattatcagacctgacccctttaatattgaccccatattagtttttaataatatatagctcaagttacaagttgaaaagagagtaaaacaattacaactcacttaacaaccgttaagtaacttgattacaactaactaacaaacctaatcctaatagttagcaaaggcaatcaatgcatttgatgcatttaaattttggctcacttgctctttttaatccaaaagtagacacttttggaccttattttgtgaagtgtttgataaacaatttcaagaggaagctgtctagccttcatcaataaaattatatagagaaccaccacaactttccaagtaattctaggataaaaattgcaccataattgggagccccaatgttggtttatgctcaaaattgagatcaacaatttttacatcttttgttgcccaaacttagtttgctttttcttgccaaaaccatactcttttggcattaactaataaatgtgaggaaatatgtactttggtagttaacatgtggaaaaaagatgtaaaattgcaaaccaactgaggataattttaactgattaaggtattttattttacttattttattttttgtttatccttatggacagcagatatgactgtatcaacacgccctgcaaatcttataacacatgtttgtggatataaaccttaaatatttactttagccaacaaccaaatcctagatataagaacccttggctttacaaattattgttgagctcatcagaaggagcgcaatgtatacctaaggcagctgaggaccacatcttccacaataatctacttttgattgttgaagcgtcattaaagaaaattatttggatcgatctcaatcttgttcttgaacttctccatggtagttttttttttttactagaatggttttacaatcagtgtaagtaattttaactttctcctttaaccttgtctgagttttaaattattcttttttgtttccactgactaacatcatagaaatgcataagttactgttgtgactcaatcaatgaattacgttgcaaaaatactagaccaataaacatgcaatcaagaataatactatcaaataatcacaagaaccaaataatgaattaaagcagtaaatcaagaagaatataagaccagggtttaacaagtttgagccttgtgtaatgctctacatttcagtcggaacaacaacaatcatatctttattgatattagtgtttttaaggttacaagaatcctttcaaaattttacaaagatcagaagatgaactttctctcttttagtttagactctctcacttaaccttacacaatcatgattttttctcaagcttttgatggtctaattcactatagattacaaaggtgatagctatatattgatttgcatagctgcaaaaattagctctgattctatcgtggctaattaatgttgccttaaattcttcaagtcagtgccagtaacatattccacatcagcttcagaagcacgcttttagtgcggagaatccagaagagttaatcctcacgagactatctgatgaatacaagtactccctccatatgggcattcaagactgacaacaaactatgtgaaaatatatctcttgactagtgacaagctatccaaaaagactatccttacggaggaaaatctatcgggaagaaccatccagactggccataacttttcgaacaaagttttttggatgaacaccaagatttccggaacttttttccagagtaacaaatagctttcttttctggaagaagaaacttgtaaccataattgaccgttacgattagaatatttctattctcatattaaatgattgctatacgaagaaaaacataatattaaacaaaacaatcccattgaacttaattaatattcaaacacagaagataaccatcatcaaacttacatcaacaatcaagaaccactactacaaacaaaggcctttaatcccagtttttaaggcattttatcccggttttcgctaaaattaaaaccggtatatatgcctgtgggataaaaagt

SEQ ID NO: 114910 - DNA, 4282 bp, Cannabis sativa
  modified_base (119)..(122): a, c, t, g, unknown or other
ctgattctatcgtaagcgaggtttaaaacttcgaggagtccctcagggacatctcagctttctttggaaaatctgagtatacgtgtcctctaagtgggtctggtctcgagtttctaggnnnnagaaatctcactataacagattccctccaattccgtcttatgttttgagaacagcattaaaatctcccaaagtaagccaaggctttacaggaaatttaagtttagacaagtcctcccaaagagctttcctttcttctgctgtgttgtacccgtatatgaaagttgcacaaaaagcatcttcacatccagccatttgaataaagcagtgaaccatttgtggagattcagcaataacataagttctaacaaagcttttcctccaaacgatcaagagtcttccttctatagtaggactagaatagtaatcccagttgacaaaattattatccatcatctctttaattttattctctttaagtttggtctccaagaaagcaccaactcctaccttcttaatcttacaaaattcagcaactacaccttgcttatctttattgttgattcccctaacattccaacaagcaatcttacaactatccatgggaatttagagtaaaaatcttgttaccttgttcctcaagaagcggttcctcttcctctctactaccttgttcctgtagagcactaaaagcattaccaacttgctgctgaaaatcagtattagagccatggtttctctgaattttcccctggatagtcttcttaggaatgtgccattccttgtcctgcacagctacctcggtattaccatgagaatgactgtaatcccgctgaatatctcctggctcagctttagagtcagttagtagaccagttgcagatggttggtggtgtttttttcctggtttcagcttagcattagcagctggcttcttcttcatatcctccttacgaaagtccactatgatatgaccaaaacctgagcaatttttgcatttgataggcagccactcgtaatcaattctctattcaagaagttgtccatgttcattaaggtattgaaaggatctaggaggtgagtccgttatatccatctcaaccaaaatgtgagcaaactggaccctagtgcaatctttatgttggtctaccatgataggttttccaaccatactaactaaagcactaagactcttatttccccaatattggagacccaaatcatgtagccgaatccacaaaggaatagatcttaccaattttacagcattcaaatcagttgtccaaggtctaatgattactgttttcttatcaaagtgtaaaacacctgcttccaaaacctcatcccttgttgcctcatcatgaaatttcaccataaccagccccttagacatcctggatatctgaactatcccaaggtgaccccaaacacgcttaataaagccttcaaaaattgctataggtagattagccccaagtatcatacagatcacagctgaattccagttttctgtttgttcactaacttcctcaatatcgacttgtgctattttcactccattttgaattattggtttagtaaaagagagcttcgagtctcgagatattaccttttccttggaaaatgatttccaaaggctcttgacagattcttagaattgatcctatccacaatctccttcctgctccaattccacttccttagcccagctcatgctaacctgaggcgtatgaaactccggaatgcttggagaaagtcgagccaaactctgacctaaatcctcttccaaatctttgatagtatcattattcaactcagggaccttaccggtagattcaacttcatcctcagctggtgattcagggcggacaccagctccgtgaggcttgatgataggctttcgaactatcctcttcttcttcgccatgggagaagcagagcacagctacgcgcaccttcaaaagttgttgttattggctacaaaaaatcagccattgatttagccattacatatacatgttcttaagtgagtaaacgtttgagtacctaaagctttagtgaataaatctgctatttgattagttgtgggcacatgagatattgacaacatatttgaatcaactagatcacgaatgaaatgatacctgatgtcgatgtgtttagttcgggagtgctgcactggttttttagagatatttatggcacttgtactgtcacaaaaaatgatcagtgtttgttgtgggtgtccataatcaataagcattttattcagccaaattaattaagtgcagcaactaccgactgcaatatattttgcctcggcagtagagagtgaaatagactgttgttttttgctataccaagagactagattattcccaatgtaaaaacatcccgttgaagtacttttcctatcatctagacatcctgcccagttagaatcactatatcctaccaaggtggtatttgtgtcacaactataccagagaccatagttaacagtcccagcaagatatttgaaaattcgtttgacagcagagagatgtgactgtttagggttggcttgatacctagcacataggccgacactgaaggagatatcaggtcgaatagctgtgagatacaacaaggcacctatcatgcttctgtattgagtgggatctacagggtcgccagactcatcacgtgaccatttggttgtcgtgcctataggtgtatgtgcatgctttacttgtgaaaacccaaacttttctaacatagacttgacatactttgactgtgttatgaaagtgccatgatctaattgtttgatttgtagtcctagaaagaaactaaggtcccctataaaactcatctcaaactcactagtcattaatgtgacaaatgtatttacttcactttcacagattgaaccaaaaatgatgtcatcagcatatatttgggcaacaaaaagtcctttttcaagatgtttaatgaatagagtgctatcggaggtacctcttatgaattcatgggaaatcaggaatgaggtgagtcgatcataccatgcacgtggagcctgtttcaatccatataaggctttgttaagcttgtacacatgattgggatgatgcggatcttcaaatccctgtggttgtttgacatagacttcctctcaaattactccatttagaaatgcactcttgacatccatttggaagagtctaatcttcataaaacatgcaatgatgagtaagagtcttatagactctaatcgggccacaggtgcaaaagcctcatcaaagtcgattccctccacctgactgtatccttggacaacaagcctagctttattttgagtgactgtcccaaattcatctgacttgtttttaaatagccattttgttcctatcacattttattcatcaagccaagggaccataatccatacaccaagtcttctaaagtttcccatttcatcttgcattgcagccaaccaaaattcatccaataggttctgacacttttgggctcagtttgagagagatagtaggaaaacgccaacaggttctgcagttttcatctggtcaccatggtgtcattcggatcgcttatgacaactgcctgaggatgagctttttgaaccaaggttggtagtccatttttgtaaagtttggcatgttggggttctttgggcatagcaatgctgactttcaggttccctgttctgacaactaacatctgacatctgcatccacctcatctgataatgccggttcgatgtttagggactttgtaggagtgtcaggatacacctgggttggcctagtggtgactggtctaggtctagagagaacaggggcatcatcctcgacactcacttcttcactacattataagtcatcaaactttacgttcaatgattctaatacagagtgagtccttttattgaataccctgtaagcaggactgttggtagagtaacccaaaaatatcccctcatctcctcgagggtcaaactcacctaagtaatcacggtcatttagaacatagcacgtatatccaaaaatgtgcatatggctaacatttggtggtctccctttccatagctcataagcaatttgagatgtagtgcggagatgaactctattgcacacatagcagatagtattaaaaacttctgcccaaaaacgttttgatatgtccttggcttgcatcatgacacgagccatttcttacagagttctatttctcttaacgactccattctgctgaggagtttttggggctgaaaattcatggc

SEQ ID NO: 114911 - DNA, 4584 bp, Cannabis sativa
  modified_base (4095)..(4095): a, c, t, g, unknown or other
  modified_base (4373)..(4376): a, c, t, g, unknown or other
caacaacaacaacaacaaaaagtaattaatagctaaaaatgcagagcaaaagcatttctacaacatctcaatcgtttagctacatttgttctagagcaagcataactagcatagaggcagcagacaatattggattagatcacgatgatcatgatgatgatgatgatgaaggttccattgttctgtctctcggtcctcccggtcaacacaataatgatatctccaagcgttactactacaaacccatcttccatcaacaacatttttcctcctcaaaccaaccgcatcatcatcatgaaaaatataatacaactcaaatcagtactactagtactagtgagaaagctacaagtgttaccgtagctcttcatgctggccttccagattctcatgatcatactcgtcagactggtaataatcataataacgaaactacccctattgatcaaccccagtattggattccctcacccgcccaaatcctcgtcggtccaactcagttctcttgctctgtctgcaacaaaacattcaatagatacaacaacatgcaggtaacacattttttatatatttatattctgtcaaaaataccttattaattagtatacactaaaccctaagttgaatttctttaaatatatactctcatataaggttagagaaatccaagctcaaaacctctatcataaagttatggaacagtactagtttggtaaatataaaaaagagaattaaattataccatatctgaccgtgtgggactaatagaatgaattgtatgtttagatgcacatgtgggggcacgggtcgcagtaccgaaagggtccggaatcattgaaaggaacaaaggcagcttcgtcaatgctgaggctgccgtgctattgctgcgccgaggggtgtaagaacaacatagagcacccgagagccaagcccttgaaggactttcggacgctgcagacgcactacaagcgcaaacacggcgccaagcccttctgttgccgcaagtgcagcaagcccttcgccgtgcgaggagactggcgcactcacgagaagaactgcggcaggctttggttctgtgtctgcggatctgatttcaaacacaagaggtcgctcaaggaccatgttcgtgcctttggactaggtcacgcgcctcacgcgatggagttgtgtgaggagctggcggttgaaggagatgaagatggagaacacgataatgatatggataatgatgaagaagatgatgatgattgttattatgattatgaagaaggtgataataataatgatggtcttcgacctcttttcttttgaatatattatgattaattaaccgttaattaattatgtacgtaacgaaccagttataataataaacttaatttctttatatttctaattggtgcactacgtattaatatgtataccatgagagatcagagagagagggctagagaatgcttcgacaaagactgtaacagtatcatgaagaaagccacgtctgtaattttaatgcatattaattccggaagctacagtcatatgaagattgtacaattaattataaaattaaaactttgttaaacattacaaccttctttcaaccaataatttttatttaaaataaaatacactgttttggaatgtatttacaaattttatgtaatcttttagtgcaaataatttcactacacaattacacttatctatgtaaaaagttaatattaaaggaattataaaaccagtagtttctattggtttatagttactataaatacagcttcattcttgtgttacatagtttagattcgatccatgaccccacacatgcaccccaatatgttctatgaggacttagctaattaattggtttataccttgtcacaatatatgatttagtaaatgaaagataacacataatatatatggggccgggcacacaggcaggtggcagaagagtagtcattacaaaccaacagtaataatgcaaatatatacatatagatatatagaggatgtgttaatgtgattaattaggtcaataagtgaattccgtgagatgagctatatggctactaccagacatgcataatgtattgcagagaacagagcccacacttatataaatatatattatatattatatatctttgtgtactgttcacaacttgtgcatatttacatatacgcatgtatattagggcctagagagagagagagagagaatttaatttatttttgtgatgaaagggaaattaataagaggggcagaagaaatcagtgagtctctgagcttcgactagcactacaaagctgaaaactggggattgagtcagtagaaatggagtagtagtaatagtacgtggacctggaaggaccactttggtggtatgttattgtatattggcatataggaatacaaatttaataatatttatatatatatttagaatatagaaattggggtttggggtttcatccaaagaaaagagtggctctgcccttgcctttttccttttcagaccaactctacaataatattaataataatcagatcagattgatatatactacgaaacatcttcagtcgcctgtcccgctctttcaccttcctttaccattctatctctctatctcaataattaatgtacatggccttttctccactcccacaccctctctctttatttgctttattaatttatttgcttattaactttattatccttttatgcatagttcatgaatatacataagtgtattgtcaaatgaacaagatcgagctagctttataattaaacacattgtgattgcgttttatataaacactagcttatagtagcacgtgtgtgaggattcaatcttttgagaggaaaatgaattgagtctgttattgagtgaaggttacaagaagagtttataaagacaagagaaattagctctcacaattaatatagcataaagctaactacttcctaacctccctaactaacactcaactagcccccttcaaactatgtagttttaaaagatacacacagttgtctttcaattcggtgaaccaagtactagagcaataaataacttgagctggagcagatacatgtttcacttgatcaaattagaccttgtcccgaacaaaatacatgtcaattttaatgtgtttagtaccagcatagagtatggggttggctgcaagaagtattgtactctgattatcacaaagatagatggtactactgattaaggtatatggaacgggactgaagctatgttacttcagagacagcactagcaagacttttgaactctgcttcagtggatgactagctgagagtaacttgtttttgagaattttaagccattagattgcctctaataaagtagacgtaatagacagtagtggaacgccaatcatcttgatcagatgccaaatcagcatcacaaaacacttaaaagggagaaatatttgctagttttagaagaagaccatagtcaagagttcttcctatgtatctcataaagcatttgactggagtctagtgtgtacgtaaaggagtttgcataaatcgacacacttttttaacatagaaggaaagttcaggccttattattgtagcatattataatgcaactacaatgtaaattgataaagagtgacatctttcactggttcactgctataagtggagagcttaacaccactattcatgggtgtgttctgtgtattaatattctacatgtctgttttacataagagatcttgaatatacttggtttgagtaagaaaaataccataatcaacagcacgagtgacttgaacatataagaagtaattaatcagatcaaaatcttttaaagaaaatgttatgtgagctcttggattagttgattgacaagtgcatcatcacttcccatgatgaaaatgtcatcaacataatgttgggatttattttaccacgatctagatttattaacatgtatgtttcattaacaccctaaatataaattctctaatacgatgaaattaaaccaataaaaattcagaaaatacttacattgatgcagcagaataatatgactcattccgctcagatntctaacccttgttcctttctatcatagagtaataacaagatttgagcctagatctccttctctccttcgggttagttaccaccgttttctgcactatgattgagtacttgacttgctatgtgtgggcatagtactctatcactatgggagaattggtgaagaataataaatgagggttcaaaatcactgtagaatgtgtctctcatctactagtagtcagtgaatgaaaactaggttttggttggttgaattgaattgttggatgagatgagagcatnnnnttccttttatagtatttcaactatttaggatttaattatatggattaagaagaataaaataatgggaaaaaaatccatcactagtggacggccatacatgagcctcactagttacaattctgccattttatttcaatcacttattcttcttttaataataccatattttctaatttcaatcttattaatgtcaaaactatttatttaa

SEQ ID NO: 114912 - DNA, 3210 bp, Cannabis sativa
atatatcgattgctataaattactaatcgcttactaaataagactcagtgtcgttggctaaaagcgaggtcaacaaactcgaacatgtttttatagtagttcgatcgaaatattatttaattataaatgtgaatactattttactatttaattatgtttctttcaaacataatttaatatttaaaataaattatagtattattataaattattaaactataataaattattaaattttagaaaacattaaaaaactgcttttactagtgcataattacaccgaaaaaacttacccaaccatcaaagacatatgatgggtaagccttttttttggtacataagtgcattggtataactatttcatgccataatcctattgccgggtaactgcacatatttccacatacccgccaattgggaaaaacgtgcaatcttatgcgtcggtaaaagtcattttatatgcctatgggaaaaatttatccatcttttaacacttagttttgaatttttactggtgcatttggctattgtaccggtaaaaaccatttgactggctgagtattgcagagaagttttaccagcccagttatgcaccggcaaaagtttgctggctcgttgtgcctagtattaccagtgcaaatttgcacccgaaaatgtcctctttcatgtagtaagtaacagtactttattgttcatggtggtcataagataagtccaatttttccaaagaggggtatttgtcaggtagacccactttctccatatatgttcattttgtgtgctaaaggattttctgctttgatttgtaagtttgaagttgcttgtcttttgatagggtgtaaggtggctagggggctccttctgttactcatatattgtttgccgatgatagttacctcttttgtcaagcttctatttctgaaactaggaatatcaaaatagttctttccacttttgagcgagcttctggatagaaggtgaattatgggaaatcttctatattttttagtccaaacacaagtgatgttgctaaatggtagatttgtgactcccttggaatgattgaggattctcttgatagtgtttatttgggattaccgggtattaggggaagaaataaatcactattttaaagtttttcgagaaaaaagaatgtcaatcaatagttgagaagggaagttgttgtctagggttgggagagatatcttattaaaatccatggttcaatctctgcctgattatgccatgagtgtctttctgaatatgttgtgagattgaacgcctatggctaatttttggtggaaaacttcttcgagtaaaggtcgtggcattacttggatgagttgggagcgcatgtctcagccaaaggaagcaaagggtttggggtttcgactgctttatgactctaatcttacaatgcttgctaaacaagggtggaggttgttaaccaaatcagattagttggctgccaaatttgattttcctcattctgattttctctttgttgatcttgggtcaaacccatgtttcatttggcgtagcatttggaatgctcagagttttgtacgggaaggagttcattgtgtggtgggcacgagggaggacattagtgttctgtctcaccagtggctgcttagggataaagacccttttgtgtcttcaaggtctttgggtctgaatgataagtttgtcactatttatagtaggaaattgtgaatgagacacagagataattcatgatatgtttaatgctcatgatgcgagtcttattataaatatacatcttagctcttctgtctctaataatttttggtcttggcatggtgaagagatgggcatttatctattaagagtgcttatataatgctccaagatcatcatcaaactcaagaggggactaataactctggtttttggcgtgtcttatggtagttgaaaatatccccaaatgtgaagaatcttattggagagtagtgtccaattgtctccctacaaagttttagcttcgacaaagacatgttgatatctcagattgctatcctatgtgtaatggtgagactgaaacaattactgatatacttgtcttttgtccttttattgttagtttatgttttttgctggtttggtaaatggggtgttgattccttcttcttttagttcttcgctttgtgattcttttgagaagaggagtgaggatcaaaaatgcaagtcggccatgctttgctgggctatatggaaagcttggaatgcacttgtttggaacaaaacttcttcctcttttagtgatcttatgcttaatgctactaatactttgtcccaatggctaaaggctcagcctcgagataaccttctttctttaggagtgtgcttactagacaatggtgctgagatatggaaaaaatcttatcaaaacaacgttaaagtaaatgtaggtgttgtaacctttgagagagagggaatggttggatttggctatatggctcgaaatgaagaaggttattttatcgttgattgttcgtcttgttttaattgaatctatccatcaaaggttgttgaggctatgggtcttaaggaggcgctgtgttggattaaaagttagcgatggttgagggtaatactagaaatagacaatcttctcacagtccaagcggcatgcaatgaactcattatgaattctttgtttggtcatttagttaaagattgttaagttattctttcttctttaaattatgttgattcaagatttgtcaagtggtttgccgactgtgtgcccactttgttgttagggttcttgactcttgcatgatcgtatggatgaatgttgtattcctgcagagctatgcactattgtatttgcattcatccttttaataaagattttattctattcaaaaccactactaaaaataaacactactacaaatatgggctttagaggcagtttttaatgtctttcagcgttagttttggcaaaattcgctaccgatgtgatccaagtgacgctgtagggtctaaaataaatgacgttgaatggtaccctatggcgtcagttattatatagtaattgacgccatatggtacatatggcatcggtacatagtgaataacctatgcgatatacccccataactgacgccatatacccctaacaaccgacgccaaatctgtaataattattttttttagttaatttatttaaattatatattt

SEQ ID NO: 114913 - DNA, 2421 bp, Cannabis sativa
tatatatatatatatgtagtagttctagtcctaaacagtagtataattaacaaagacttattaataaaaaactttataaaagaattgaagaagccttcattatgaatgttaaaatcctcacttcagcattcgaaatggaattaattaagatgatgcatactttggaaatggataatacataggcatgaatataacatctaataatcacaagtgctaattaacactccacgctttacactgatgacaaaactcaaaactaaaatcttctatgtgtgtaaaatatacaaaataaatatggtggaagcatcttagttagaaaaaaaacaagtaattaattcttaaaatcaaatacacaacagtggaccatgagcatttgattctcatcatcatcatcgtgttgttgttctgtgtctcatcaaatagtacttgcaattaattttgagtgaaaacattagctatattatatatatgacttttctaatgatatatatttgcatttcagtcacaatctaagaattaagagttgagtttcagatggaaacattcatatcacgtgtcaagaagatgagagatgcaccttgtggtgtacttagtattgtttttttagaacttgcaagtgtattaaaggctaaagccatgagctgtttcagttaatgtcgaacaataaactatcaatcttgctgatttctgcattttcttaattttgtgattaatatatatttgcttcttccatggtttagctttcttcatttctttttaactttgaacgctactccttttaagaatgcttttctcattttgttgtttaatccatttctttatgttcctccttatttctaatctgtttatgtgtttaaattagtatgtgtaaagcatgtaatagtttttgtactaaaacggaattggagcaatgagattgaagaatgaatgcgatatcttcacaaattaatgtggagctccgaacatagaagggtgagttttgctcctaacttttcttgctagtcttttttttattatttttattcttatcaaattttaccttttgatgattgattagaatacatactgatagatcaaactcattaacaaaaattcttgttacacattttttcttggcaaacgtcattatcatattgccattttatattccttcattaaggactaaaaaacaatatcccaaagagtgatatatagatgaattatttacttaaataagtttttgtccatctagattctgatgtatgtatttttttgctcattttcttattctaattttactttgacatccttacaaaaaacaatttactttaaaatgtttaaataaaaatttaattatgttgaaaggactaaaatgaattgatgttggtttgattgtaacaataatttttgtagcaatctcatatgatcaaccaatttgaggatgactgcataaattagatttggacagaacagcctcttactagttgtatatgcaattgataataatctggtcatgtagaaagattgtagggcttttggggccatgacatttgactatatttttcttcggacataaataaattgaggccttggatatatgtttagaaagccgacttacatggtattatttataaatatttatttctatattttgatgagttgtttgtgtagtgtaaacaatgaaaaatgttgaagactccttgttgatgacttttaatatgaaagatgttgttttatgattcatcttctattacataaaacatattagctttaaaaatggagtttcaatattgagtatcaaatcattgaattagttatatacttttctttctctatttcagtattttttcactaacaaaattcgtattttgttgaacaggatatattaatgataatcaagcattgcaaggagtttttaccggttctagtcaaatgtcaacttcttggattgaatgttggcaatgcttttgaagctactaattgatttaattttattatttaagtttgttatgtaaatcattagcagtgaataaataagtttataattttgtgtgaaataagagtagtctttttattatatgtaatatatactgtaaataatattttcattttttttagttcttttgattttagtatttttttttttgactttttaatccctttaagtgtcagttttaaaccgacactaaaggagttttagtgtcggttataaaacgatatcaaaactcaatagtgcccgtttaaaacagacactaaagacaaaaacatacatgtctattttaagtgtcggtttagaactgatactaaaactcaatagtgtcggtttagaaccgacaccaaagttttgactttttgtctcggtggaataagtgtcggttttatgaaccgacactaaaagtataagtgtcagtttaaaaccgacactaaaagtgtattttgtag

SEQ ID NO: 114914 - DNA, 1661 bp, Cannabis sativa
ggtatatatgctgacgtggcacagcggtatttgtgcaaataattttcttaaaggtatttttataaataaaataaattttaagtataatattgaaaactccccaaattttaatgctaaaaatgatttgcgatctttatagcatagaggaaataaaattatagaggagacgacgtgagacttacaacaattaataccatgtgatacaagtaattaaggcaaaagagatatatataaaagttgaaagtatatatataagtgcgtgtgttagaagtacttaatttgagtcacaaattatgtattataatatataaacgtttacgtaaaaaaaaaaaatatatatatatatatacacataattttaaattcttataacctcaaatattactagaggaagaataaaaaacaatgaaaccaaaatcaatcggtttccttgacgtctctctaagcaaaattgaagaaatatcatactcatcatcgatcgttaattgaattaaacaatgtgcctctctcattaattaattaatagagatatgaaatatgacccaccgcgtaaaattatgagaattattagtgtaaatgtaatggtctctaaatattataatgtctaaattaaaatcgcaatccacatggaccacaaccatcctactaacttggagagttggaaatataacacaatatttataatgaaaattcttccaaacttcttgagaagaaagggactggaagaaaaaagaaatcgtgaaattaatttatcaaggcaagttgattgtgagctgaccattaattctacaaaccaatgcatcaattaaattgatctctacactacaaatattgtaccggcctaacaccctaagagaaaaaatctagttgataatttagtttttgtgctgtatttatcattaattatataatgttacaatcattccacctactttattaattaaagagctagctaggcagcgcagctaaattatggagatattatttgagctccaaaaattattggtggtccgccaaaaacacatgtaattaaacaactatcagcttttgaattatgattcatgaatatatgtcattttctttgttcttccaaaatgttaatctttttcatcattaccaaaagtaattattaataaactttattcatggtggggctctttaaattcatgtggaacacggtatttttcttccattattcagtcttatcttcaaaatcaatacaataaaactaaataaaatcaatacaaaaacaaacaaaaaactcataataaggctgattgatatagtttttgtgttcagactcttcagagatcaaaggggaaatgatttatttaaaattaataatatttttagggttttatttataaatctggatttttataaagtgaattagaaaaatatgaatatttaaagaaataacttaaaagctgaaaaaaaaaaagaataaaaaacttaaaaaatggaaataataatatactttttccatatttagattcaacagtctaagttaaccttaacaatctacaattttctctctttttcttgttttctcacttctcttctaatttcttttggtgcgattggcattctcgtcaaatttctttggtacgattatcattctcctctaattttctttggtgttgttgtacattcttcttcct

SEQ ID NO: 114915 - DNA, 2644 bp, Cannabis sativa
taaatatgaaaaaaaaaaaaagttccaagtttcaacgatataataattagtgggtttaggttgggccttcacatattggacctaaataaatataaaaattggtattcttataatatgcagtacggtgcggtttgaaccgcatattagcaattcaaaattgcaaattgcatcgcaccgtgcggttttggaaaaattcaaactgcgactgcaccgcaaaaaattttaaactgcatttttttttttgcagtgtggtgcagtgcgagcggtttgataaacaccactatcatatatctaaacaatttaatattgttccttataaattagctagaaaagtttgaggaattgagagagagattatttggaatggtaatattccaatatattgtaacctgtactcattgcttcttttttagttacaatatattgtgtttcaaaaaaaaaaaaaaacgtacgtggaaaccacacgaaaaggaaaaatatatatgatagaaatattttatccacaaaatagagtaagcagtaatactagtaaggatagatagagaaaatccaagtatcacacaacaaaacaatcctcaaccaatcaaaaccctccaactaagctttcttcaaccctcctaccttatccaactcccttccatagaatctaaaacccttctctctccactcacactcccctccaaataatctttctttccgagaaaatcacccagaaaataaaaacttcattctgtatcgatcattcgatacaactggggttgtgattaagtaattaaacagcagaaacgaaaacgaagatgtctctcacaatccccactaacctctcaaaatccatgctcaagcctaggctgagcaacacaccaagattgccgcagaaatcgagcttcgttgtctgctccgccgcccagccggagaagatttcttcctcttccgcagccgtagagagccagctgaaggcgttctccgcggctctagctctgtcatcgatcctaatctcggccgcgccgatgccagccgcagccgacatcgccgggctgacgccgtgtaaggattcgaagcagttcgccaagcgcgagaagcagcagatcaagaagctagaatcgtcgctgaagctgtacgcggctgactctgctccggctctggccatcaacgcgacgatcgagaagacgaagaggcgattcgacttctacggaaaatcggggctgttgtgcggtgcggatgggctgccgcacctgatcgtgagcggtgaccagaggcattggggtgagtttatcacgcctggattgctgttcttgtacatcgccggttggattgggtgggtcggacggagctacctaatcgccattagaggagagaagaagccgacgcagaaggagattattatcgatgtgcctttggctactggtttggttttcagagggttcagttggcctgttgctgcttacagagagttcgttaatggtgatcttattgccaaggatgtctaagccaatcaccactcaaatttcaccctctttgtaagataaattcaccactcaattaatttacatattctgctcctatttttaaaatgaaattatctttttgttcattttttttttaagaatacttaccttagaattttctaaatttctatggtaactttctaaaaatgcacaacatcaaactttaaaatgtttgttcattttaatttatcttttttaaatttattattagaattacattttaaaaaatctgttattcatcactctagctatattttattgatcattaataaataaatagttttttttactttcttgtttatttatttattttaattttttaactacaggtatgagatggaataccaaagagaggagactgattatgcttgagctgggagtaacttagaatggtatttttcaagaaaaagaaaaaagaaagttagaagtgtatgtttgaggtgttgatgggtacatttcttgtatctaattgtaaaattttagttgttttgttgtatgtaccaatggttgcaccatataccgtaacgtacttttattctttgcttcttttcatttatttctatccaatttctacagcttacaccaatttcacaattcccccattgatcaaaaaagaaaatattaaaatgaccttttcattgatgaactcttttccaacttaataacaagtataatgtcggatattttgtacataggaagaaggaagaagaaattcaagattacaatgcaagagctcaaaaaatatataaacagtttcactatttcaaacacaagacaagtctcttaattcttaaaacattgtccaaaaattatattacaagttattgtaaacatataacacaatcaaaataaaagaaatggacaaagacttagacaaccaaggttttacactggttcaaccaaattgtattggtctactatgaataaacttttgttagagactaatcacggatcaacaaagattgatctaagaaaaccacatgaatagaacaagtgaaaactgttagggttgatgtcttgaaaagctataatcaatatttgattttgaataagagttaaacaatttgaaatttaacaatgattaagtgggcatattcaatttgagtgtgcaaacactttgaaaaagaataagaaaagtt

SEQ ID NO: 114916 - DNA, 2013 bp, Cannabis sativa
ctccaagccattgtcagttcttagatttttaagtctaagattagtcaaattctccataagtgttttccattcaacaaatttattcaatcatcatttctatgtttatgtaaatacacccataactttcttgagtgatactatgggcagaaagtaaacactaccaccatgtgtaagagttttctcaggaccccacagatctgagtgaacatactcaagaatttattttgtctcgtagatcgcagttttgaacttaatcctatgatgcttcccaagaatacatgactcccagatttcaaccttactcaccttgtccttattacataacaggttctgatcactcataatttgcaagcctttctcactgatatggactaattttctatgccatatagtattgccttctgatcctctagggagtgtattattgtgttgtggcattttgaaactagttccccttgtaagtagtaaagaccttcatgtttctttcttttgattactgtcatggaactcatgcttaatttcatagttttgtttcaattttgttcaaaatacccaaatcatcaagtacactaataaaaatcaaatttctagctagattatgtgcatatttgacccctgtcaaagaccttacaaccccattaaaaaattttaaacttacagtacctaatccttcaatttagcatgattgattgtttctcaagatgactttcccacctttagaatcctttaaattagacaacaaatgtttattgttagtcatatggaaagtacatcctgaatttgaaatccaatcatccctgaactcagtagcagcaagataaacttctccaccatcatatccataactatcatttgtagattgttggtcagatttgtatttgttatctcctctttgagagtttgagccttgtcaaaatcccttgtagttgttacttcttttccagaagtaacaatctattctcatatgttccaattgaccacaatggtaataaccactgggatcttttggtccctttgctggagatcttccctttccaatactaggtcctttgttaggctctctactctagcttctacctctataaggattcatgtatttgttctttccttgactgaaattcagttcacaatttgaggagcttggtctttcattcttcatttcaagatcttctaatttaagggctaaaataacctcttccaaggtaattgatgttctaccatatttgatagtagtcttgacttccttgtaagtcatctctgggaaggaatttaatatgatgatgacctggttctcattactcgaggcttctttttctcttaagtttgcaatttcaatgtacattctcagaaacttattaagatttttttccagggatttggattgactcatcttgaagccaaaaattctttcctttaaatagatctagttggtgagtgacttttgttgaaattgttcctccaacttcttccatatcttagctaaagtttcttctttatcaaccaatagaatgatttaatatgagagattgaagattataattccaatggctgtctccaagagttcttccttctaaatcttggtaatgtcttatggccactaaatatgctctttaagcactctcaagagcttttgttcagttagaagaaatctaatcttccttctccatatcagatccatcaaacctgtcaatgtcaatgtttacattactcatgctaacacaatcaaaattcgatagagatttagttagagagggttttgtcagattgttcaaataaggaatatccacaaatcttctatgtcacgtactctttgttggggatcaacttcctctagcctttgtttgattcttgatcatttcttaagttaaatctttagccaatttgtggctttgataccattgttgggattaatctactcaatccctacaccaactcaccatacacattagatcatcatgttgggaatattttaccaggatctagatttagtaacaagtatgttgaattaacatc

SEQ ID NO: 114917 - DNA, 3977 bp, Cannabis sativa
  modified_base (3665)..(3667): a, c, t, g, unknown or other
atgggccagtgattgctattatgttgttgattagaggatcatccctaataatttcatgcacaagtttaaaaagtttttttgatcccctaaaataactataatcaactaaaaaaagaaaaaaaactaacctcaaggcagttatgtaagaaaacataattaacaattataaaaaaaaaaaaaaaagataagagaaagcataggtgtcggaaattaccggccagaaatggtgatatccagatgcatctgactgccataagaaattcacagctctaaataaaaagctggattcagagctatcagttccattagactttaaaacctccattttcatacctctttccgccgaagcaaacacaaaagctaataagaaattaaacatcatcatcaacatggatttcgacatcgatctcaaaccacgcttcactccagccacgtccattttgatctgaatctcgattaactaacaaaaaaacaaacctcaagttcagatcacacagcgtcaaaaccaaagcaaatcacaaaaaaatttcgagctcaaaacagagtaaaaaatgaagatataaagtgaatcgtacgtgttgtgttgcctttattataattaccggaaagaaaatggggcgagaaagtttgaccaaatgaatgaaatgaaagagagaaaaaaaggctaaaccagctctactctctttctttcttagtagaataaaagaaagtattacatataaaaatttatttctgtacagaaatagagagcagtattgggagtttatatagggcgagaaatttgtagttatacatttggatgtacttgcttgtataatgaatattagttgagattttatataaccacaaacgagaagataaattgattgagattttgagcaagagatcaagtctcatgacatcaatcctacgtgtctttttagcccttattttattatttcatttaattatttttttaaggtttgttttgaatctttgatcaatggattccattgcgtgaccgtgtgagttgtgatgctcaattattagcttattttagtaacataatataaataattttcaaagagtaatagaatctgtccctctcaattatttttctttcagtatttacaattttactaatattttaggggttttgaattctaactcatgtattctcctttttcttttattcctttttcactgctaagttagtcttagtaatttttatcactctctcaagtctcaactatgatcattatagagttccattccttaaattttttttatttttttttttattattatttttttatcttttatatttttttgtaaaaattctgttatactttgattttgcaaaaatagctatcataataataacatttcacttaggcacctaggtggtaaaccatgcctcatcacctaaacctacacctaggtggtgtcacaacgtcaactcaccttccccaaggttgaagtactcttcattagggcatcatctcgaccctagccaagttgcacatcatcaaggcatcatctcagaccaaggccgagaatcaaactccaacagcctcaccttggccttgtctcaaagatgatcacctcgtaccaaagctcatcacctcgtaccaaagctcactatctcgaaccaaagctcaccacctcgaactgcagctcaccatttcagaccaaagctcatcgtctcgacctaatcttctcaccaacaccatcatcacctacgccttgtctcagaccatcatctcatcctcctcacaaatgcatcatctcgacctccttacaaaggcatcatctcagagctcctcaccaagcaccatctcagccatatccgagatgcacaccattagtgcttcatctcgaccgtagccgagatctccacttcaagtcatcatctcgaccctagtcgagatcataacatcaagtcttcatcttggtcctaactgagatcgcaacacaaagtcatcatctcagccctagctgagatgcttctcactttggcacgtgctcctcacgactcatcaacatcatcatctcggcatgtactcttcatcaatatgcatgtgctcttcatgacaagaacaagccaacatgtgttaattaaagatatcttcgataatttattatttttctagatatttattttgaaatgtgattttgtgttattattgtgtattttaaacttaacctgattatggttaggatgaggtgcaccttgagttaagagattttaaacccataatgtaaatctatataaagggagtgacgtcacttgtaaggaatcctggttttaattctcacaaaatcattatctcgatctcccactctctcattcttaaaactcacttgaggattaaatttttggataacataactctggaaaactctcctcaagcattgagatcaataacactccaagtggactaccttattaccactgaaagggagataaccactataaaagcctcgtgttcatctttgttaaatttcttctcgataaactgatttactttgattaaccattacttgtgttcatcttacttgtttacgatcttcttagatttgttgatgaaaaatttcgtcaataaaatgtaatggtttaatattttgagagttgtttatatttagatttgtttagtaactatcaataggtaatacttattgagaagtgttcatatataaatataaatatttatcatgaaaatatatattttttttaatttttatttattattttatgtttgttattttttaaaatgaaacttaaaaaaattgaataatatgtttttattttatgaaaagaaaaaaaaaactaaagcaaaataaccaaaaaacaaaaaaaaaatagttataaaacactttggtcatgaattataattagtattaaaacaaaacccttggaatagattccatgtaaaactaatattttttggtgttattatgatattataaaaacacgtgacagtgactcattgatagtttctataagccatcgtacatatattttatcttttgtaaggtataagccagcgtacatatttattcattcttattaaaaataatgtaaattggaaaaaaaatggtatgaatttttgtctttgataagtttgagaaattatgtatatttttgactaagtttacactttattcctaagtaaaaattacactgtatatcgaaaattataagtttattttttttatagtataaataaataatgttaagtgattatggttttttttttttgttttttacatttatatggatttttttatgccatatttttataaaagaaatagaaatctcatatttgtaaataataataagttttgctggaaaagttgtcggtgccagaaaaatcagtgaaaaagtcatcggcgccggaaaagtcgacgaaaaagttatccgcaccgaaaaagtcacaggaaaagtcaccgtcgccgaaaaagttattggaaaaatcaccgaaaaagtcaccgtcgctgaaaaaaaattactaaaaaagtcaccagaagtagatgtctctaatataaacaaaaattgaactggttataattgaaatctcaatataaccggttctgtaatataaagaataaaaacaaataaaataaaataagtcaaactaattataattaaattagaactgcttctataacataatgaataaaannnaataacacaaaataactcaaactggttataattgaaatataaccggttctgtaacataaagaataaaaacaaataaaacaaaataatacaaactaattataattaaattagaaccggttttataataatgttataatgaataaaaataaataacacaaaataactcaaacggattataactaaaatagaatcggctatatagacataatgaatgagtatttttgaggtagatatagtatgagtgtaattatttggtgggttggagcatgttgaatgaatgtttttgtttaaactattttatttaactagt

SEQ ID NO: 114918 - DNA, 6217 bp, Cannabis sativa
  modified_base (2786)..(2810): a, c, t, g, unknown or other
  modified_base (6065)..(6065): a, c, t, g, unknown or other
tgttttcaaataaataaaaaaaaataaaaacttgttggtttggttcgttaaagccattttccaaccaaacgagctcaggaaaataatggttgaaattttaccatcaataaatataaatgaaatttatattcattcaaatattaatattttgaagttttaaaaaaaaatatattaatattttggatggtaactcttaaaaccacctaataataatttatatattaaattatttgtatctataagtaaatctatgcataaatatagcacatatatttcaatcatccttaatgatttctctctctccaaacaataaccaactcccaaatacatctatattacagggacagccaaagaagaagaagacataagaaattagggtccttttttatttaatttttaattaaatcttttttttgtttggtaagggtatttaatattgcaataaatttttaactatcatcaaattattttgtcacctcagattcttttatgccacatcatcaaataaactgatatttgttaaaaaacttaacagaagggggacattaatatagtggtaatatattggagagattttttaagaaccagtatattttagggtgcacaagtaggtagtgacataaattcagggggaaaatttgtatattattcttaactatatcattatgtaatgaaccaatatgaagagacatgatactttatgctggtacatataaaaaggttggagattaaggtattttcattagactcttctgagaaattcaaggcctaagattgtctcaatccaccttatctctattttcatgaaacctaagataattagggtttcatgacgcacggttccaaaggtggcccttgtcgcacccaacaaattctcccacatactagtagtactacgtgacccttgggagtgttcacaatcacacacgtgtggaccccaatcccacatgtaaaatgctgacatcatagcaaacgtatacaaagattaaactcaatcagcgcatgagatttttaatttgtaattttgtacaaccctataatgatgggttcgcatgtcagcactgacggagggaggctttataaataattattttgagggaaaaattagtaattactataaataattattttttaatatgtgaaaatatatatgagaatgtatgtaaaatattttgttggagggctacacgtcccctagtgtcaagaatgagtaggagtgttcgtggttaggatggtgcaatatttggccatttttttagactaatttgcacaactatacttctaccgcgaaactaaaaaacgacagaaatcgcaccgcaaaaaatagtgtggtgaagtgcagttttgtagtttctgcagtttaaactatcaccaaataattaaatcatcacaaatacaacaaagcttgagcaacacttgttaaaaatactataagacttgaaaataaatatgaaaaaaaaaagttaagtttcaacaatacaataattagtgggctgtgggctagaccttcacatattggatctaaataaatataaaaattagtatttttataatgtgcggtgcgatttgcaaccgcatattacaattcaaaaccgcaaaccgcaccgcaccgcactgcgcgatttagaaaaaattcaaatcacgaccgcaccacaaaaaatttcaaaccatatattttttttataatacgagcaatttgagcagtttaatgaataaccctaaaagtgactccctcaatacgtatgtgttggtagataatatacatcatttatgtataatatattatatagaatctttggagcatatgacatatttaaagcatatagttacctaaataagtttttttttaagtgtcacatatacaataatttctttttctttttgcgataaaattactcaaaattattaaaattgtaactgttgaccccaagggagctccccgcttcctctctcaccttttgttcctcagattttcaagggatctcctcgttcgctctctcaccttttactctctaaacttccaaagaagttactcgcttcctctatcacatttttctctccgaacttccaagggaactccccgctccctttctcaccctttgctcccagcttgtccaagggagctcctcgctcccatcactccccacatgcactaagggagctccctgctccctctctcaccttttactccccgctcgcccaagggagctcctcgctcccatcactccccacatgcaccaagggagctccccctcccttggtctatcttcaaactcatttgctacttccttctcctaacacttagccaagctactccttagggttcatatcagagtcatatcggtagagaataaaatcaaatttaattaaaaaaatgttgaaatactccgttatgaaccttaaacctcgaatctcaacataataatacataatacaaaccaaactaattagaatagagatttacctcttgtttcctatccgagtctcttcgctacttttcgtataaacaaatgaatatccaatccagtaattgaactcgttgaagacttcacaccagtttcttccatattagcctcaacactcagaaaaagagtgggcttttagatttaataagataaaaacaattttctgatcacagtgtattctcaactcatgagatattgtgattgagattagaaaaaaacacgcaacacataacatactagtgtatatatgtgtgtgtgtgtgtgtgtgtgtgtgtgtgtgtcgtgtagacggagagaggagagagggagagagagagagannnnnnnnnnnnnnnnnnnnnnnnnagagagagagagaaagagtttgaaaagttgatttcaatattctgttctctttctgctcatgtattgtatattaatatctcttgttatatatcatatatataatggtataaataaatcttttatttaattctataaaataaaaaaataatatttataactcaaaaataaatattatataactgaataatagactttagttatattcttttattttatatttatctttttaatttttaaatacattatctaataatatatttaatataataattaaaaaataattatctatttaatttaatttattttatcaataaaataatcaaataaaattcatatgggcctttatatgtcacctacacgtgttggtcatgccctacacttgtgggccatgttttaaatccaaaaattggtttctcaattttgacacaaataagatttattatttttttgccaataaataatagttgactaattctcattaatctcttatttcattagaattaaaataaatattattttcactaaaataatgtatttctctctttaatattatttaagaataatattacatttaactaattaatatactaaatagttaaataccactttattatataattcataattgatataattattcaaaataatttccacaaaattactatttctgccttaagaattatttctcatagaaattaaatctttctcaaatttattaatcagtttaaacattcccctatacagtgttgtatagaggtgatttggggactatggacatatatttcaaagtttcaataaatacttgattattattgaactcatcaatagaataatctcatcaatagaataatctggtttattaattctattaaaacctcactataaatatggaattgcactctttgacaatatataatcatatttacagaattcttacttgtagtctattaatataatcaatataagtagtttttcctccaattattagctcataattagagttggtcaaaattatttgttgaccttaaaaattgccaactgactcggagtttaataaacattgagtaatctgcaattaagagataggaataataaataaatcgaaaaaacacacaaaattatagaggttcgacccccttagatttgggtaaagacctactccccttttagttgtattgattatgtgataatagcatgcagatcactaaagaagacacaacaaattctagctacagctctcaagatgcttttagagaatatatagcaaagtgctcttagtgcgtgattatgattttagatcctttcccctatgaattcatttactatttatagggggaaggttgttacaagtgacagaatgtaaatatccctatattttagggtgcagttacgatctcttgaaacccctacaatctcaagtagatcaatcggatccgcatttgcaaaatacaattagagatatttatggaagttgttgaagaagaaatcaaagcttctgtagctttatttaacattcctagcgtcgtttttccagctggccgacatattaacaattcggccaggtctttttcgagacttgtatttcttgagagaatacttgtaaaatattcttgtaaggtgagtcaatcttctctcctttggttgacatgttgatggccctgccagatgcttcttagaatgcaatcttcatcccataaataccagccactataagaaatctaactttcacctacaaatatttttctacaaatatatatttttaggtaatcataagttactaataattattttcatacggagtttgatatatttgttattaatatatgtgtagctaaataattttttataggtgggaatattattttgatttggagccaaaagttagcgcccaattagttatggaaaaagatattgccgccccattgagtagtgttttagatttatgaattcgaagagtaaatgcgtgaagcttggtctgaattcgaaaagtcttgtgtggaaaactttgacctgagggtgtttccaattaggcttgtaccacatatgaactgtcactccagatagcttaccactagtccaaagatgcactttctgatagcttactgccagtcttggttgttcatccgagaaggagcgcttatacgtatccagatagcttgtcggtataaagcttccggattgtttgtactgaatgcgcattatcaaagttgacgtggattgttgttgctggtgatgagttggatcatttaaggcggtgtaaatgtgccacaatgattttagagataatttttggcaacaattaatgtaaatctataaatagctatcaatctttgtaatctgtgagaatcagaccatttgttgctggagtgaaaatcatgatagtgtaaggttgagagagagagtctaaactagagagagaaatatttctcgtaatctctgagagtttgtgaatattaaccttgtaaagactaatttcaataaagatatggttgctgctctttcgaccgatatgtaaggcattgcatatggctcgaactcattaaacctgttattattccattctgttttactgcttaattcattgcttaaattctaagatctcttgatttattggttcttaattgtgtttcgtgtttgttaatggttcagtatactaaattgtaagttattgatagtttccgtttcgtacaacaaacatgatatcctagtcaccatttaatggaagttaatgattgaaaatgattgtattataattttagtaatttttggtagttttaattgtcctatatctattgataaaaatcctatttgacctaaaatcgttggatgcgagaatattgataatataattcttttttttttttaataattaaacgtatatttatttttttttttattttgggaaaggaaattaggactttttttgtgaggagaagtatgaaaccattaagctatgatatgtctatggccactagaagtatatattagttaggcctttatttttttttaataaaaaaatgtataatgtataaaaactaataacctcgagcaacacttcattctaatttagaaaaattacataaattactaattttggtaaaaaaaattatacttttaccttcaattttttttaacaattttacggtattttataaaaacatataaaaacaacaaaaaaatcacattaaagtaacattacaaaaaatcttacttttagtcacaacaaaacgtgtgactaaaagtgaaaaaattgtnactaattataaattatgattcctatgttgtttgtgacttatatccatagctaaaagtattaattacaaaaattacaatttcttgggagtaaatgtatttttagtcacaatacttattgtgactaaaattaaattagtgataatttgtaacta

SEQ ID NO: 114919 - DNA, 1466 bp, Cannabis sativa
aaaagggtctagagttgataaaaacaaattgaatgctcaataaaatgcacattaattaaaaaatattttgacaactaaattgccaaaaaaggacctaacagagatttatatatttggtgctaacgaatgactatcagtgtttttattattatattttttcgtttaattcttagttggagcgcaaatgctttcaagattattcattatttgattgtaactatttttctcttcttcatgaattataggaaatattgacactgtcttcaaaagaaatcatcgatcaaatggacatctctaagttaagaagaagcttcttctacaattataattcttgtttcttcctatgagaaagaaatatatggttttaattccatctttgtactaatgtaactgggtgggatcattacaattttgtaattgtattgttcattgtgtaaacatatttgtaaagtaaaaacaattgtacttttacaaatgtattataattaaagtgttttccatcaatatttagtgtgtgtattaatatcagatgtatggttttgttcaaatatatatgtttaggctaattgttttaaagatttataagcaagaaaaaatgaaaaacaattttaatgaaaaataaattgttattatataaataattaattaataaaatcttctaaaattatacacactattataataaaagtattaattaaatatatttcttaacatttttaatatgtcaataaaagaatgtgttatatcattatattaatatcataataataattttataataacattaagtatgacactacaaaatgttattaaaagtactagatttttaacgtacccccattcaacaacatttcaaaaaatgtcattaaatgattctcccagcacattttaaatgtcattaaaacatatatttgttgtagtgtgagctgagaaaacaattagaaaaattgttattattttccttgtgttgctgaaaattggttagagtcttggaatattgttatttacttctttattgtaaagagcttaaagatatgaaaacagaaccgactactttaagagttataatggtctgttgaggcttgtaaaaggtcttattttatttttcttgtaacttatttaaagcattttccatgagatagttagtatggggatttatccaacatataagttaaaaaaaatttgttgtatgtttgaatgttgaattgttattaataatttgtgtgtaaatattgtaacatcttaatgactaggcacactacagtgatcttttgattaatgtgcactcctttgttaattaaaagatttctcaaaaattgtgataaattaaaattttgactaacattaaactttaatatatatattgttatcccaaattttgcactctgacatggcatcactggaatggtgacacgtggagtctacttggaacatctgctcggagagataggccgagcaggatgcct

SEQ ID NO: 114920 - DNA, 922 bp, Cannabis sativa
ttataattaattaattctataaaatgaatgtctacctattagtaacctgctattacaggtcaaagaaaaatgtaaccatatggttacaataaagatgtaactattgaatagacacccatttatatatatattcaaattgattaattcagtatatcacaactttaacaattttaagtatttttctaatagaacaaattattctcgatatttcataaagtatctgctaattctcatttccaagtgagacaaccaatgtcactattattgtctaattaacaacagataaataagaaacctaacaatgattttaattagagtaatagtctcttttatcttgtggcctaatgaaacaatcatgataagcctacccaggcatctattgtcactgtcgttacctaaagaggtaattgaaaagtaagaaacctaataataattttagtatagagtaatgactctttctttcaaaacgataattactacattaatactcgataataatcaattcataaatgataataatcgtaccatatcttaacatgcaatgtggtatgaatgcgtaccggttaacttgaatgaaaaaaactcgatcatcccaaatcctatgtcacaataaaaataatccgttaaacaaatcaatttaaatgtgctgttaagttatataaatatatgctaattacacacaattcattcaccattttctacctaataaaagtaaaagtaatgtattgatcaatatttaattgcattacctatagtaaatatgtcgaatttgaatagggaaatttgaatttttatgcatgtatttggggataattttttccctaaacttaaaatagggggtattggtaaaatgggataacattaacttaattcccacattacctccccccatttgaaacatgccctctctctctctctctct

SEQ ID NO: 114921 - DNA, 1391 bp, Cannabis sativa
ttggccatgatatcactcttaaccaatatggtgcctgtactgccaaactgacataatggttgtgctgctatgatagcaccaattaatactttctggggtgaatatcactcttaaccattatggtgcttgtattgccaaaccgacacaatggtcgtgtcgctatgatatcacctaaaacatatacaatcacaaacacatcatgcatacatgatatgttctatgctaatcttaccttgtttccgagttcaggtgtgccggtcaacctgagtggaacagcagctcaacgaattacatggccctatatcacaatattcataattctgatgagaggcacgctaaaacaatttttggggacttaaaatcaaaactagaaatttccctactgatgaataacatggcaatcctctaaaacatcacaaaaatgggaaaaactagggttcttaaatttgtcccaaccgtcagacaggttccttaacatgaagattggttcggtgatttttcccacttctcctcaaaagattaatattacctaataataagtaattctaactaaataataagaatactaatgcccacaaaagacaaaataagggctctacagaaaatgactattttgcccccttaacacaaaataaaggcatacatgccacataggggtaatttggtcattttcaaaacctcgactatttctgacacttctaatgcttaaccatgttgccccgctactaataaaattctaaaccatatgaaaatgtgactctctaatggcccaacgtcgtgttccactgctaccgagcacaaacacagaaaataagaaatttcatacataacataattagctcattccgagtttaaataaatttccataaatacgttaatcatggttaataacttaatttcataattaaactctaattatctaataatccattatattaaaatttagtggtctttacaccgagtatcgctaagtgttgtaccacatgcactacatacctactgctgcttattggaccaagtgtagtaacatccagttgcccttacatcttccagatgacaatgttgaacacagtgtgtaaaatctgtgtcaacatggtacttcactctatgacccactctttcttcttttgctaaaataacattaaaatctcccatgagaagccattttccattagtcactagattgcacaagtcatcccataagactttccttccttcactttcatttaccacatatacaatagtaagaaaaaatcaaatctccgatctgttgcagcaattttcaagtgcattagctgactggtgcacttgagaatatctacaacaaatttaatagggtcccatgctatcacaatcttgcctccttgatgccatgctatatttgacgaaaa

SEQ ID NO: 114922 - DNA, 2193 bp, Cannabis sativa
  modified_base (1116)..(1116): a, c, t, g, unknown or other
aaaaaaaaaaaaaaaaaaagggggggggggggggggggttaccaacacactcaattaattaactcttttgatatttggcaataatattattatacctggtgacttgagcaaaaaaccaatctttactgtagtcattaaccccaacagtgtaaatcaagtcttcatcaggatataactcagcatatctttcccaaagtccatattgcctaaacctgcaaaaattattagaagaagccatataaccaataataataatcaacttattaataagtatcatacatgttaattcatttaataataataatttggagaaattacttatcagggtgattgacatagagtttgtttacataatcaggattaggatcaggaacataaaactcagcagcagagcgatcaggaatcccaatttcccacaatgttgctccatttcttgggggcatataaacaagttctcccatctctttataacaatctgcaatataccaatttgatgtttcatattggtattggtggaatgaagtatctgaacttacaaaatttaatttaataattaatagttattaaaaaatatcgctaacaatttacaagtaatactcttatggtattagtggctaatactatagtaatagtattagtgctaagtaattattagtgtctaataacaatattttatataataactacatttataaaaaataatattatataataacctaataacactttcattaacttataaaaattatacctgttgtgattgtaataacaccatcatatcggtaatcaccaataaacccaggaacccatgcatatatattatagttacccactcttatatcattgattgaaaaatagccgtccttgtctgttttgctccaaaattgataaccctgaccatataaaataattattaatagtaagtgtgtaataaaattaacaatgtgcatcatatatccaaatttataattatatgtatggaatacttattactaaataaatttaactataaatattaattttgaaactattaaatcattagattttgattgacgaatatgattttaaaaaacttaaagggattatttcacaaacacaaaaataataaaaaaaaantacaaaaatacggtttcacggaatcttaaatatttttaaagtttttttgattttatttacagaaaatacaggtgttttatggtgtactcttgttaatttgttattgattttttgttatctgtatattattatttattgttattttaatgttatttaaatattcatattacttttatgtagttttcttgttatttctatgaaaaactgtaaaaatataaaaaaaaattctttaaacataaaaatgtaatttttttttttacaaaaaatagtgtcttatataattataaattttaaaaatttcatatttttgataaaaaaattgtatttttttaatatgtaaaattaatatcttgaaaactttatattactcatcggggcgtgtgttctctcttttttctctctccatgggtcgaaagaagaaggagaaagcgaagcttgcttcaatcattaccagtgtgattcttgattctactttgaaggttgatgaagagtttcccccaaaaattgagctcccttcgaaccaaaatcgtaagcatctagtcaatgcgacaattttcaagattctcattctgatttgggtaatgatgtaactgaggtggagaagatagaattgcaacctttgggtgttcgatcgtgggtaaaagaagtggagactactgatttttaaagctctgtgaaggattcatggagtaagttcaagaataataaggtgagttctccttcgaccaaacttaaatttacggaacctattaaatatggagattagcttgttgctaaaatagacttggaagaggtagcagtggagacctcattttggcaatactatgttatttgcattgctctaggagctaatcccccttttagagttttcgaaggattcattaatcatatttgggggaatttgggtgtataacctatagtgaggatgcattcgaggttcaccttggtgagtttcagggatgaagctgttgggttttgtgccttaaataaaacttattccaatataatcatatttactaattaataaagattagaaatcacattttatgttgtatggttaacatgatttatttcatg

SEQ ID NO: 114923 - DNA, 985 bp, Cannabis sativa
ttgcgagtataaatattaaaatacccacttttcggtacaacatccgtgtagtaaccacaaatgctcaataagatcattgcgaagtgaataatgttgcttggaagatcgagtttcgtagtgatgagcaataaactcatgcaaattaagtgtcttttcatgtgacactgcaattgtaggtaacatgtctaatgaatcatacccattatctagcgattcactaatctcattttcaataatcatattgtgtaatataatgcatgttttcataattgactcaagatctctatgctccaaaatctttctggtccttgaacaatagcaaactgtgcttggagtactccaaatgctctttctacatcttttctacaagattcttgcatggttgcaaataatttattgtttaaaccttgaggttgagaaattgtttggactagtgctgcccattttgggtagatgtcgtctgccaaataatatctcatattatgactgtgaccatttattgtatagttggcaagctcttccttccactagttcagaaaatagatgtgatcgatcaagaacattaatatcattgtgtgacccgggaattccaaagaagacatgccatatccataaatcatatgaagctactgccttcagaataattgttggcttttgaacatgaccagtgtatttgtccatgccaaccacttggacaatttttccattgccaatacatacaatccaaacttcctaataacattcctagaaatctacgtttcccccattttcaataatcttgaaacatcttcctttgttggtgatcttaaatattcttctccaaaagtaaagataattgctttgcaaatttttttcaaagattcaatggcagtgatttctccaattcgtacatactcatcaacacaatcagtagaaattgttgaaaatattttaacgaggatctagatttactaccatgtatgtttcgttaacatcctaatatgaa

SEQ ID NO: 114924 - DNA, 5258 bp, Cannabis sativa
ctgagatgggatttgaaatgtgagaagtagttttggaaaattagtaaagtggtcatatatgaccaattttaataactacgcatttagaggaaaaattataaggtattttaaatgtggaaattcaaatttcccaaagtaaaatggttaatgcattagagttatcaaaataatatacacaaatatatatttcatattcattgataaattgttttaacaaaactttattgggtagtttatatgaatatacataatatatatctatatataaactatttacataataaataaatataaaggtaaatgatgatgatgatagcttcattcctcatcttcaatcaatttctatgatgtcgaactcttctgcaacagccaaaaataaataaataaatcaataaaatttaaatttaaaaacaaaattcaattatattaaacactattcctggctgcaaaaaagaaaaataacactataattcaattaaaataataataaaagaaaataaagaaattttaaaagaagaagaaggaagaagaaagaatcaccactctacaaaaatatttaatcaaaaaccatatttacaaatcttaatatcaggaattggacaatgaagtaacataagatcatttagaatgaaaattaaaaaacaagtttaaatgatataaattaaaacccaaaaaggatacaattacaactctttttgtccataataacttcaactctcattattcctagctgcataaaagaaaaaaccactaaattttatttattaaaaaaaaaaaggaaaaagaaaaaaggtatttatagtataataattatacataaaaaaaaataaaggaagaataagaagaggaaagcatcataatttctttttttttttagagaaaaacatactaattaaaaaaaactttatactagaattggcataataaattgacccaatttaacataatatatttacatataaatgagttcattttgtaaacggaaaaaaaaaacaaataaataaaaaaaggatacaaatacaaatctttttctcccatttgcaacttcaactctcaccattcctagctgcacaaatcaaaacaaaaaaaactacaaattccaattatttattaaacatcaaacattaaataaaaacaaataataacaataacaataaccacaaaaacttaaaaatcaaaccaaaccatattttaaaaattcaaagagcaggaatggcaaggcaattaagttgcaaaaatatcattttttttttcaaaaataacactagagaaagaaaaagtcttcatattcgggccgggttggggccgggccgggtcaggttagggtgtggaccttaaataacccatttgatcaaccaattcttgcaactcctcatctccccactcatctggatcggcgatcaaatcctcaaccgccaccgccgccgccacctcctcctccgcctccgaaaccccgatttcggcttcttcaacactcaaaaactcatcccacaacccatcattcctattcccagagctagattcctcataatcatcatccataacagccgaaaacaggctctcaatctcagtctccgccgtcgccgtcgccggaagcctcctctttcttactccggcgccggcgccggcaaggtgatttctcttagaaacgaattgctgtataaaagttggggtttttagagctttggctagaaaattcatcatttggtgttgttttttctctgttaagattaatctgtcttccattgctgtgacttttgataaagaatcgttttgttgttgtttgagttttactatttccgccattaaaacagctctgtctcttttgagtctttctaactctgtttcgattccgaattgacccaattcgattcctccgaactgattgtgatgatggggttgttgagaaggaacgtttcttcttcttttgattgttttaaggaggtgtttttgtcctcctaagaatccttcgtttgcaaattcccatctgtctggatcgacttttctaaacccctgaaacaaaattaagaacagagttagaatctttgattaaagttttgatttctgttctaattaagaagaaattagagttgggatttcaataaagttctgatttttaacttctaaagttttgaattttgacataaaagagagttaaagtttggatttttaacagagacaaagaggaaaaagaagaaacattgttagttaagttttttcagaaataccatttagttttattaatttagacaattacagttataatgtgaaaaaagtttcaatgtttaactaaaacagagcaaaatttcgatttttaacaccaaaattaccattgaatctactaactaacgatttttaccactttttaatttactagtatagttttatctttacacttaaaatgtcaaaaaaattaagaaaaatggtaataatcattaaatgtacactcaaaatggcaaaaatcagattcaatttttaacagaaaatgaagaagaagaagaaaaagtaagaaatgaaaaaacttacataagtattgagctgacgaatgaagctggaaaagttaccatgtttgaaataacgaggaagaagagtcattgaaaactgatgagaatcccaaacaacaaagctgtttcgagctatgctccaagaaacaatggcgtctgtagatgggtcttcaaccatttcaaacgtcttagtcaaaaatggaggtggacccacatcgtgtaatccttccattggttgaaccattattggtggtggtgactggttatttgaactcgaagaagacgatgaaccagttcccacaaacgtcgtcgtttcttcttccttaattataaccactccttccattgttttaaagtttcgatctttgactgtttttatggttaaagtttcgatctttggtgttttttttaattggggtttggagatttttgaggttttgggtgttttttctggtaaagttttgatctttggtgttttttttgagaagatatttgtgttttgctataagtagaaagtaagtaggagagagagagtgagtgaggagtgagaaagaagaatgttctagagagagagagtgtctcaagtttatgagaagtttcttctgccacttgtctttaactgttgtttttttgtctcgattttctagaaagttcttgattagtcttattgccatgtggatatgactgaaggtagattggacacgtggacggtttaggtttgttgaagttggatctatggttgttggatcttggaacttattattatcattattttttcgatttattgtgggaattggatgttggaattttcttgttttattagttggaatattgaatgttataactaactaggtggcaaaggtgttatcgtatttgtattatattttatcttatttgtttttatactttgtgtcatgttaatttattttttaactcatgtttaatttttttaattctaatttaatttgtaaaaaatcgtgttgtgtttgtctcgactactacaactcgttttgttattatttaagttgaaattatagaaaaaataataaatttaaattctattaaaaaactatatttatgtatgtgtaatttgttatatatataattaaaatttaaagtatttttaattttatgttaaagaaaattaaatttaatttttttttaacttaaatcactaaatatatatttttatataattatattattattaataattgtttattttattatatttaaaaaaattgtgtcaaatgtgtcaaattcatgttaaatgggtcatactgtgtttgatccgttttttttttatcaagtggtgtcgacccgttttcgacccgcgtttaattttcctaacactaatccataaaattcgtatcgtgttcgtattcgtgtgtcgtgtcaaaagactcaaaactcattttgccacccttacttaaatagaaagttcttaattttttttggaaaatcataattataataatttattaatgtccaattattattatttttatttttttgtgcatttctcactataacgataataataatgaattagattgaattgaattaatttgtagagaggattattcacactttaaaagtattatttcttactatttaagcattaaaaaaaatagacactttacaataaatatcctaaacctctcaatgtagataacaaaaaaaaaaaatattttaaaatcaaataaaaaatcatatcaagcttaaattatacatgttcttgaataggttctccttgagaattcagttatgtatttttcaagccatttgtggaatatactgttgtagcccagcccagcccagcccagcagccctcgcccagcccaaatgagttattaaaatgtaagtagaaaaagagtttcatctataattgaaataacttttatttttggattttcggattagatgtgaatatagttaattatatatacaagcttattatttaatacatgttagatgttgttatagcttcaaacttttccataaaatataaatgatggtgtaattttatataaataatcaaagaagaaacttcagaggcaaaatcctttaaagtatgttttttttttgaataattaataagcaaaaaatatggtttttgaaaaattaaaattaatgtatcatttttgtactatgttagaaccttcactccatgtttattgcgtatcaccctttttaatttcatttgacccaaaaaaaaaagaaaaaaaaacgtcattttttcattttgatgtcgttttcactttttaatgtagtttctctaaagaattgtggtgttaacagtttgcatgtccttgttcaataaaattgtcgtttaaacaatttattgtcgtttttatgtaaatgtcgtttatatttgttattgtcgttttctggatttaattttgtatttcaattacaagttgtcttgttcactacttatcgtcgtttttttcattgtatactattttgccattaaatatcgttttttaattttaaaataataataattattattttttgtctcttatatttaatttattaataactagggaattaagccgcgcctaacttttataatttttatgtatttatattaagtgatataatttaaaatataacattttaacgtgtatattataaacaaacccatatagtgctgaaactaaaaatatagtttgctattttaaaatatattagaaaagtaaaaattttgtgacaaatattatcgttataattactaaaaaaataaaattt

SEQ ID NO: 114925 - DNA, 1041 bp, Cannabis sativa
  modified_base (44)..(50): a, c, t, g, unknown or other
tattgcaactagcgctgcaactactttagaaacccaaaccgtannnnnnnaaaaaaaaattaaaaaaaagatatagggtaattcctcttgattatttactcatttttctaattctaatgttaattatgcctctaataaaaaaaatattccaattaaaaaaaatacatattcaaataaaaagaagaaaggaaaagaaaaaggaagagtcacgggagatctcactttccttttttttggccgacacttttatcatatcataatattacactctcgaaggtttcactcttttgttgtttgtttttctttttctattctttactttttttttttagagtttagtgagtgatcagatttattaaaatatttaagatttattttcaggtagctgacaatcacagacatgtgagttttagaacacttttattctttgtccaatagtatctatggcttaggcttactatataaatatataaatttatttacttaccatttttcttacatattttgcttagttcaagtgaatttatctttgattctatgatgaagatggattgaaataaaggatctaatctctcgttccattcttgtaagtttgtaagggttgaaggtgaggaatagaatgataaaatttgatatgtatatatatgtataaaaaaaattatatataaacttattttttattattatttatcaaattatttttccactaatttttaaatagaataattattccatattaataaaaatactacttttagtgataaatgtttaatcatgcatattaatagttgtcactaatctaattttaatcacaataaatattgtagctaaaaatatatttagtgataatacattgtgatttttataactaaaaattttagccgcatatatattttaattagtaataagataagaaaaaatatcgacaacgtaatactaaggagagagaaaccctacagcaagtcgacgagtcgaggggtgagaagttgagaaaattctgccataactgtacaggcgagtcgagtctaggagcgtcgccga

SEQ ID NO: 114926 - DNA, 1512 bp, Cannabis sativa
tcaccttactcacttgactcaattgatcaatgctgttattgctcttactaggactcggaggaagaaacttgggaatcttattctctgattgggtgatactttcagttataccctctgtatgaccaaacaattgttttctacaaacttcatgaagattcccaaatagctccttcttcaaaccctcgaacgccatatccaacctctctaattgctccatagcgttcttgttatacataaacaaaccatagtacaaatcaaagctatcaccagccgtgttatgaacaagattcaacagagtctcgtaaccctttgtgttaatcggcgaagattccaatctgaaccgttccagaacccgacccatggtgtgggtaacgaattgagatccggcagcgaatttatcgtgttcggcgcaagacatctccaccatacgacacccttctctggcgaaaatccccaaaaattcatcgcaccgatcggtacggtagtcacccgacccgattcgaacccgatcgaagacaaagggtaacccgacccaggagaatttaccgctttggggtccgaacattgggtgagtacagaggatatcgaattcgggtggtaagtaactgaggagaagatctcttgggaattccttaacggagagaacatcgacgacgagtgtgttgcggcggagcctctgaaacggtatcgttttgattactttttcagttgataaaatcgaagtacagagtacgactacttcagggtgttgttcgcagagatcatctgggtcactgaagaaggagactccgagcttttgagcggtggctgagtaatcggagcgagaatgagctaagacggtgtggccttgtctgacgaaagctttagctagaaactgaccaaagtttccgaacccaattacggcgattttgagggaagttgggttgtgattgaaaaagggttggttggtttgggtggatggctcgtatggctgagaagactccatggcctgagctcggagagtggtggtggtggtggtggtggtggagttaggggtcttgggtttgtgggttttgatcagaggaggaagaaacggtgtcgtgttggaaaaagagtggagatttgtaagaggagacttggtttggatggcggttgagcttaaggaaatcattgtcgttttttggatttgtttgtcgttttgaaatttatagatttgttgttgatattattatagttagagaaaagagagaagagagagattttagattgaggtgattcggaaaatggagaatgagagaggtgtatttatataggagggaaagatgaaaagagtgagttgatgttttattaataaaattaaacaaaaaaagatgtgacggctcaccaattctctatactatatggctgcgtagtggggctacacgtgtcacgtagtttccacgtacgtgctaaaagtgtttcatttttcaacaattttgtgtttgggcttaattaagcttaattactttcttcttaaaaaaaaattagagaaat

SEQ ID NO: 114927 - DNA, 2505 bp, Cannabis sativa
  modified_base (2467)..(2478): a, c, t, g, unknown or other
cttagaagatcaaaacattctctgtaatctccaataatgacttcaggttagtgcttccgctcatcttttatcatcttcttcttctttaatttagcaaaggttccataaatttatgatttagggttttctatattcaagcacttttagtaatatatttagatctgtgagatttatatttcttaagtgttttataaatcctatacatgcgcaataaagaaagacaaatgagcatatctttttttattgttattacagtcatatttgcttgaagaatattttggtcgggctagggtagatgacaagcaattgaaaagtgtgctaggattgaataaaaggtcaggtgtaccaattttagaagacaagtatatacttcagcagtggtgtatcatgtttggaaggagaaaaacgaagtgttgtggaatcaatctatgcctattttgaatactttgatttgtagagtgaaataggatgttaaatgtagagtggtaggtgttttttcaaaaagagtatctaaactcgatagagatattgatttgatcatttgtaaaaaaaaaaaacatgttaaatgaagaaaacttgtaatataataaaacatacaatcaaaacaaaataattaatttcaacaacgctatacaattaataaattttatgttttcatgatttgggtttaggattggagagaagatagaataattaagttcgtggtataatttttttaaataaaaagatctccaaaagttgttctagttatggaaagatagatgacatccgaagggtatccccaaaagtctaacttgtctatcacggaataagtattgtgaaatgaaggatgtaatccagaagggcattcccgaatgtttatcatgtcaacccggacagtgtcttcagaaaagctattcttccttcggaaagaagttgtagatggctagttatttccttctggaagggagtcctggatagtcaattccaattggctcttttcttattcgagatgtcccttcaacatacacttcgatcctctgtcccgaagcatatatctcacacggtagcactttgtcttatgctaatgtggagatattattacgaggagtttgttaagtcgtaactaacttaacaacttagtttattttagccactgactttatatcctgcacctataaatatcaccaactcttagcatttactggaagaggttcagttaagtttcgagaggtgatcttgagagagaaagattgggaggtagagagagagagagagagagagagagagagagaggtacaaagaaaagatagagattgggtttgggatttgggatttgtatgaagaatcttttgtagacgaaaaagattcttgggtaaaagtgtgaaagtaaatactttgagagaatccaatagagaattaatctcaactatagttgtaccatattcttgctcaatcaataaagaagatttggtggtgttccaaaacttgagtacaaccattgatgacatcaaaagtgtcaaaactattgacatgaaaataaatagtagatcaaacaaagcacaaaatgaatatgacattccaatataatttgccacccctagacttgattgaaaagaaaatattatctctctcgatcataggtaaaaataatggtgtttaataggtctaatgcttgttagaaatagatctaaaaatacatatggatcttctcatatttgattatcaaatttacgagagaatcgataagatgacatatcttgttccacagtgttagatatgagatgagattgtggggtatggtcttccacatacttattttctctctaggaattcttactcaattaatgggaatgaaggaaaagagtattaaaaattagtcttagggaccaaatcctaaagttctttatatagcatactaactagagtcttataaatcctaattaagttaactatattaggtattacacattacaaaagctaataccaaataaaataattattagactcatttaatttgatcacttattcagctcaattcaaaaattaatttaaataaaatatcttaatttaagcttatatattggattattgaaaataacctaacaacaccaagcaaaattgagttggtcatagatatgttattatggatctcagcatgtaaaatggaaaaagaatataattaaaactttctattttcttgtcaatgtttttgagatatttgagatatatatcaaatataagaattaatggggataaggaaagagattggtggtagtgtgattaagaaattattaatagcttttattatttttgacgccctcaatggcaactagtttctttagcaaaatgacatatttacatactttttaatttattttatttttttcaattacttgagaaagtgcttaccgtatcaatttatgggtaaatacaagagaattctgtgttttgcaaaagttacagattggaccctctgttttgttannnnnnnnnnnngaccctatattttctaaaatgataaaa

SEQ ID NO: 114928 - DNA, 3020 bp, Cannabis sativa
  modified_base (26)..(31): a, c, t, g, unknown or other
ctctttctctcttcatcttcttcttnnnnnntctcatctattttatattattttatatatttcaattttaatctttttttaactccataactagtagtttcaaaaaaaaaaataatatataaaataaaaaaaaataagactaatagtctatcattcagctggttacacccaatttatgatcttttattgaagaaattttattagttctttttcttcttttctagacaatttatttttttatttattgactgattggtcctttttataattatatatttgttttgactgagaagtatgaacaaagattaattactctatactttctttatatttatttatattcaatttgtacatctaattaccttgtctacaggggtctagttgccaattagctgttggtaacgaggctaatattgttgcatctggtatagtcatcgacaaaggactaccaggcacaaactacatgactgttatggttattaaagttttgaagagaatgactcttgtccctatcccatgtcctagtttagatatcatttatgttgatcaaagtgctggaacgccaatcccatggcctcgtcatttagtcattacatctaatgatatatatcaacaagtaatttttcatcttacatgcttatataattatattataactattgttagtgatctttttgcatactaaagtgttaatttaattcattatgtaaataggttgatcatgatacaacaagtggggacagattacaaagatcacaaccactaccccaagagaaacaacctctaataaatcatctaacacaagagatgcagactccattagaacaggtacataatattgtttctcgatgggttgataaggacgagtgttttaatccaatcatagagaaggaagtattgggccaagatttgtcaaatttttacatatgtaaggacgacatacttcagtttactaacatgcaaaagattggacaagctgttgttgtatgttacatgaggtatatatatttatattattgtatgtttaaaaatatttatatgatttattttgtttaacaatatttatatattttattttttattaggttgttatacaagtatgtagtaaaacaaaattgtacaaacaaatttttatttgtcaatcctaatattgtggcaactttgggaggctcatttgaggatcgtgctcaaaacttgtttgatcagtgtaagcaactaaaatcaaaaggacaacttatggttgttccatgggttcatgggtacgtaaattaaaacttatcattttaattaacttttagagaatacttatattaagtaatcatctttttcttttgcagcgagcactggatgttacttttattggcgccatatgcctactatgttgcttgttgtgatcctgtcaatgttgatctccaaaaccgcgaggaaattatgcgactagtaatgactgttttcaatcgtttccttcactttatggaaatgcctcaactgattaaggataaattacaaattttaaaacccactgtaagtaatagaattttaattattttatttttaataattcatacattataatctttacttagttattaatttagaccttttaaataattagtgcccacgtcaagaagacgatgtggtgtgtggatatttcatgttgaggatgttgaaagacttaattgaaagtcaccaaagtccaaaaacttacttcaaccaggtatatataataatttattaaaaagtatatcatttatgtgtacataattattaccgtatcatatatattttataaaaaactaaatttggtgtttttttgtagctaacattaaggccatatacgcaaaagcaaattgatgacatgcgccaacaatggccggctgatatgcttccttcaatccaaaatcacaaacccaaaggcggttatatcgcctaagtcacgtttctttcaaatttggaaaacaatgttgttaattttgtttacaatatagtctaacaaatattgttatacatttagaacatttcttttaatgaatatttcataaagttcattaaattttctatcatacactaaattaacgtttcacataattatatttcaaaatatattaaatttaatttattttttaaaatataaataatataattttttggtgaaagattatatattataatttatttatttatttaattacgaatatatattaaatgtaaaatttactttttttttttaaaaaaatataattttagattttatggcgacttactcgggtagatgcacctagtttcggcatctacacatgttagacatgaaaaaaatataaattttctttttatatagacgtcttacctatggagacaccaaaaggttttacgcctcttacaggaggagacgtgtataccttttttatgcgtcttccaatggaagacgcctaaagatttttgcgtcttctcatgggagacgtgtataggtttctaaagtgtcttttattgggagacgcctaaagtctttttgtgtctactcagattagacgcttataaagtactttcaatggctctggaatcaacgtctcacactaggggagacacgaatagcttttaatgtcttcccaaataagccattaaatcccttttttgttgtggtgacatttgaaattgaatgtgatgcttatggtataggtattggcgctgttcttatgcacgaagggaggcccgttgcatactttagcaaaaagctaggtggggctgcacttaattaccccacctatgataaagagttgtatgccctggtgcgagctttagaaacatggcaacaatatttgtggcccaaaaaatttgtgatttacacagatcatggatcccttaaacatttaaaggggcaacacaagctcaataggagacatgcacaatgaattgagtacattgagacccttccatatgtcattcggtataaacaaggtaaggagaatgtggttgccgatgccctttctcgcaggtatgccttaatctctactcttgatgct

SEQ ID NO: 114929 - DNA, 3758 bp, Cannabis sativa
  modified_base (26)..(60): a, c, t, g, unknown or other
ttgttttagagattcatatttaggannnnnnnnnnnnnnnnnnnnnnnnnnnnnnnnnnntggtaaaacatattccaacactatcttcgtttggctcttcggttaatgattgtaggattcttttagcttcttcaagtttgttaaaatttgttttgttaaatattctatgaacaaggttggacgcctggacattatttttctcgtggctcttgttcattcttacatcacgtttttcagtgaaagtgaagctcccgatgaacttatatccattgtaatagttaaagcatgattgattaataaaattctattctattcaaaaaaaaatattttacttgctaagatttatatattttatcaagaagaaaattaacttcattaattaataagcaaacttacaacaacaaaaacataaccgagctctaagcaacactcttacaaaaaataaagaataaaactactcattcccaattctagaaaaaaaaaaaactcatctcctatacattttctttttacacttcaacattaaaaattcttatttgaatcaggtttttgatatttgcaactatgtaccaagccataaaagttcttttctcaaacatacatctgttacgattgagccaaatgctataaatggtagtaaaaaccattgttgtagcaatgttatccattagatatctcccttttctattcaaccaagagctaaaccttataggccatgccttaatcccaagccaactaagcaactgatcagtgactagttgggacatcgggcataagaaaaataaattctcatgggattcttgcataagctcacataccgggaaaatcaaggaggagatatttaagtttaatctaacaagaagatctttagtgagtaactgaccattcacagtctgccataacataaatatatgcttaggaatgcagagtttagacattctagttgtacattactttagtttggacaagcttgctgttataaagtttagctgacctgaattttccataagttcctatagctaaaacatcttctctttgaaatatttttctacaaaatacatagtttcctccaatacaagctgtgtctagctttagatggtaattttgaaaatcttcttgtctcaaatagatattattgatccatttaacccatagcacatcatttttttagttatggcccaaatgtatcttgctagaataggtttgttccaatcagtcccctttcgaaagcttatccgtccataagccttgggatggcacaccttatcccaatttgaaaaatgaagcttagacctatttacattcaaaccccaaagaaacaacctccataggtgtttaacttactttgtcacactttaggggaggacaaagatgcccatcccgtagtttgttaacccaagtaaaactgaatagatcaactgaactctaccagcaaaagatagatttttggttgcccaggtatgcaacttgagcttgatcttcctaatgattatctcccaatcaacatatctctatttgataggcctcacgtgaaccccaagatacttaagaggaaagcaaccttcttcaaattggatgtcactaagataccatctttaacctcctcaaaaacccctccaaagaaaatctaagatttatttagattagcatgaaggttggacatgagactaaactcattcaaagcagtctacaaaactgcagttgcctctttggtacctttgcagaaaagtatcaagtcattagaaaagcgtaagctaatgatttgaatattcttccacctagggtgaaacttgaactcctttgctcgagaatcatggagaaggttcctggtaaaatagtccatcacaatcacaaataataaaggagagattggatatccttgcctaaaacccttcatccctttaaaagttccctacaatcttccattcatagacaaaagaatatgatgtgtttttaagacaaatcacactccattgaatgaatctaaaagggaagcagagagcttttaagaaatcctccaagaaaatccaatcaatattatcataagctttactttgatctatcttaatggcacatctaagagaagctttcttataaccataatgcttaataaaatccagaaatatcattatgttatgagttatggacctattcttaatgtaggccccttgattttgatgcactaaaccaggtaagacaaaggcaagtctaagacaaagaagctttgaggtgcacttatatatagttgcacaacaagcaattggcttggagtgcactacctggttgggaacctccttctttagaatcaaagagatagtagtagcatgcagatctgttgggaattggccagtatcaaagaagtgccacacagcttcacacatttcctatcctatctctagccaaagagttttgaaaaggctgaaccaaagccattgggccccagactttatggtttggaatgctaaataaggcattattttttatttctttgcaagagaagggtttgagcagtaaaagctaattctccaaatatagttttggctcgatgttaatactctccatgttaatgtgagtacttgctaaactattactccatataaatctcttgaagtgattcaaaaattgaacaaccacttctgaatagttgtcaacaacatctcccttttcatttacaaaattggaaattcaattatcttccttttttttcccttcaaactagcatgaaaatatgaagacttttaatctccatacttagctagtttatcttgctcttttgtaagaaagctatgatacagcttgacatggtgatcaaagagattacctgcctctttctcagcttgttacagataaatgtccttaggttgttgttgacacctaagcttagcttcctgtaaatgagcttttgccttgtgaaagttctgtataacatttccaacaatgttaaaattaaacttcctcaagacatatttcagcctgagaaacttcacaaaagggcttttcaaaacccctgtgatgagtaggcttcctccagctttcaagaaattttttcttgaagtttggatgacctgtccaaaaattaaagaatcgaaaaggttttataccagaattcgtaacttgcattgatttaatcaggcacgagcaatgatttgaggtagtctcccattagaaaaaagcttgagagtcaagaaaggcatctaaccactccttatttttaagaagtggtcagttcgagagtaaattctaacttggacatcttggttgttagtctagctgtagaaagaacctaattccttatttgggttaacagtacggggaatccacacaaaattacaagaaacatgacttaaacaaagaaaacaattgcagaacaatagatgaagaacgccaacacgagacattcgaagacttcaccgcatcaatcacaccttacaattagagaaaaaggtaaccccctctcaattgcgagaaaccgccagagagactgcaaagcatagggccatggcttctgccattaggagggattcaacttcaactctctctgatagggcctccataatcagcccctgactgtctaggatcacattagccaagtaggcaaaattacccctcactgttgcatctttaataaggatgattgatttatgcaatgttgttcccttcacttcttggggctttttttttttttttttttgaaaaagagaatgattccttgccttggaaggcaactcccttaaataagggttttgtttttttttttt

SEQ ID NO: 114930 - DNA, 2166 bp, Cannabis sativa
gcgggtgcggtttggaaaattggaaaaactgcatgtgcgggttggtttgaaaaaatgattaaaaaccgcaccacccgcaccgcgaacacccctaatgcaaagtcaattaaacccccttgtagcctcctatagctcaatcgttgccatggaaaccacctggggtaggggatttaaaactcattgtggatgctgcagtagatgtttcaaggaatattattggtgttggcgctgttgttcaagacacaaatggccatgttgctgctgcacttactatgctaattattggtaattttaaatcacatgaaatggagattaaagctttattccatggtttaaactgggctctgcaacacgagctttcgatttctcaagtgaaaacggatgcgctgctggttttgtctgctttgagagctcccttcaattcaatctcctcttttaatgatctgattgttgacttctctagtcttttgtcattttttcctaataatgtaactgtttttcatgtcaaacgcacgactaacatggctggtcatgatttaactaagtttgcattaaaggtgaatgagacttgtttttgattaaaatctatttctcttatttactctgttattataaatgatctttcttttaatttataataacaagtatttccactaaaaggaaaggaatgtacaagacatatatttggacaaacaaaccctttggagaaacaaagattgaaagttgtttaattattatgtaaaatcatttaataatcacaaacaaagggaaggtttaaaagtattttaaattggagggacacacaaggcacaggcaatgggaaagaacagtgaatttcttttcttggttaagttacttatctataactgatttatgtatgattaagttacttatatgatcacaaaaccaaataactggctataaaatattcaatttctaataatgagaacgaaataggaaaaaacaaaggaagaagaataaaaggaaacccccaattacgtaatgagtttttaatcatatgcaggcgcgcacgtaccaatatataactacttattcgaagaggtacccaagtctttggcacagccttttcttactagctatgaaaaatatttatacatatatatatatccaaacaagaacactgaacagttttgacagtcaatgtatatatggatccatcatctttttcaagagaggctgctcaaaccagtggcactgttgcagccaatttgttaacaagggccaatgcattactcgcagtataactggctcttgacaccttagaccgtaaagggttcacttctcttcttctctttagtccttcaagcccttccaagcacgtgtctgcatcggttagtgccgcactcagccaagtgtttacgtcgcccatctgcgtcccgaaagttctcttgctcagatttctcatcacccttagtgactggtggagctcgtcaaccgcgttgtcaaagagctccacacagtccgacactgcagctctgaagtagtttccttttcctgatctagttcgattgttgttgtttcgattgagcttcattaggtactgcgccgtgtctttggcctcgctcagagtaacagagacccctgctctggcccaaaggacagggctttccttagccgcgcttgaaaatggcgctaaagtgcggacgcagaggctgcggtaccttgtcacgctgcaggcattgcggacgtacttgtcgccacggctgttgtttgccgtggcgaaaatggccgttctatacatcatgagtaagattatgaagaccgaatatgggttggctatttttagtgtcatagctacaaatatatgtatattacttgtatgtatagtaagaaaatttggtgacttgagtatgaattggaagagttggcttggagattataataattaatgaggttattttgtattagggagttgtagacacatatatatatagatagttttagtgttgtaattgaagtcaaaagggaaggttttgtgagtggcttttttagctgagttggaaagggtaatatacttacgagaattgcaattgggcaccagtggatgtagccttacgaggttagcgatacttcttaaaagttattacattaaaggctaattagcaatttttccccccaaattttgacatctactaaatcatgtcc

SEQ ID NO: 114931 - DNA, 5220 bp, Cannabis sativa
cgaagaatttcaaaccgcattatttttgcaatgcgatgcggtgagggcgattcgagcggtttgatgtacaccttactttttgtagtggtgcaagttgacatactgatgtcaaccctgatgttgtgtgagtgaaaaaacgtctcgaacttatattttttgatacctaagtgatatgttgacatcactaagtcaatatcttagttgtggtgatgtcgttcaccagttctcaaagatgtcacttttttgcaaaattgggtagactcaaaacttcataatttgcagctaatttgtcgatattctattttttcgaaaaggtaaaatatcaaagtgtggatttgacttgtcacaagctataactctcgttgactatggaaaattagtcaaatgctcgaggcagaattaaaattggataagaaaaacctagtgcaccaagctatatgtcaacctaggtgtgtgtgctctttaggggacttccaggggcttgttctgatacctctatggcattagagattgcaaacaaggtctcctatcccatttttgaccaataagaagaatgtccaaagcaaaatttatgtttgaggagcagaaacatgtgaatcaggttgtacgtcaacctgggcacaaggcccaactcccatgtcaatctgggtattgtggtcctattttgtctcctaaaagatctcgtttactccctgagatcacttatatcatcttcagaacacttttaggagaaaattacctagaaatgccccagttttgcctgccaaatgcttctatttgattctcaaaaatacttatatctcaattattggtgaaaatgaccaagaagacttcttgggagaaatgtttggaaatggcccaagttgacattgttgggtcccaattttgactcttagatgtttccgtttgtttcccaaaagcacctatatcataattgttgatgaaaatggagaatatgcccataagaatttgcctgaactattgttggaaatggtccaggttgacaacatgttaacctgggcactaggacctagcaccaggtcaacctgggcactgggtcccaattctagccaccacattgattcatttctttcaaaaatatacttgattcctcattttggatggggacgaagagaatgcatggggatagttcttcaatattgtggttggaaaggttgacatacaatatgtcaacctgggtcctgggtgcatcaccaagtggtctgggcaacatgtgctcgggtgctccaaatgtgaagtgttcaaattctgattccaatgcctttgtcatattcgtggcatgtcttatttatgtctaagtataaattttgagccatgtgcactaagtcgtacccaaaaattgaaatcctagttgggaatgttaacctgggtactcggtgaaaaccctaagcgctcgggttgactttcagggtgttattttgcttcttttcatttttcaaatcttggacttggattcttcttgtcttcttagtttagaatattgaaggatgatgagttgaaaataacttggcaggatccgaacacttattttggagttcttcgagtcaagttgggcacctgactagggacctcttccaggtcgacagctatgactagggactactcaattctgtaaatattttcttttttgtcacatgtcaaacattgatgtccacgtcaccagggtcagttttggagtaaacaaagggtaatgttgacttcttagaaaaggtgtgcttgaattattctcttcagttatattaatttgaataatatttttaaaataataaataaattttaaacatcattaatactatgacttattgttaaaaaaaatattacgatttatattttatctatgagacttcttttttggaaaactaaattatttttatgttattgacaatagtataaatgtgcattatacgtaaattttatgtcgatagtgtgcataaataatatagtgaataaaaataaataacaaagtgataaaatatatgcgaacatttattttaattaataaaaaatataatgaaattttatattttttaattattaaatctattttcttaatgaataattattatttttttattatagttaatagatataattaaaaattatattttattttattttatttttttaaaataatatataagattgaagtagtcaatcaatataattcaaatatttttgttacataggtgtctactacaatagtgcatacttgctcccttaaatatttttgttaaaataatatataaaattcaagtgtccatatataaattaccattatattagagaccatcaatagtttttcagtacatgtatgtagctacacatatttttgttacataggcttctactacaatagtgtatacttgctccctttaaattaacctaagcaattaatcaagcaaaattacaaaatggctgagagaattaaaaacaaagaaccaggttaaccaaaaaaatctaaaatgagtgtgttggcaaacctttatatgcttaagcaagcccaattgaagtaaataataatcaaggaaagaggtaaaggtaatctaagataattatcctagctaggtttaaaaaaagaaacaatttcagcccattccatttgaatgggtcaaaacatcattatgtgaaatgggatatttatataaatagaaaaagaggtagaagtgtagaagagttaaacaaaccatgtatggtgggggtatttgtttgataattttgcccataaaagtatattaaaaaagaaaagagaaaaatcaatttgtgagaacatagggaaccttgaaagacatcaatagatattacctaacattcagcaatggcccccatccacctctcatctccacacttgacactccactcttattcatttcattttttcacagttgtgtctagtctattacttggaatgattattcatttcattcagtttatatcactcaccaaatgcacaaaccaaactacacattaattcatgaagtaaatacttttaccaacaaaagtgtatctttgtactataatataaatatagtaagaaaatatattgaatgacacaactgaaataatataatatattagatatataataattatcttgtctattcaaattgtaacttaattttttcttcttctatatatcaacacaacatatgaaaaacactctcatatcataactctcttcaattgagcaaagacatgtgtatgtatacaaaattaaatactaataaaagaaagaaagagcaaaataaacaaaaaaatgagcatggtattattagaaccatgattttccccacctagtctgaatctgtaagcaatggaaaccacattcataaaaaagggtcaaacctagttgttgaccatcttgggtttagcatatatttcagagtcaaaggttcttaaggtcgcagcaccaagacccaagtttttccatctgcctaactttgctaactccaaattaattaaaataaaaataaaatatattaataaataatagtacattaaatatatttatgaatgaatgaatgagatgagtggggtgggaattgtttggatagaatagaatagaagagagagaggagcgtcccctttcatttctcatatatgctttgtttcttcttccctctctctgaaagtggtccagcctttcacacgtgaagacgctcctcttctgcaattatattcacgtgcattatcatactcttctatcttaatcacttaatcattttttatatatttctttttttttattattattataatgtgttttttgcttcctcatactttggctttctaattatggcccaaaaaactttcataaaaaagaagatgaataaaattattatggcccaaaacctttctcctcctaaaaataaaaacatttacaagagtggagtggtaggaccttttttttaatgtccatggacaagtgaaattaaatttatgtttattgcaattactaattacacattcccttttgtacgagttttttttttttttttttcaatgtcttttgctccaaattaagagataatgtaaaaagagcttttgtgtaaacaaattacttaccatgttcaaagtatggagaggaactagttgtatcaattaagggataatagtaacaaaactcttgtatgtttattaagtcgaaagaaataaatgagtttaaaatattattattattttattatgttgtttggtaaactcactaaaaaaatataattattttattattttgtttatttaggaaatgaaatcaaaatattagtctcaaattgattagaaacatatattcagtccacttattagtctcaattttttttttttgttttttttgagtgtagcgtaatagtacttttacaatcaattaatagcttgtagtttaaaagtcttgagttcgaacccatgacttctccattttctcatccctcactcaccactaagctagctttagtggcttatctcaataaatttcttaatatagtatcacagtagttccaattttgtaatgttaggtgaatccaatatcaatttattcacataaagggatatgttagagtctcaaattagctgaaaatatatactcgatccccttaattaaataaaaaacaatcataacaagtatggattaggttcaataacttttataatacaaaatcttttaatttaattatattgtcattttaaaaaaaaaaataatttttgtaaggcatatttttcatttttacaccttaatacaatttttgtttgtttgtatttttacggaattccacacataaattcttatagcaactaacggagtaaccaaaatcggtataataacccacatagaaattaccggagcaacccaaaccgtaaatttttaaaaaaatagttaaaatatagtatatgaagtaattccccacatatttatcttttttttttaattaataaaaaattgaaataaaataaatcctgaaaaggaatataaaaattgaagtttcttttctcttttatttatgtggccctactagttcttttcatttaagtttagtaaataaatgaatgagaataacacttgatgttatgcaacctactttttaagtaattacatgttattaagtagtttcattttataacacttgattctctgtgtaaaatatttgataaaaaaaaaaattctctttaaacttattgtaattcacttttttaatttatttatttatt

SEQ ID NO: 114932 - DNA, 5144 bp, Cannabis sativa
tatcgaatgttgggtgtgtttttaaattgaatgtttttggattatacaggcgctaattacaattccgagaaatcctaaccaacccgcaatcaagaacctagggtttaccagtgctgtttctcgtcgcccttctctctcgaattctgctcggctttggacttccagggtttcaaccagctcaattggctgcaatttcggtcccctacttgccgcggcgaatggaagacggtgttttgttgtgagggcggagtcgaactccgaaggtgaagctgaagctgaagctgctgagagtgttgtggagaatgaagaaggtggagttgaagaggcttcggaggtcaatgctgaaggagaagaagaagttttggagactgaggaagcgaagccacccagaaagcctcgggttaagcttggagatataatgggggtactctttttaatagctttttcagtttttctttttaaattcttatcacctgataaagattattaaagggaatctttgtttggttcttgagaataagcaggaaaagaaaactcatcatagtattacaatttcgtgtttatatatacatgtgtaatgtagggagttaaattcactttgttcatgatgaatgatgtctctctaagttgaaagttgtcatgactctttaaacaatgattatttgttgtgtgttatcattaccattacgattcaattttcactcagctgagcattgattgctgggatcctctttgtatttgctgatagcaactttaagtagttgaaacattaacttgtatactatatagaaggaatgtaaataattggcaagttgcttttcctgctctcttgtttcatcaatggatcatttttgtcattgaagattttgatgaaaactttgtttattttaccagattttaaatacaagggcggttgacgagtcacagaaagaaaggccagttccagacataaggactggagatgttgtggagatcaaatttgtaatgatgcttttggtttttggctttcatacttagttttagttcctgtaattgttttaaatgaaacttttctgattttgttcatgtgaacgattcacaggaagttcctgaaaatagacgtagattgtctgtctataaaggtattgtcatttcaagacaaaatgctggaattcatacaacaattcgaattcggaggattattgctggtgttggagtcgagattgtattccctctgtaagtccttttccaataagtaaaattttcagtatgctactctgcttgattcagttttataatgtttattacatgctgattcttagtcatgacaaattagctaattgtgattaatatagtaatttagaacatatagcacctataataagagcatgtctcatctaagttttgtttgctttcaattttttcacaattttcctgctcattttttttttcttctttttaatatttaaggaaattatgtatgtctacatccatataccatactgtaccataccaatgaatataaggatcatacattttaaaatactgtttggtttgtacttgtgcacgaaccatataagctgaagtacgatgcttcctacatgcatttatcggaatctgtctttaagttagtaaagagctcatctttatagctgacaaggctcattgagtaagctcatctttatgtagaaaaccagttgttaataaaggcacacattcaactaactagatctgtgtgcctggttacatgatacaactctatccatttgatattaaactctgttagtgttaaggacaagaaatgcaaagttgatgggtttccaaattttcatttgactctcaattggaaataacaaatagcaatttcatatagttgtcatttaatttttgtttctttgccttttatcattaattgcaggtactcacctaacataaaagagataagagtagtgagtcacaggaaggttagaagagcaaggttatattatttgagggacaaacttcctaggctttccactttcaagtgaaaaacgatgccaatcaccagttgtttttgctctgaaacttatttcccctatcatctcatgttcttgtaagaacttgtgcctcctgaattcatttttggtaaatgtatctgttctcttgttttcttcataaatttcttattcttgtgaattctctttcaattcaaatgtaaccacgggaaaccagctagaaaaaaagaagctgggaaggtactcagtcatcaatcaccatatctcattcattagatgtaagcattgcatctttaaaattttcattctattagaccaatttaattaactagctcccctaactagctttggcataagaaactagcatgactcacaaggttgcatatgttggcctagagcgaattgttgtaccacagaggttaattgaattaattgttgactaagttagttttcaatggggttgctcacttcattaacctaacgaggtgatggagtagagttgcaacgaatgccaaactattgtgaattggcaactatgtttgaaattatgcttctggctgttgcaagagttttgtctactagtgcacttccactagctatatcaatcatactcctatctagtggtagtaagtattcataaaaggactcgataaggagtcacttatttggtgatgcgggtagctagcacataatcgcttgaactattcccgaaactcatataatgactcccctgtaacttgcctgataccatagattttttttctaatgcttctaactttagaagttggaaagtaatgctccaagaacatagttttcatgtcattctatgtttcaataataccaggtggaagatagtacaattactctttagtttagttgcatcttgcattgagaaagggatagcccgcggcttgatttgttctttaatcactgaatgaggtttcatactagaacagacgatatgaaactcctttaaatgcttgttaggatcctcattgggaaggctatggaaagagggcaataagtgaatgaggtccgacttttaatgcaatgttaacattcaagggtggatagtggatgcacagtgattgttggttaagatttagcgcatccagctttttcaatgccctattttaagccaataaaacttgtgagaattaattgaatggtcaagaacatactcgtgatcagatggtagtggctctttaacatgaagaagacgttgaaagagtggattgtcggagattgtcctataagagcgataagcagaagatgactcaagatatttctttagctttgatagtaattttgtgtacacttgagattttaaaagtgaaatagttagtgaaacagaaaaataattgtgaatacaaaatagaacaatagtctttggcaacggtgctaaaaattaaatgtgtgtcgtatgtcgtatcaaatttactaattacttttatttttatcttaccaattactttagtataatgataaatacaagtcgatcccacgataactatgtttaatttattattcaatatcaaacaaaaattaaagaggggttttgaattgcaattaaacaacataaaaagaaaacaaataacgaatgacgaataccattttaaaagtagttaagaattattctccatctccaacaatcaatcaataataacaatgataaatattatattttattctaaaattaaactattaatctcgtagataattatttatctcaatttccttattacaattaattatggtgaaatgttcaataatttaatatttttactaagcattaaattctatgaagacatgttaatctaagttacaaatcattttcgcatataattcatttacttttaggttatattcttcatcacaaataattatacttgtcaaaatactaataaaaacaatttatcacttaaattaagaatactagactattaggtgaatagaaattctaagaatgatagtagaataatgtaaaacctaatttagtggtcatctaaacaagatcaaacattaatcataaaattaagcatagaagaatataaaattcaattagaaggaataaagtaatagtattaatcaaagcatttgagaaagcatatctcggattttgaaataacctttaatttaaaagaggactacttcataatctcaaacataatcataagcataattataaataaaaatcaaaagagtttaagaagaaaaattaaatgtagatgtagattgtcctcttctcctgagttctctcattcaaaaatgtaataaaaaaatttcttgaaataaactctaaaagcgataattataaaacctaaaataaacttaatttaaaccaaaaattgattttttttcgtaaattgtacaaacatcgtacagactcgagtgcctgggcggagtttaagtagcgcctaggaatagttcctaggttttcattatcacgtgctcagatcaatattttacacataattttttcaatattaattaaaattggatgattcaagatgttatgaaaagttgagaacaagattttaaactttcatgcggagcttcaaatcaagttatgcctttaaaagtgtcaaaaaaatcacaattacattctattaagtcaaattgagctcttctgcctccaccatttaccaccaaaatgtgttaaaatcatgtcaaacagctccaaacgtatgattaaccatcaaatctcctaacaaaataaaatcatattaatcagcaattcaaaaaataaaaataataataataacacaagaccatatttataagctaaatatagacttatcagttgtatttgctaggcttcaagttggttaagttagttaaatttgttattgcttagcttgtaactaattttgttatctagctcgtgtagagctttgtagagtgatccaatagcacagaacctttcattcatctttgtccatctctttctctgtctttcctttcatcttctttcttttcaaacaacatgtctaaaaaatctaatactcttatcataagaccgaataatgcacggttagtaattagtataaataacgattaattagtacaatatcgtactcatcaagataatatgatttaatatagggtaaatactattttggaccctctgttttataaaagaccaattagaccctgtgttttgttaaatga

SEQ ID NO: 114933 - DNA, 2669 bp, Cannabis sativa
ctatatacatgatttttttcaaaccaaagaatgcacatactatgtatattgtttttgtctttttgtgtctttgtacacaaaactcaaacatgttttctgaataatcatggtcaataaaacaaatttccaaaattatatgagcacatgcacgtagggttttgagtgtagacttttctggagtcgtcttccgcttgcggcgtggagttgattttagtatatatcacctggatgtgtcttcgatccccactaccagtgctgaaatttcaaaccttttaaattgaaaaactaaagtacattaaaaaggagatttgatttttcatgcttacaaaaaaaactaaagtacttaatacccttttaaattgaaaaataataaaaggtatcagcagtgcaattaagtatcgaatcttatataatttaatataataatttttgaaaaatattgctagccaatcataagatgacacccctagaaggtgctagacaccaccagtactcaataacaatgctctttcaaattagtgtctaattttgcattttctttctcaacctaacttcctctcgttttttcacggccaagaaccaaaaccagagacccattcgaatcatggaacccaatttcaaaccaccaagcgagttcaaaaccccctcgaccacttacccaaaaatatcaaacattgtggactttgtctggctaatcttaaggaaatgtcatttttattatagaatgaaggttatgtttagtattagttaagttttttttttttttttttttgaaaaatcaattttttgaaaatctagtctggaaaaaaattggattttttttctctttgccggatagtgtacagtatggtttcgatagtctcatgttaataactagaatttgaggttaaagatgagtatagagttattggtacgattaaaataataatatgtaagtgcacacagttacaatttgtaataatcttggaagaccaagtatcgtgccacaatgactaattatcaattaccaaataatatgtagaaaaatatagattattatgatccccaattagtttttcttttagttcttaagcatccaaagattcaattaaaaacataaaaaatgaaaagagatgagaaagaacactaattggagtcctctaatggtgtcctatgctttcagacatcctcctcttctcaattttgactccaaagtcgaatatatcatgaaaacctagcatccaatcatttttaggtcaaaaataagacactagtcaaatttagctaagtattgtgaccttacttcgagagtcgcgactcttaaattttcttacaaaaacgactccttttgaatttctcaagcaccgcgaccttcaggggaaagtcgtgactcttgacttttcttcaaaatccgcttcctgtaacaattggagagtcatggccttcaacgaaaggttgtgacctttgatgctgattcttgaaaatttgactttttaaatcatctaggttgcaccaagtcaaaaaattcaatcccgagattccctttcgcaaaagttcatcatttcatcaccaagaaacccgaaaaacaacatattttcaccaaaaggtaaaaatctctttatctaaaacctaaaattaacataaaaataaaaataagctagcgtaaatccgaacaataaagcataaaaaataaacctaaaattagactctaaaataacctaaaattagacctaacaacgatacgatatgattgtttacccgatactttgaaagaaatattcactttttgttgctcaatgtgttactttaataattacaaaagtacaaataaatatatgatttttttatttaaaaaaaggtctttattttattattcattaatgtaaaaagggtgaagagtatttcattccacttattaattattaacattttctacttcacctattttataataaaattcaatagaatataattaaaaaattacgttattgtaaaagttatattttgaaaaatattatattttacaagtcatatatcataaggggcacattaatagtgtaaaaggttaagagggcaaaaatgttgcaaattttttttatgtaattaatagtgctgtaccaacttatgtatattttatttatgtattatgtagtttaattttgaaaaattataatagtaatgaattttgtattaatgttggtgttaaaataaaatatttttaattttttaaattaaattaaaattttatacaatttattattttaattttaaatttgtttaactatctttaattttttttttttaaaaaaaactaaatatattaatgtttctcaactttgtaaacattagaggcctgctattaattattattaatcattgatagcgaccagtcaaattttaaagattgtgttataaccaccgagttttgtaatctaaatgaaatagagttacttcctatttctcgacccaacaatatggttttattaggggtagcaaaatgtaatatcgtatcgtgttcatgtcatattttaattgactcacttctatatttcgtgtcaaatatatcgatttgttttcgacccgcatataattttctcaaccctaacagtttggttttatatatttataggtttagcaattaatgttactatatacatgatttttttcaaaccaaagaatgcacatactat

SEQ ID NO: 114934 - DNA, 2137 bp, Cannabis sativa
accttgtctgtcagtaatagtaaaaagtgggcagtcaatgattgtgatgtagaactaacgaaattcaaaggtaatgatagtttttgttatacatgctattcagtattcacattctgtaaatgaaaaaggtaaattcctttataacactttggtacatactctgattaatttaaaacgcagttatataaaacatttctatgatcaacgaagtgagttgttaaagccattgcagttgatgtctccttgaaaagctacacctttatgatcagtagggttcaattcagtgcctctaacaaaattaagccatctttcttgaataatatccaagatctccacgtctctgaattatataatataaaccaatacacatatatgaacacttagaaatattattacatatcaaattatcatactagtatattataaggaaaactatatcatatgttaaaaaatttatatatttaccttgaatgagaagattttcttggactctgttcatgaaaacgaggaccctcatcataaccttcgcaaattatttccccactttcatctgtgtagcagattattccattagaccgatcttcaaaaacctgcacctaagaacaaattccatatgagtaaaccatggcttgttttctaataatctttccaacccagttgagatttctgctttttggatctaattcaataataaaaagaaaaacttgagatatatgtataattatatcaagtgtcaatggtggcagaacaaagaagaaagaaataaaagagttgaccttctctttataagaagatctgatcttgaggcttggtgctgttattttcttgactggaatgtgtctctgttttagcctcaaaacattaccaaaaggctttatgactaagccagtggactttttggctaataatatatgaggtgaaaattgacatgttaaagccattgatgaactctgttggtactagaataagaaaaagaagagaagatatagaatggggaatgaagaagttggaggtggtatttggtgttgctttaattggcctaaatacttaatagaaaaaatgatctggtcatatgctttctcttaataaatcgattatgttaaggtaaggtaagcacatagccattaaaaaatgaaatacatatattatcttatatataaaactcaattattggaaggttatgtcatttcatagtgccaatatataatggtaaatatatagttgatcagggccccactttgcttatcttctcctacctattgacattacctgtgaaacaaacccaagtcatattagtggtagtgggtctattcacaatttcaccaatattcatactcaaacctttatttcttcttttttatatatttttttttcttccttgcttttgaattttgttgctgaacttgaaaagaaagatgttaattactaaatttgttttcaagctttgtgttcaaaatcttcatctatttgtttgaaaatatacaagtctcttaaagaatcattacagcaatggaaacatatccaatgaaagttagtgtacatagcataattcataaatataaatatatatgtgtgtcgtaagcataggaaaaatgtggcttaaaatgaaactttacatattacataatctttaagactttttcttttaaattagcctttgatgataagcagataatatggccccctccattaaaaaattataagaggataatagaaagttaagactataattagagagttggcattttatgtaggagaattaataaaatactgtgtttactttctgtcttctcagctttaagtatatatgagaaaataaagaattaattaattactttggttgtcttgattctactcagcagtggctattcactaagtaagtattattatatgtaagtagtagtacacgtaagacttgtttgttgcatatggggatacctatttattaacatattcttgtggttggattacattcatcaatcatagtcaacagttcgtagaatattataatatatgcactattacatctattatatatgtgattaatttaaagttatagctagttgaatttctattgtaaaagttttctttttcttagttcttttttccaagtaggcttattatcaattatactgat

SEQ ID NO: 114935 - DNA, 6716 bp, Cannabis sativa
  modified_base (5373)..(5375): a, c, t, g, unknown or other
  modified_base (5597)..(5598): a, c, t, g, unknown or other
  modified_base (5764)..(5774): a, c, t, g, unknown or other
  modified_base (6138)..(6140): a, c, t, g, unknown or other
  modified_base (6390)..(6405): a, c, t, g, unknown or other
aatctcaatagttcagggaacatttttaacgaccttaaaagttcagagaacatgatttagtacatatcaaaatttagtggacaaaaatcttaattaacctattgttaaatataaatatttatatatattagatatatctttttagggttaaatatatattagataattgtaaatcattatctaatatatattaatttcacaattctagaggataagagtatcaataaaaaaatatacaaattaatttcccccgttttgaaaaaaaaaatgtagtttctacataaaccaatttgggaaaatatagatctgaatattatctttatactgtttcaaacaagaaagggtaaacaaattaagcaatttttaactttttttcgtttttttttaagctaacaaaaagaaagctggtaaaggaggaaaaatccaagctgaatcacgactccccccatggaaaaatgtacaaacgggaactacaacttttaactgctaatttctctatcaaatttggttctctttgcattctgcacctctgacatggaactaccacgctgctggtatgatacatcatgctgatacgcacaattggctccatgccggcagccccttgagctattaaaatatatgcaaggtttcattattttcggctttgactctctcggcttagggctgttaactatttcctggctcatcgctgattggtgattataacggttaccatattgtggagggttcagattctcttgcctgtctcctccgtgttgctgaatcaagctcttgtagtaatttatgtctttcgcagaagcatttacctgtgacggtggacagggagctggaaccggcggagggggtggaaaccgtgaatgtgaatttgttaggtgtcccatggcagccccaatgggataatgagctccacttgatgtagcagctgatacaggtatgctcgacagtgtccgattaacctgagaaggaagtggttctgatatgtttattggaggtgaccttgtaatgggcgtgttctgtgagacggggttgggggttccgaattctgtgactaattgctcaaccatcatcgggttactaagaatctttagaagcaattcatggtctatcaagttcccctgctcgttgttcactagtccagtcaaagcagcagccaaaatacctggttctgtgctgggaaccaatcctgccgctagcttctccatgtcaggaggatgtgccatgttcggtgcaccatgttgcgatgatgatggagctccaattgactgttgcatagactgtgtcttcatgggaaaactaaatggcatcatgggtttggatgatgaatcggctacatcttcatcttcaatagccgtaataggtattgacggagttcgcacatcatcataaggagaatcatctatgtttaacatgtccgaggagctagagattacaaaagaaaacagaaatcattcagtaaggcaggtaatcatcaaacacacacgaatcagtaattgtagtaagccaggtaacaaactttggcggaatggcagatgggcgtggataaactgcttctagtactctcatttccctttgattttggatactagcttcttgactttcttccccagcaaccacgcaccaagccaagtttaatacaaactgtgaaattcagacaacattaaggaacctgtgttaattgttaagtacttcaaaataacatttgcttatcatcaaccatacattgaaaatgcgaggcaagatgttatactgacatgtaacaccaaaatatgattttacctttggaggacatctccattcaacaataggaatttgagacaatttggtttgtaacaaatttgcggagtgagctccttcaaagcctggaggtagaacatcgtcagagctggctccagttgaatgtgataggaatgccttagcttgaaggtggtcttgagaatctactccaacttgtgaaggagattcttcgcataaaaacagcttaacctgtaaacagagcattagtgacattgaccctagagcacaagcaacaaaatctctaggcttaataacacaagttaataaaatttaggaaactattgaatggaaaacacaaacaaatccgtagagaaacatcaaccttctgtagtgaaggttatattaatcttgaaaacatgcaccagtgtacggagacttagttaattttaagtacgtttctaattattagagaaggtcttcgaaatacaagtttgtttcccaaatatagttgctttcctgtattgtgatgattttactattcatgctaacctgcctatttacaaaaaagctaagcttaaatatgttaataatcagaatattcatattcctccctctaaaattgtttatttctctctttagtatgtccaaattcttgtctttttataaattcttccctgtcttcttctctttacccttggttagttggttctacatatcaagagaactttgatgaaataagaatccacaaaaatttccaagaaacaaaacatgtacagagtattcaatatactttatttgtaaggaaattaaaacaaacaaaaacaaaacaaataccacattacattctaattctattcccagatatccaaaaagtatctctcgaattcaactgaaaaatgaaagctcactagtgtttctaagagggaaaaatttccattcaccttttcaaatccacaagtatatgaaaaacgaattcatgtagcagtgtttgcacttcttgttaaaaagagagtggacccttcaacttgaaggcagaaaaactctcaaccaagtttttaaagaacaaatgcgaaacatttttacttttattaaaaataaatggatttttaaataaatggatttttattttgaagttctagggacagaagttatcagtggtaatcaatttccctggcagataataagtagaaatatagttaccaaaagttttgagctaaaagcatgcacatgaccatggaaagaacaaaattatcatctaaatcaagaacaaaagggctataatcactttacatatctctaatgcattcatcaagtaaatatcacctttcttaaaatacatatggaacctctacattcccctttcttactattattcttagcatcatcttctatatatctatacaatgaaaaaactccctacaattatctttctcattagctaatatattgccaagcatgtgcgtaccacaagaaaaaagaagcaaatttagttgtccctcgagcaccaacaacatgaattgttatgttatttcctctttaaggccgatcgacggtcatccatcccccgttcatgtaacagcttagaaatattaaaatatatttcactgcttactttctaatgatactttcatgtgttagatcatatgaataatgacttcacagttttttatttgtgaatgctgtggagaaagagatctcattttgacaatgcaaagcactgctgaaagtgtcagttgtcttctcatatcatttacacacaattttccccaatattggtggcatttgccgtacaacatatgtccgttattccagtggtaaaactgcttcctctataaatttcatgaaaacaactgaaaaagaaaaccagttacaccaaccacatgaaactaaccacagactctctaagggaatgaatactaagacaaggtggtgtaagtaagcagaatctgaataacattggtctactttctgaggttccaaaatttattcattgcttaccaatttacacaaaaatatttgaacttcttcaaacaatggagtaacttatcaatgctgttttttttgttacttgaatggttaggcaaaatgaatgaaaaggtaaaacaaaaaattgaaataaatagatcgcatgatataccccgattaccaataaaatgaaataaaactaacgagcattcttttatttgatattatcacaaaatgaagtgaaaatatataatacttaaaaatcaaactaatcaatagatgcacggaaccaacaatagagtgaaaacacaaactaaaagaaatatggttcatagttcaaacaaatgaggtaatgaatcactgatctttagagagtatgtaaatatttatacaattaaccagcatgcatcataccagaaagaaatgaggaagaaaaaaagttcagggttgatttttatttaattttcatcatttctacagatatcgaatatctccacttggcttagatatcaataactttgttgatttctttgttgattattattggcaatgtaaattattattgattaatacctgacaaaggtttacatctgaagcccaagagacccttttcgatttgtgcgattctcgcatttttaaagaaccagtaaaatcctctcaacaatacttgtcttccagctccgatttcctggtattagttttaggtgtccgataaataatgtaataaaccctaaaaactcagattgaaaaccctaatgtttacagcgtcctaaaatccacctcgaagtaccgccatacaatctcaccctaattagaggaagttcaagcgatctaatcgcaattgcaaggaggaggggaccaacgccaatcgaaatccataggccagagggagcaacagagccatcaaaatgaaaccctaaatcctctggtttagtctttagcagttcgtatatatcccttttttttctttcttttttttttttttaatttataatctaacagttggacttctcgggtgtccgatttcgtatctgtttaacaattttaactgagtgagcgcgtggagttagagtagttaacgcgccttttaaagctaaaataattttattttatttttagaaaaaaaaaatagaggagttttattttatattatacatttttctgattaaaattaattttgcacaaggagctgtgctttgagcaatggccacaggattcggtgtccacaattaatcgtatatgtctggcagccactttacccacgtgtacggacactttttttataatactttttctgaggggacctatttatcaaaattcaataataactaaataattttgagatttttgtcaataaaaaatacaaaataaataggagtctccccgtttaagacttagagtatttttaatagtagcattttaaaaatgcgtaataagatggaatgagtgataaaatataaggatgttatacattaaaaataaaataatattattcttgaaatttatattaatgtcacacaacgacgttaattttatatttttttaaaaaaaatataatttaagttgcaatatagacatgggatatgattttgttccgttattgtacttttacggattgtaattcatgatgtacggcagctgtcagatgagggagttatttgatctgacggnnnagattgatctaggggtaattagggctaaaaaatagaaacgtaccctgacactcatttaatgtaccttgagacccatctaatgtaccatgaaatacattccgtgaaagtacatcatgagataaaatcatatccctatatatataatagtttaataaagaaaaatatttatatatataataatgtgtgaaattattattagagaaattatctcatatactattnntttaacttttttttttttcaaatttacggtttgggttctataatgatttctccggtgatttctatgtgggttgctatacgaattttggttgcgatgtaggttgctccgttcgttgcaatagtggtttctatgtagaattccgtaaaaaaaaaaatatatatatatnnnnnnnnnnnaaaaaataaaaaaataaataaacttttttgaagtgtaaaaataaaaaaaaaataataaaaaaaagtcccttattattataacattcttaaaaagtgttacatcattagagtggttttagaagtaagggtgctaaaaatgatgtggaataatgatcaaataaaatattatatttttggatgatatggaaatatatagcacattcaaaaaatgctactattggagatatttttatagtaagtgaatattaattagttattttttaatattaaattataatatttattgaagatatattatttttatataattaataataaaataaattattgttgttttatgtctccaacaataaattaaaataannnaaataataaataataaatttaaaggaagaaaaaaaaattatatgtagaaaaaaatattaatcttattttagattatattattcttgtattaaaaaatgaaatatacctctgatttattaagttttaaaatatatttttattatatattatatttttaaattatttattattttttgtgacatttcattggttatagagtgagatgtattttatttttgggataattacataaggcactattttttgtaannnnnnnnnnnnnnnntacgtttaaagaatttttttttactttcttacgattttccataaaaataacacgaaaacaacaagaaaattatataaaagtaacatgaaaataacatctaaataacatcaaaatagcaacaaaaaataacatacagataacaacaaattaacaagagtacaacataaaaagactgtattttctgtaaataaaatcaaaaatcgtaaaaatttgtaaaattccgtgaaaacatatttttgtaatttttttgttgtttttgtgtatttatgaaataatccctttattttttagggaaatttgatattatatgc

SEQ ID NO: 114936 - DNA, 1433 bp, Cannabis sativa
aaaaaaaataagtttcaacaatacaataattagtgggttttaggttggacattcacatattggactaaataaatataaaagttggtatttttataatgtgcgatgtggtgcggtttgaacttcatattaacaattcaaaaccgcaaaccataccgcgctgtttaaaaaaaattcaaaccgcgaccgcattgcaaagaattttaaactgtatttgtttgcagtgcggtgtggtgcgaacgatttgaacggtttgggcggtttgatgaacacccctatttgtatgtattatagttgatggtggtgaatagtgaccaacgatgatggttggagtggtggtatttattctttgaaaatgtatatatatttcaatgtttacgaatgcttatctatcattttaaaatgattgacttttcttgcgtaaaaatggagatttaagaatgtgtttatatatataatatttatgtatatatattggtattgtcaaatttttttgtctagaaatgcaagtacagtctcgtgaaaatttgacatatggacccatttcccaaaggaaaaggatgatgtgtcaatagaatagctctcgaagagttagcctcgcataatcgaaacttgcgagacggtgcgaccgagacagggcctagtcggtagttacacgctacaccaattatagttaaaaaataagcaagaccgagagaagttgatactaatcacgcatatcaattgtatgcgatgagcaagaatatctctttgcaacaagtgaagatcacttctttatatatgactaatgtgttcgaggactcgctaaagaactcgcatgttttaagccgtcgatataaggaatgtccaacatgcaatccaaggtgatcgagacattcaactaaataagcctgaaggcctattatacgagtacaacaccacataatctgtgagcttgcgtgttaggatacgaatggacaagttgcgacctagtaagtcgcacacattattgcaattaagacgaacatacaaaattgttcttacatatatcatttaaacattttttattcattaaattgtgtaataattgtaataacggtcctaactgattggttgtgtaaactcaatgaacacttgctttttatataaatggatgatctaaatctaataaattaagctaaaaattattaccagaagtggactaagccgaccgagctttgactgaactactataattctattgtcccctttatatttctgttctagcttttatttatttcgtagccaaaactttttatctatttagtagccaaaactttgagtactcgcataactgctagtgaatgttcttgtctagcttgtctagcttttatgtaacatccattattttattttttatgggtatatataattgacctaatacaattatttaaataaggcaaatgggccttcacaat

SEQ ID NO: 114937 - DNA, 1694 bp, Cannabis sativa
  modified_base (1651)..(1658): a, c, t, g, unknown or other
ctctctctctctctctcaaactcttaatctcgtttgaacagagttctcaagctcgtgtatctcaattgtgtctcaaataatgagtcaatgtgttatttatagtcttaggatcaagatcctaaagtcagtggttgcaagaaacgaggttgttaagttagttagaaaataactaacttaaccaactcctctttgagtgaagtctccacgtcaacttaagtaccagagcctctaggaacatagtatcaaacgagtcttaaaaaatagttagatctaacattaatgatatactataatagtcacacaaaattagtataaaatgtaaattttagggaaaaaaatactaagtgaacgtaccaacatttcaaactacacttttgcttcttttgaccaaaggagaataatttagttgctcatccatgatgatctattaaggtttgtatgtactagaatttgatggagttcattttcatttttatttttattttttatttaatttatattaattttatttttatatataatagatggagaaaatttgaatgtatgttaatccccttctttgttcacataaccttgtacatgattgttcaattttaatgaagaaataaaagaaagttgcagtgcacgctttcatgtatattttctcttaggaaatgtcaaacatgataaaagtgttaaaaattattgtaacaagtcatacacaagatctatatatacattcattcgttcattgtatacaacttttatttcattttttttattaatttaatatatttaagaaagtaatgagtaattgggagagttcagaaaaaattaataaaaaaaaaattgcagtctaattttgactatgtaattgagcaatattgtgagcttccattttcttatctttccatacctaaaatacattctaacttacttttagtattcaacgtctcaaacaacccctagaaagataattcttatttctaatgaagtaagcatgttagtaaaaattaaaaaaaaaaaaaacatgtagtattctaaaaagaattatcaatgtttatgtccattcaaaaacattatcaatgtttatgttatcactacaaattttatatttatatttagttataacaaactatatatatatggaatatttttaatggttacttacaaaattaataaggtgacaatttggtgaagttatcaacatattattatttcctaaaaaaggtgtaccgaagtaatcttttgtgtttttgacatcaaaataattttaatttaattaatttttgtatatgacagtgtatatatattgtaataatctaagacatcttgtacagagaaatttagaattatttataatacaaaaggttcaaacagtttatttcacacatataaaataaaagaagtacgcatacaacagactgtttgaatcttattttaagtgtattaaattattatataacaattaattaataaaattgtgagaaaattataaccaatgatacaaaatcaaaataactaaattttaaacaatcaaaagattagtgatggcaagattaacaaaacacaaatagtaatcatagaaaaaataagaatgagatagtatgaactattagaatattttatatatggaagttattttctaattaaggaaatgattttctatttnnnnnnnnaaataaataattgattttctgataaatgaatatttt

SEQ ID NO: 114938 - DNA, 3094 bp, Cannabis sativa
ttgccacaaccattgcaccctccaccgccttacccctacatgtatggaccaccgtacacacatccatacatgtacggaggaatttcacaacagtatccttctactttctttccgggtttgactgatatgggtggatgatcacagcaacatttgccatcacaacaggctcaaccagcctacccatatcaacggatgatgggggcaccgacatcacaaccgctacaaccaccacatacatctcagccgctacagccaccgcatacatcacagtcgccataactacctcagacatcatagtgctagccaccgaatcatctagagttcgatgagaatgagagatcaaatgattttgtatctcaattataaaaccaaaaaactactattatatttttttttgtaaggactactattataatattatttttgttttctttaagttgtcttagttattaatattatatttgtaagaactatttaattttattatgttattgtgctactatgaaaaaaaaattatatttaatatttgatatttgatattaattattaatttttttcatttgttattataattattttttataaatttaaaattaatattttaaataatataaaaaaaaattattatttttaatttaaaaacctttaaggtcgacaaagtcgcccctaaaacttaaaagtcaaatacaacaattctgacaacaccttttaccgactttataggtatcaggggcgataatgtcgcccctaaaagtaaaaaaacagaacttcatgtattacttttaggggcgatattgtcactccaaatttcaggtgactattttgtcacccttaatagtacttttaggcgcgaattattaaatgtgactttttaggggctttaaaagtcattaggggtgggcgatttttgtcgcccctaataagtgtatctattgtagtggtacctgtggtgaatgacgtcgaggttgggaacttgggatgggtttgagtcgtcgttggtgttgtcgtggctggctggacgtgagtcagagtcccaagggttgggcttgtgtgacatcattgagagcggccatgaattatggcgagagggagagagagaaacagatatgggtggtttgtactttgtaatttggagcagctgagcattagaaagttcatatgcttatatgttaatagagtttgtaaggtttgtatggcttttttttcttttttcttttttgctaacttggcatcagtttgagccaacactaataagttggcattactatcaatttataatagtcgcttaatttaattattgtcggtcctttaaaaaacccaatatttggactgatggaaatgcccattttttagtagcgagcttaaatttttatatgaagagtggttcacaagcaaattttgagagaaaagactctaaagaaaaagagacacaaatatgtattcatttaaaatttgtatcatgcaaaataaaagttttgaatacaaatattatgaccgtaaaataaatatactattcaacaataaaaatatactgcacaataaaatttatatgacaacaacttataataatttataaaaaattaaaaaaattaacataacttttaaatattttttttttaacaaaactaatataaatatactataatttttaagtattttatttctaactttaaaaaaaaatatatattttttttatatagtaaaagataatataaataataaataattttaaaaaagtattcattttattataagttttgaaataaaaatatgtgagaacgtttactgtaatttctcatcttttttttcaaggaagatttacattttttttttaaatggccttaaaaagaaaacaataagaagaaaaaaaaaacattaaaaagataaaataacaatcttatttaaaacgaggagagttgaaataccctaatattaaaaaagaatagttacaagctcagctgagactactcttcccctctctaatggcgtctcttcttcaccctactccttctcctacatctttcttcccaatcaacccctccagctctcgttatcgcttcgcctctccttcccgacatcaaaacgccgtcgtaagcttcactaccgccttcgttacttcatttctcgcgttcttcgatttttatctttcactgtgaattctgcgtttttgttgtctatatgcatgcaatataatcgaatagtgcttccatttgtttaattttcagtttcttttctattccagaggtgtaatgtggtggaaccgttgaaattcgagaacggaaggcctggaatgcctcttctcagcggccccggaatggtgttgccgaatatgttggcacccagaatgaatttggagaatgccatgaacaagaatgatactagacttagaatcttctccggcacggccaatcctgcactttctcaggtttctttttttctttactttgcttttcatttcaagtgaagtttattcaattatcttaagctctatatggattgaggtttttaggatgttagtgttgtggtcagaagagaagagagtggattcctaatactaatagggataggatgatagatagacatgtaaagttttcaactttattgttcttttgagagtcttattttatcactctgcaattgtttgaactgccttcaattgttctatatgttaggaaattgcatgctacatgggtctggaacttggaaagatcaaaataaagcgttttgccgatggagagatttatgttcagctgcaagagagtgttcgagggtgtgatgtattccttgtgcaacccacatgccctccagcaaatgaaaatcttatggagcttctgataatgatcgatgcttgtcgaagggcgtcggctaaaaatatcactgcagtgattccatattttggatatgccagggctgatagaaaggtaacattgtgtaaaaatcatgtaatctagtatcgtgctagtataagtgtcacaatactgaagtattttactgatatcagagttcaattaaacatccaaatctctctgttgctgtacaactaagtagccttgctaaaattttgttttgatgttcattctctctctctctctct

SEQ ID NO: 114939 - DNA, 2180 bp, Cannabis sativa
  modified_base (2107)..(2107): a, c, t, g, unknown or other
ttttttttttttaatttttttaaacaacaatccaatctaaaacgtacttgaaattaattgattatggaaatatacatttttttttaaaggaaataactatgagatgttgttaaattacacgtttgccatgctatgtacaaaaatccttttaacggctatatttttggaatggaaggcatttttgccataagtgagaagtgactaatcaaattaaaaaaaagtagatatgttgttttttggaaaggaaattaaaagtagattgattacattaaattaatgtcaaatggatccaatcaagtaaacattggatcctgacaattatagtgttcttctatacccatttaataggttcacctactgaacaatagatccacaaacagcaaagatttcacatgcaaaaaaataaaaaaaggataagaaaaagggaaaaagaagggaagaattttgtttttgaaaaaataaaataaaaatttaaagcttgattgacagcactgcagtcacatgctttttccgacaatggtgttggtgtgatttgatccaaaatcatcaaacagaaactaagcccaacccagcccagcccatattagagtggctggctgtagagtaaaatcaaaacggcaacgtttcatccaatgcctttatgggttgcgtttgaggtttcttgaaaacgaaagataaacagacgtgcccgaaatgaaggcaaaacgttacgttgtgtgggggcacaccgtcttaacgtgggcacccatgacagcggttagttgcctagttggcgttgatgtccgtactcgcttgctgtcacacccaacccagctcaaaaaatagaaaataaaaaattattaatgaaattaattaaaaatgtgagaaatttatagtatcgtaaagtgttttgatatatgtttatttatttttaaataggtatttatgggagtatttttttcataattacatatgtcttaattttttaacatcacttgtaatttttttatatattaaataatttacaattccaaaataaaaattcaattaatttgagtacggtaaagtatttagaattttctaagaatactcacaataatttttctaaaatggagaatagttaaaatttttaaagaactatactaaaaatatactacaataaatgctctaaattcttttattttaaaacttttttaaacatatttgattaattattttaaattttaataattatttttgtatgatgatatgtgtatgttaatatgttaatattatatatttaaaattaaataaatatattaaaatttaaaaaagtgagattttggtgatatattttaaagaaacttatgtataatgtaagagcactcataagagtctctataatagagattttctaattcttttagctaaatatgattaaaaaaattacttatatcaactcctttaaatcatatatgtataatagagatacactaaagctaatgcaacttacatgtagagaacgaataatgcactctttaaacttattttaataatatctaataatattttatttatgtatatagtatatatgtttaaaatttattattttaatagtgtagaaaataaaaataatattaattcaatgatgtaggaaaaaacataaaaaaaattgatgtatgatataatataaaaatatagtataaaatagaaaaaatagagttttgattatgtattttaaataataaagtagagaggcaataaaattgtgttgtaaaattaaaaaaaaataaataaataacattttactaatgtattttaagtgatagtattgacaagttgttggaagtgctcctaccaaaaactaagatgtagatttgagatagcagtgtattgaaacttccaaatatatatgaaaaattctacaatatagtctcttaaattaggtacatgcacccttatttttttagttgtatatgttgtacttgtagttatttaaaatatttgataaaattttaaaaaatttggaaaaatttaacacgcaaaaaatagagtttagagagtatgttacacacgtgatatttttattttatacgaatgtgaaataaacagtaggtgccgtttggtaatacttttgttttttaatttnttaatcacaaaatgaaagtaaaacttttgtttttaaaaaaattatttttgaaaaacaaaaatgcgttcggtaa

SEQ ID NO: 114940 - DNA, 5915 bp, Cannabis sativa
tgctagttagggtgttacaggcgaaccatcattagaaggggttttctaaagtttcaagtcgagttagatacctctcatcaactaacatctggtttttttctggatattaggagggataggaaagaatggatacaattccagtactttaagttgtcgacgctttgttataactgtggatacctcggacatgacaaaaagtcttgctttcgttcaaccgcttatgcttatcctcctcaaggagctgcagtccctgcctatggaccttggatgaaggcagaatcaactattttatgctgttttaatactcagaatcagctagattttttcagagaagtagcgagccggactataatatcggcaagagcacctccggtggctgactcgagatccaaagctatgggaaaatgacctgtcaatgaaagttgtagagatcaggtcctgcatcagacagctagcaataaaccaacaaggaaaatcatcaaagtgaacaacaatggtccaagtgctattttggggaaaaatttcaaagtggtagataatacaagtgttcactcgacggttaataacaatggacacaaggcctctaattctctaggttctagacaccttggaaagggaaggaaagcaaggtcagtatctcctagtgtgctgcgaagacttaatcaaggtaataatagtactttatcaaataatgatatattaaataatttctcttcaaggtcccctccaaacacagctgataatggtatccttaccactattatggcaaatattgggcccacctatgaccagatggtagacaaggcccatgttgaatttagccagtcaagacaaccacacaagcatcctgaacccacccattttccttggcccatttatggtatagaaattggtttggcttaggaactaatgggccctgcaccagttgacaagtttgagccaatccctagtctcttccatgacccaatagatgtctctaacttagttcaccactgcccacaaccaaaaaagaaaaagaaaagctagcctcaccttgattccttaccttcaacatacggctaaaaacattaaggaagtttcccaagatgttcctgatctcccgaagttctcacctgcccctcatactccctttagatgggcttaggagtttcctcctcatccttgaaaaatgacaaacgtagatggaagggatctcgttctaaagtagcggttacagaggaaagctacagccgtgatatagctcctgttgttgaagatggtacccagaaaaatctcattgattctcttaatttggttgaagttcatgtcgaaagctccaaaaattttctcatgggcgaggaggcagcccttatcaagccccccagccctatgaaatgcctttcttggaattgtcggggcctcgcaagagacccgacaccccaagctatcgtggcttgggttaataagtacaagttggattgtgtttttttgatggaaacaaaagtaagtaagagtaacatggaggaattatctcgaaagttgggtttcacaagagtagagtgtgttggtgctaatggtttggcaggcagctcatgtttgatgtggaataatagtatcaatttggttgttaatttctttgctgaaggatttttcgaagctactgtgtgggatttccaaactcaattatactggaaattatatgcggtttatggaaccccatatttaggtactaaagaggccttttggaagagtatggatgatgaactatctgattgccagcttccttgggtgttgataggagatttgaattgcatttgcagtcaaaaggagaaggtagggggccgtaaagtgtcctctgttgatacaaagtgactaaggaatttttttgatgacactggtagtgttattttacatttcattatcaacaagtttacctggcaaaataatagatttttgggaggtcttattagagaacgactcgatagagctttatgttcgcatgaatggttgctagattatgcctctgcaggggtcatcaatttgcctattgcgatttcggatcatgctcctatcattcttgatactcatttatttgctgctaggggtttcataccttttcgtttctttgaagcttggtcgtgggaggacttgtgtaagaaggaaattgccaatgcttggtcattctcaggcgtcaatgctactgcttcctttatccaaaatattcacaactcgaggaaagctcttcaagcctggaagaagaatctcaaaggggttaacgaaggcgacataaaagatctggagaaaagacttgaatgggtccaaaatcatcctatcacagatgctttcagagaagaagattcgagaattcatgctcaactgtcggtttcttggtcaaaattagagagtatgtgtagacaaaaatccaaagagacttggctctctttggaagatagaaatactagattctttcatgctgcaacagtcataaggaaaagaagaaataatatttgggcaatcaagaataaagatggaagagtttggaagaataagaaacatatagcggaagtcattaactcgcacttcctggagctttccacatccttaaggccgcacattgatcaggagttagaagacttgttcgtcaaaaggattgactccagttcaaatgataactttgctaatattccctcatatgcagaaattaaggaagtagtgttttgcttgcatcttctcaaggccccggggcctgacaggttttcaggttgttttttccgtaaatattgggatgtagtgggttcaaatctttgtgccacagtcaaggaatttttctcaagtggcagtatgcatccgaaactcaataataccttcatttgcttcattcctaaagtggaatttcctatgagtgtggatcaatttcgaccgataagtctttgcaatttctcttacaaagttattgaaaaaatcttatctaatagattgagacccctcatgaatgacttggtctccccgtttcaatccgcctttattcttggaaggtggatagcagaatcatctatacttattcaggaaataatccataagatccggcacaaaaggggtctgggggtcttatggcgttgaagctcgatatgcacaaggccaatgatcaaatggaatggggttatctagatagagtcctctgtgctaatggattggatgaaagatgcaggaagctaatggcgtgtgttacgagtgtatcgtattctgttcttttaaatggatgtccctcaaaaagttgattcctcagagaggtttatgccaaggggatccgatttctccattcttgtttctcctttgccaggaggttctatctaaactcatttgtaaggcggaagaaagaggttttattcatggaattaagattgcccaatcagcccccctagtgtctcacctcatgttcgctgatgatacaatcctttttgcctgtgccaatgaaagcaaagaagctgatagagtgtatctcattttatgagtaatggttgggccaatcttgtagtaagcctaaatctagtgttctcttttcaaagaatctaagttgtagaaggaaagatcatattttgggtactttgaatattgatcaagtgcgtggtgaagagaaacacttgggtaatccatttatcttcaagagaaggaaaaaggaggattatatgaggctcaaggacagtttgatgaagaaactagaagggtggaagatgaagctcctttcgtatgtcgagcgtttaaccttaatgaagactgtgacatcatcgatgccgatctatgctatgtccacttcaaagatctcattgtctacttgtcgtgaactagattcattgatgagaaagtattggtgattatggaaggttgacaaaaatagatacttggccctcaaggcctgggatcaaatttgccagcctaaggcttcaggaggattgggttaagaagatgtgaagatatgaacaaagctctcttctcaaagctggcttggagtcttgccactcaagaagatagacattgggtcacttgtttgctggaaaaatgttgtaaacacgagagtttttggtgtgtaaaatagaagagctgcgattcatatcaatggagatgcatactaaaaagtagagaaacgatcctcaaaggttccatttcagttgttgcatcgggtcaatcaatcaacttttggcactaaccttgggttccatggttagagtatcctgaatttgtggaattgatgaatagtattaggggcagaggttacataatacagtcactgggggatgtctcgctagataatgattggaatgtggatgtaattttacaggtgtttggtgctgagttgggacattgtatcattaacatttggaataataatcaaagaggtaagttttctgttaaaggtgcctataatgtggaaaacgcttggaggtttgcgccagaaaaaaagatttggaagtggattttggatgtgggtatccatcgaagaaattcagttttattttggagaattctcaatgagccaatccctaccaaaaatcgtcaacactttctgcaagataaagtctggagtatatgtggaattgaggaggaaagtgcttctaacttgttttgaaattgtagtttctcaagagccatcttgttttgaggaagactgtctttgaaaattgatgacactccagcagataatttgatcagtatgctggaaactctatttgaacatttcaatggtgttagtaggagtgatttgcttaattacactggctgtattttctctaaatttgccactagagaaatgcatttttgattcagaatacaacagttaatattctctctgctttggtaagaattgaaaagagtgctttggagtaccaagatttgttcacaccaaataggggaggttgtgttgaagtaaagaatacattagacaagttggagacagttgtgaaccctggtgtgcaagacaagcaggttggcaatgtaattttcactgatgcttcgtggattaatggggatgcaggcattgcagcagttagtgtcgatatctccatcggtttctggtttatcaaatcgcaaaagcttcaggcgcagtcggctttggaagctgaatttacaacgattcttcttgctcttaacaggacaattgacttagggtggcgagatgttcctatcctcttagactcgaagatcgtagttcaagccttaacagcagtttgagtccctgactggagggtagctcgtgtgttttacttaataattaacttactaaaaagtttcaggtttgtcgtttttttttatcagccgtagctgtaatgttttggcggatggtgtagctgaacacgctagagtcgctagtgaattattggcagttttgtatcaaggggagggtaatccccctgtgattcccatctacaatttcttaatcaatgaacaagtagttctttcaaaaaaaaaaaaaattagttctcaaaatatgatatttttttataaccttttcttgtggaaagttggagaaccatcacactagtataaattataaatatgttatactcaactactaaaacatgttttttttcaaaaaaaaataaacaaaataaatgaaaataatgtatgttttgaacatttacgtgtcacagttttagactgtatattattaagaatttgattatttccaataaaaaaaagtcattttaataaattaccttatttagagaaattgtcatggattttttattttttaacttttatatctaagtttcttataaattatactttttctttacaaggtgatataaaaatataattttaaaatattaaaaattatttttattaaagacatataaatttatactgtaaaaaaataattaaaaatacattgaaaataaaaaatttatataacatatttaaatatatatttgtgattataa

SEQ ID NO: 114941 - DNA, 830 bp, Cannabis sativa
  modified_base (758)..(784): a, c, t, g, unknown or other
ttccttgccagccaaactgaagccaccactttcacttagccaacattaaaatattaaaaacctaaccaaacatagtaaactttcagatttctattcccacttctctcattaccacataccaaacaaccccaaagtgcctctattttttgttagctttatcgaagtctagcgaagactggtggaagaaattgtctcccgactcaattcgtaaatggaaagatttacaaaccatgtttaaaaaatatttcatagccgctaaggattatgacatggaggttaattcattgaccaatgtaaaacaagaaccaggataaagtctcaaaaagattatccaaaggatgatggatgcaacagccaaaataaggtcaacaatgacatgaagtttgtggccttaacttcagggatatctactagatccctgttgtggggagatttgcaaagaaagaggtctgatacattgtcagattttttatccagagctcaaggcttcataaatttggaagaggcttatgtccatgcttatgaagtgcctcttgcatcgtcaacaattgttagtagttcaactctgacacctcaattttctactttaagcataactcctcccgaaagtgtattcataagtccaacagtgtatggacccaatctctcaagaaaaacttctgcacagactagtttttctagctcaggggtggtataaactagatgtagtgtctgttggaaatatttgacctatcatctagatttactaacaagtatgnnnnnnnnnnnnnnnnnnnnnnnnnnnaaaacaatgaaataaacacataagtgtttaagaaaaccttacattg

SEQ ID NO: 114942 - DNA, 1094 bp, Cannabis sativa
aaatgaaagataacaagcgtaaaaatgctccaaacatgattaaaactcaattaaaaatatactaaacttaatctaaaattactactaaaaataacctaacacactggtgtgtgggtcttggggcagtggtgacatgtgacggggtggttttgtgttctttgggtgccccaacgacgacctcctctaatcctcatgtggcagagacaacaactctcttaaatgggttgttgtgtcgccgtcgtttggggtacaactccattactgttttctcaaattgtctctgccttgtccaaactattaataagattgatatatgtcagattgagtttaatattatagttcatgatattttacaattctggccttccttctcttctatttctcttactcattgtaaaaaaactcaaaacgttatgactcattcttttgcatgtttggttttaccttgtgactcttctcgagtttgttaccgtcttgtctgtaatacttaattattttgtattgagcttatgcatttttggcttagtgccttttaatggatttttcaatcttaaatctcattcaatttaaaagggcgaacaattttatggtaattttattttattttatatttttaagtcttaaaatgagatttttgtaaattttattgtgagaaaaacaaaagaataagaaggtgatgtattgtaagaaaacgctaaaaatttactaagttattggtttgtggtgaagaacgtttgcgcatttaacacgtttagggtacactgtagatgtccaactcatcgccacgtctgaatatatctctttagccaatagtttgggcctcacaacgttggacattgtgagtcacatgtccagtaactgtcaaaatatgggcctgtttgggcccattaatgttctcatttacatttcattcttaccatttagttacagaatataactaaaagctgtagtatggcaaatttttgtacatatggaatttttgaactgtaagaaacttttatggggagaactgaaaagtctgaaatggtgatgagttttcaaatttaaaatagggttaatttcacaaatgcacaaaaaacaacaaaaatacgatt

SEQ ID NO: 114943 - DNA, 3276 bp, Cannabis sativa
  modified_base (3245)..(3250): a, c, t, g, unknown or other
aaaaaaaaaaaaaatcattttaatctcttctttagtttctaatgtgtcttcacctccatcaattatttttcactccttagtgagttgacattacattgttctttcgggttgacaactgtaacactaggaaaattaccgttcttttgactaacactcacagcattggtcaactgtcccacttgcacctccatattcttcatgaaagcagttatattagacaaatgagtctctatgttatccaacctcgtttcattcttattaaatctcttgatggtctctgtcatgaaagtatccaaaatatcttctaatgactttatttattgagcattaaacccaggaggcggttgcaagatatttttagtattaccataagaaaagttctcatggtttctcaaaccttgatggtagtagttagacattggagcttctcagtagttgttatatgtattgtgcttgttttatactcatctcagtcccttgtgatgtagatggcatcaacattcgcaacaattgttagattcttctaagcggctagggcaaccacttaattagataaagtagagatttgagctactatagttgtcattggatccacttcatgcaaaccagccacctttcgtggagtatttctttcattaggccaattatagtgattagtcgccattcctacattaaattaatggcttcagttgtaagcttagccaataatgctcctccagcagcatcaataatagtcctagttggaccattcaacctattgtagaaaattaaaacttgcatccatttctcatagccatgttaaaggcaatgacgtaataagtctttgaattgctcccatgcttcatagagttgcttagaattaaattgtctaaactgccaatctcactttacaactgtgcaaacttcgatggaggaaagaacttcaccatgaactttctagccatatcatcccatgtagtaatagaacctgactagatattgcaaccaatttcttactctatcccttaaagagaatgtaagagatgtagtcttatggtatcgtcagtaacactatatatcttcactatatcgcatacctctagaaatatgactaaatgaatattgagagcttcaatagccaacccaccaaagtgattttgttgcaccatattgatcaaagcaaagtaattcaaaattattagcaaggatcacttaattagctataccagtcaaattttcattcaccataagtaggcaatagtcacggacaacctgtagttgtgcatcagctgcaacaggtgctgattggttgttattaaggccattgttcacattaattatgttatttttattaatggatgccatggtgaaatctatccttttttttttttgctttaaactactttaaagtttttgtaattttaggattcagtggtgcacgaggagtagcatttagatttcttcgcataaactgaatatcaaagcaacaaacaaaattagaaacaaagtaaaatctaatataaagaaaaaaaaaatttattaatattattagcaataatttaaaaactttcaatcccccgcaacgacaccaaaaatttgatacataatttttactgaaagcgtacaatgttgttatagaaaattttaattataataggttgtcaaacccacaatgaatgattattaaatattatcaattactatactttttaggttttatgctttttaattagacacttcaaagtaaacaataattaagaatgaatgaaataataagttaactgaaaagtaaacagacaaacaacgatttcaataagaaaataaaaacatagagcattgatttctctattccaaattatgaatctcagtttattggttgtttcaatttattgtataatttgtattttcaagagccctaatgtaatatattaacctctctcgagtgatgatagaattaacttaattagctaacaagatatctctattcagtattaacaaacaataataaagcaatacgattctctttaaatgaaattcaaacaattagtgaaatctctcaatctcacacatttcctatgtcatacaactctaagtctgattttaaattacctctctcaagcgtaaaatctaaaatctttgtattgtttaatggtgatcaagcattagcaagatgataattaacataaaattgcatacaaaaataacaagaacaaatatgggaataatctaaaaactttaattcaaaatctaaaatagtttcatcaatactctagaaaagagtgtttagttcataatgacatacataataacaacaataatcatgtttataattaaacaactaaatagaataaaatgactctaatgatagttgatgatgattgcttggaaactctttctcttacttcaatgtattttctgatctctaaattgttttttctctttctaattgtccaaagtcaatttacattattttttttatagggcgaaatagatagaaaagattatgcttaaaagtaggatttaaaatttaaaattgggctagacatgtcacttggaccttatttccaggatccctgatcttttttatctgccacgtgcgaaaataaatttgttttgtaagtgaggcgacatatcgcctgaaatttatcttcaggatttcctatctcgcttttgtccgcatgtcaaatttcattcgcttttatgagtttggcagcatgtcactggaataccaatttctgtttttaagttatttcaatcacattttgctttctttttttgacatatatctcgattatcatttttgtataccatattcataatattattatctttaaatctcaaaattgcacaactacaaaaaaaaaaaaacttaaaaaattaataatacttttaaataattagaaatgagtgtacaaatatgtactcataaacattttttagtgagagatataagatattgtatcaaatattgatttacataaaaagggtttcttcttttgatcatcttcaaatgattaaacaaattcataaataatttttcagaaaaaaaaaatgaaaacactttgcaaataatatattcatattttgaccacttaaaaatatttagagtgataagagagtaattatagtgcaatattataggcatcgacaatatcttttataatttagaggtggtgttttacgattgcgattagttatcgatattctataaaaattaatacatcaaattgttagatactaaaactatatatctttatatattaaannnnnntatctaacggcatttcttggtttaac

SEQ ID NO: 114944 - DNA, 2178 bp, Cannabis sativa
  modified_base (2142)..(2146): a, c, t, g, unknown or other
tttttttttttaatttatatatagctttaccaaataggtttgttcttgtgtagctttacctaatgagacttattcgactttctttgtattaaaatataattaatagtatggtcgtaagaatgcttctccaagatgtgccatgaagatcgatctaaacaaagcttacagcactgctgactggtattttttggaggatttattgaaagctctttgttttcctgctagatttgtcaattgaattatgatgtgtcttagaaacacctcttacccctatcattgaatgaaagattacagagttccttcaaagggatgaaagggcttaggcaaggggatcctatcttccctctgttgtttgtgatagtaatggaattctttactagacacctcaagaatgcagccaggaatcctgagttcaaattccaccctcaatgcaaaaatcttcaaattatcaacttgtgctttgctgatgacttgattcttttttgcaaagggacttttgaagctacttcagttctgaaaaaagctttggatgagttcatttctatgtcaggtctttgtgctaatataggaaagactcagatctactttggtggtgttgctaaagatagcaaggcctgttgaagaatattcattttgaggagggttgcttccctttgaaatatcttggagttccaataagacctatcaagtggaggaaaactgattgtgagaccataatttcaaaaattaagctcaaactgcacacttaggctaccagacacttttcttttgcaggaagagtgcagttggtccattcagtgttacttggtctgaattactggatgaatatatttattcttccttaaagcattacaaaggaagttgagcacctttgtcgggattttctttggggttacaaaggaaatagatctaatctccatttcgctagttgggataaggtgtgtctttccaaagcttttggaggtattggttttaggaatggttctgactggaatcaggcaactcttgctagatacttatggactatctctagcaagcaggatgtgttgtgggttaaatgggttaatgtgatctacctaaaacatacaagtttttgggactatcaaattaaacaaaacttaagctggcattggagaaagctttacaacttgagaaaggtcttcaaaaaaagagacattttggctgcaagtgcccatggtaagtttcattccaatagactttataatagccttcttgcctgtgttagagtcttgaactatcgaaatatatggcacaagctcaaccttcctaagcatagatttattctatgacaatcagtgaattttaacttgctaacccgagatcttttagctcggatcaatgtggacatttcttctttattatgccctgtgtgtgagctggtccaagaatcacatgagcacttattttttgattgctctctttctcaaatggttagtgccaaaatttttaaatggtttgggttcacagcttggccaactaagttttcaagctggctgcattgattggatgtgaagaaaacaagttagattgaggccatttcggttgctacggctgcagcaccagtgtacaacatttgggtgaacaagaacacttacgtttttgagagaaaatctctactgttaggatcattgctgaaaaagttaaaaatataatccaacttagattgttgaatgtaatttggaaaaaaagaagtactcaatctgctctttttttttttttttagagcggtttgttactcttgattgtaagttggtgtttattttacttgtgattaatgaagttatttttttcttaataaaaaaaaaattatatttaatagtagtcattaacacaatctagttatactacacacattttgttcacaaagaaaaagtgtgttcgaattcatccttttattgtcaaaaaaatttatcaaataataaatattaagtttaaaatcaaggaattaataatttaattttggtaatcatgtttatcttacctcgattgccaccgaaatgagatatttaacattctattatcctatcattattcatgttaatattataagaatttaaatgtgacttatattatttgaggtgacaaaataagtttcagattatatatatatctattctatannnnntgtgcctatataactgaaattcttggtttatg

SEQ ID NO: 114945 - DNA, 1828 bp, Cannabis sativa
aggtcagatgcaatttttttttttgataaagctaggtcagatgcaattagatttagtaatttatgttttttttttatcatatatgttttaaatgattattgatttgtttaggtgaaaaaaaaagaggaattatcaagacactacacgtgtccttagtagtaagtatgttaagtggtaccaacggcagagtttaagaagtgagattttgagtattaatgccacaatttttaaaaattgggtacttattagcaacaaaatgaacaaaatgagtatttatgccgcaaatttccctatatattaattatatttttagtgactttttttgtgaaatttgtaacacttagttgttctatgtatttattttcatgatattttgttatattttattacttggaaatattattgttttagttatttcaaacgtttagttacattatacttgtaacaatgatatttttatgaagtataaacttaaaaattaatggtgatatttagttttacgtatttatcttcatttttaagttaatattaaaaattaagtatgtaatttgatatctaattaaaaaaccgatccaatttaattagtaattggatcggattggattgaattttgaggtctaactggattggatcggatgatgattttttaaatccaattactaattggattggattggatgaggaaaaaaaaggttggattggatcgaatatcccctaattaacatatcagtttaaggtatgtttggtaacatttttttatcaattttttgtttttttaattaaaaaaatgaaaatatttctcaaaaacatgttctacaaaactgttttcactttttattttttttaattgagtagaaaaatttgaatttctatacatacatgaaggaaaaaaaatatacaaattaagagaatgggtatacattatatttagtacccaaaatgcctttgtatacactcctatccctctcaaactgccactctttttctcttttcactctcttctctcaaaaccttatgttctctcattctccctaactaattcacactaaaattttatttttagtgtacaattaatctctccaagctactacaaagtactagaagttatggagtttagtatgagaatctattcttacagcaccgaataaacttggggaacaatcaatgggtaagtaattttttttttgttattggttcttatatttagtttaaaatattatttttcatgattgatctgtgggttgttgttgtttatttttggttttgtgttgaaatggttgttgtctggttttttctaattttttctggtttttgcattttttttatccagtccgatggggcctgataagggcccaatgctagtctaatggggttctttgatctaatgacagagatgatggcctggtgggcctgattttggctcgatgctagtccgatgattaacttaaagctaaggacagggcccgatgggtccgatatcggcctaatatttgtccaatagagtgcagaagttgtttgggttcgatactatgtccgatatagtccgatttgtggtccaatttttagacgatagtgtttgtccaattggaattcaattttgaattatgtttgcagaacgatatggacgatgttaggaatactgtaaaacttaatttagccctaattaattcatgaaaattaaacaataggattaaggaatagcggaagcgtaccgaagtccattgaatcgcctgaagaagggtatgatcttccaatttgcatcaaaaatctttctctgaaactttttctcctggtgatggggatacaagagtgaaaatatacgatgcaa

SEQ ID NO: 114946 - DNA, 4138 bp, Cannabis sativa
  modified_base (4069)..(4071): a, c, t, g, unknown or other
tacccacacttttagtataattacatattatataataatcagtattttattaaattgcacacacgtggcgtccctgttggacagggcgttacattagttctcctaccaagatatctccaaaagtactaccgacaacccacttgtaaaaaatactactcttcactagtggttcctgcacagctcaccgtataggaattcagattagagctatatgaccatcactcttcagtgatggcccttgcacggtatgtcgcgcaggggtagccaaaacttaggttttaaaatcaaactttagatttgtaagcttttattacacaaaaaatatacatttcacagcaacaacgcatatgcaagaccaattaatgaataaaataatttttcttttcaaattgtgtcaaataacttgctaacaaattagctttttaaagttaatttttctttttagttaaacatgcgtgtaaatcggtcctcccaagaaaaaacacaagcaaacgatctatatactttgttaattgcaagtgactaagagaccataaatatgttcgatcacttgagggcacacacaccctgcatcgaacaaccacaaatatacttaagcaaaaaattgaagctttgaaagaaagaaattaatggctaaaaatttgatgctttgaaagcaagaaattgatagctaagtacttgtgaatggaaagcttcaaggtgaacataaaattctaagtctgggattaaaggctgcccaaccagctacatgttcaaaattacaagaagataaagctaggattaaagattgcatggtcggtcactagttcaaaagtaaaaggccttatggccatacaggaataaagcgaaaaagtgcgaaataatagcatgaaaaaataataaaactaaagcctttaaacatttttaggtgcaggtgagtctaaagtagatgggtggcggccttaacatgaagagtcttgtgagcagaatcaacagcccgggaagcctcatcagtggcttactcgacaaagtcctagctgacatgtacacccacagagacctgaccaatctccccaacctggctagcctgcacctcaaaagaagcatggctaggctgaccgacagatgcttctggagcacttttctttgctactctggctgtatacagctccttgccctaatcaatcatgttctaacgatgaggagactctacataagaaaacttgtccccaagattgtggaggtaacactagtagaatgtctccatagccaagtcacgaatttcggctataaggtcatcttaaccctgtaaggaagcatccaatgtctcctgcttctccttgtaagtaacttctgctgcatcaaactccttcctcagcttggaaacctctacagtcaaataagtcacctcatgattgctaacacaaagcatctgacccacaccatcataatagttttgtagttgcctcactttcttgtccacctcctccaaatgcatgttcacctcgtcaagctctttgtccttcacagcaagctagacatccttatcctcaagtttcttcttaaaggttgcagttgtgcctttgactcgggcatgggcatggccaagttttacaaagctctgaaataaagaaagaaatgaggttagtaaaagctgcacaaagtagctgctcggtacatgggtaataccatgtactgggcaggtctaaaagactttaactaggcaaagtctctcaaaatagaggaggttaggcagtctaaggagtctccttctaatttgaagagctagtcaccggcagcaagattgtacctgtcgatgtagctgtaggcaacttcttttgctttgttcattgtaccagagaaagttgcttgaccttgtctttagtggcctttactaggtgccataggaggggaagttgacctcagggccagatcaacaattactagctgattggccagaggtgggcctgaagaaggtggaggaagagaggtctgagtcgcgtccgaggtagcctttgtccgggcaaccttggtttcagcatgcccaccaaaggggttgctcgttgttcgcttcatcaagtccttgatcctggaagtcatgtctgcaaaaaaaaaaaaacaaataacaaggtcagaatacaagtaataaatacaaaatgctagcaaaggtaaaagaattactaccatcagtatcctcgggataatctacccaaggagtatcacccaaaggtctttcgtcctcagataaagactcactagagttgtccttagtagcaagagcattgcctttctctattggcacaggctgggtaggtctcgtaggctcctgtctctcaagcctcatcaaaaccagggcatcaccaataatgcccccacgggcaagacgctgccaaagggcacaatccctcctactctctattcaagccaccttagccaaagaggcctcttcaacagactttctcttctccttctcagcagcaggcctctttcccttgcccttctccttctcaataggagtattgcttggatccttaggaggattggccagagaagcaacaccctcaccagaagggtacaagccatactttttgaagctctcctcactggccaaattacaaatgatttgtcgagaagttgggagagacaagatatgattggccctatcccttaattttaatgtagggatcaattgactataggttgtgaccagataaaagaattagtggacaccttttatgtcgtacgccataaagtagatattggcgtagcctcgaatctttacatgggtgcgtcattagtgtcgcccagccactgatagcccttctggctaaagcagaagtatccagtcctgttttggcctggactgtattttagctcaaaatagtaattaacctagaaaggcaagggttgcagccaacctagctcaacatattggatgaagagtactgcaaggtactttatccccttcggtgtaatctcagtcggacacaacctaaaaagtttgttatgtccttaaagtatgggtgcaagggaagtattgccccttactctgcatgggggccagaccatgctatccaatttggatggggatggtgagccaagtggtcttgagcaggcctaatgcatcggacctggccaacaagtccactatcaatgatgccctcaagcctggaagtcgatagtgtggagcgaggagatacccatctatctccttcccccatttataaaatccatggcacagaggcctcatcctcaatgtgatcaaccccgaccttaaaaggttgacccatactatttataggctctctagccttgttataagagcccaagagttcccctggaccacactgcactccctaggatgtctctattcgggtaacgctccaacttactacttggcactaccttggttactatatcagaatgattgtctttagttggaacttttgcaatcttcacaacttttttctccacaacctcttgtatgagatgaagcttgatatcaatgtgcttagtacgttcctggtccacacaattcttggttaattgaactgcagtgattatcacaatgaatagaaataaccttttgattgagctttatctcctccattaacccatttaaccacagtgcttccttgatcgctttcgtcaaggccatatatttagcttcagttgtcagtagtgccacaaccttctgaaaatttgctttccaactaataattgttccaaacatagtaaacacatatctagtcaaagacttctggatatcaaatacaccctacataatcagagtacacataaccattgataacatccaagtcttacttctatttattcatgccaaatatcagtcccttctcaatagttccttccaaataacgtagaatccatttcaaggcttcccaatgcttctttttgggatttcccatgaatctacttaccatgctcagtgcatacgctatgtctggtcttgtacataccatgacatacatcaaggagccaaagacactagcatatagaactcttgatgtaacgccctaaataattaggcacgctacccaaaaatcttatgaaaccctaatcccctaannnggattactaattaaaatagcgcagaatttaaacttttatattaatcagaatgaaaataaacttgtaa

SEQ ID NO: 114947 - DNA, 1306 bp, Cannabis sativa
aagtctgatttgttcctctacagccataacactatcttcctcattcttatcttctctaccgttcctctacttctcaccctctccctcgagattctccgatcaccacttggtttagacaagtacaagattcagcccaaagttatgctgtcattttctgagatgttcggttgctacaaggatgttatgacaaccttcctcctcgttgttgctcctctccaactcctctcttacccttctattcaggtcagtggaatgtgatttgtatatatacaaaattctagaatttggttttgttctaattttttcaaagatcatattttttgagatattacaggcttcaagttctaagagttgatttcttgtacaagattatgaatttggctagagtgtgccttggagtaatagaatcctttgatactgtttttaatctagctgtgtttaaggttctgcttcaagattggagggttgcatttaagagttgtttttaatgtatgaacagatgattgggattagaacaaggctgccattgccatctgggtgggaaatttctcttcaattgtttgtttatttcttggtggaggattacacaaactactgggtccatagatttcttcacaccaaatggggttatgagaaaattcacaaagtgcatcatgagttcactgctccaattgtatttgcagctccctatgcccactgggctgagattttgatgttgggtttcccagcttttcttggcccggttattgttccaggacatatgatcacattctggttgtggatggttttaaggcatattgaggccattgaaactcacagcgggtaaacatacaccttcacttttcttttttccttttgcagtataataatgaaagtgaattattttgaagatctcttgttgtttatattcttaattttttcttgtttatttaatagaattttccatgtgaagtatattatttgacatattatttttttggatcccttgtctttggtctgatgtgaagttttggctatactaattgagatagctaaaacttattagcaaagttctaagttaggttatttaatatttatggtatagtttctctaaatgaaatgatctccaaaaattatttttggttatgagaagttaaatgtctttcggaaaggcgtttctggaagtctagttctttcatctggaaaaagtctcgtttcccacgatattattaagctacttaggttcttttactttcagtagagtagtgttaagggtatactgttgtatttctgttagtcacagttattactgttacaaattctgtta

SEQ ID NO: 114948 - DNA, 10294 bp, Cannabis sativa
  modified_base (47)..(53): a, c, t, g, unknown or other
atctcaaaaccaattggcaataggaggagtagcccattcatcttatnnnnnnnaatttatttccacacattaacaatgtgggactaagtctaataaaaaaaaaaattcaataactaatgagaagagcaaaatacgagtcacagtttcaaagttgggtcttggccgtcacaattccgatcgcctatgccgacttccgtccagtagtcgtctgctcaactgtaatgccgaaagggcttttgtgagactttgttatttttaatcagtgcaaaagacaacaaagcaatcacaggaatgagtataaatttagtacccaaaccaccataactaaaattctccaaatttattcagtatccaccactattattcaacaataactcaacaagaaaattgattttttatcatcaaaatgcacatctattcgaagaaaatctccaaagtaactctgccaatgaaatgtcagttcaagaataataattaaatatttatgcatgaaagaaaacctaatctaggaaatatatatgaacgaaagatacttaagaatgtgagtggaactatatctttgtaaacatgtacatgaaaatcgattgctaaattcaaggcaaagctcggttggcatggtctttgacttggagcaatcaacgactaggcgctcgacggactcggagacgaaaaagctactacagtgttgatagaaagtgcacattccgactaagattatcttgacaaataatgggtgctacgacatccaatgaccgcgtctcgataaaagaaataaaatagggcaccagattggaacatcgatggcttgtgatctgtcgttgctcaatagcagattgacgacgcaaaaaaaacgaagcctccatactttctactttgtatatgtgctaaggaacaagtatgaagagaatcctaactgattggtatgtgggttctatttgttgttcttggggaacaattaatggacctacagagggagtgagtgagtgtgatctgacaaggtggagagccagggtttgagagagtgtctgacgggtttgagtgagatcgagagagatggacggagtgagtgagtcgagaggtgcaattaatttttttagctctatacccgacggttttgaaccgtcgggcaaagtatgggtcactgtgtaacgcccgtatttgaaaacttgctaaactgaaaaataattttatttattatatttatatagtcttataggtcgggatcccgaatgtaaaacatagttgaaattacatttactaatataaaaccttataatatttttttatacaaaatacagggcaacgacaaaagataattcaaaatactataagaccgaaaccctccaagttgcactgccgcgctatgtacaatccctgccaagctccaactcactgctcctccagcttagctttcttcttacctacacttacctacacaaggtctacacaaggtagcaaactgatgagtcaatagactcagtaagatatgcataacatatatataacaatgatatatcgactttatgcttaaattgttctgagtccaaccattgagctcaccaaatggttaagaatgttctcaaaagaagtacgactattgtaccatatgcactaaagtatcaactctgtactcatgttggtagggcccttattgtactcccaagagttactaagtgttgtaccacatgcacgtaccccctggtactcatgctggtaacactgtaactaacctaaaaccctacacagtactaacacccttaaaactataaatttagcaatgctagtagtgtaacagataatagcatacattcattcacatatatttactttatgctatcttaactcgttttcgtggtaaggtgtgccgatcagcctaagtggaaatgtagctcgacgtttcatagggccttaaatcacaacatttctaattctggtgagagacacgctaaaacacttttcaggaacttaaaatcaaaactagaaatattcttatcgatgaataacaaggctatatcccaaatagaaaaatctagggttccaaaaattgttccaaccaccagactgcttcccaactgaaattccagttccctggggaccaactggtcgaccggttgctacaggtccccctgaactgaaatttcggttcagtgctgggaacctcacaaatgcccccaaaacctcaaatcacacctaagcttttcaaaactttccaggttacctgcttatgcagcaataaactcaattcaagcaatagaacaccataaatagctcaaaaattgaaaacaccattagagcgcaaagttggagttctcaaactccaatttggctcaaacaaaacaataaccacccaacttagcttaaaacatcatagataatctccatctacaatcagaatacaaatttaaacacttctgaagcaaacagccacataatacctaaattcaacatcaaaacctaacttcaacttcaagaaaaataaagagagaaaagctaagaaataataccgtgaactaacacacccaaatcttgtaatcaccctctgaaataagctgaacaagagtaaagccctatcttgcttcttcacaattcgagagagagaaaaagagaagatcaatatttcttttcttctaccttattctaagtgtttctaagagattcacttccttttctttacattaataaaataaatcatatattcatattatatgctcacaaaagacagagtaatctatcaaatgaccatattgcccttaacctcaattaaatgcctaaaatcaagtaagggtaaattggtcattccaactcccatcaattctcgatatttcgaacaccaaacaatgacgtcccactattaataaaattctataccatacaaaatgtgacgctataatggcccaacgtcgctttccattgctaccaagtaaaatcacagaaaacgagaaattctcatatagcataatcaatacatgttaaaattaaataaatctccacaattaagaaaattataattaataattaaatcacataattaaatcttgattatttaatcatctaatatactaaacttaggcggtctttacacactgtttaaaactgtggctaatactttgcccgatagttcaaagtcgtcaggtatagtgcattattttttaaaagaaaaatttcctgcacttttacactatttgtaatctatatgagtgttaaaaattgtcacctatagtatggtataggcaacatttttcaacactcacttaattttttagcaacggtccacaaaaaaagtgtttttgaaactgtcgcgaatttttcctttcgttgtagtggaatatgcatgttagataagtttgaatatcttaaatattcatccgtagtgttgtaggttctatgaatacatgtactgcggtcggatgcgtggtaaattttgtattgttaatgttattttgttatttttgtattattttatgtgttttttttattatttttttatgtttaaaatttttaggaacatctgattagagctattatgatgtcaaaatttcgttagaaataggataaactttactaaaaattcataaatttcacaataatatatatgtgtggtaattaatttaacacattatttaccatacatattcaaacaaataattgaataaagttttgtttttttagaagttttaaaattgatagaaattgtatgagtgcgaatagattatcagcggagtatagtcaatgtgttgaccatttcttagatttttgtcaaaagtatgtgaaaaatcctaaattggttctttgtccttgtcttaaatgtggtaacatggaacgtacggacattactaagataaatgagtacttgtttagaaatagaatagaaaagagttataaggtttgtattcaccacgggaaaaagaatagagttccgggtgagggaacgtataagtataatgaggttaagagtgttaatttagactatgaggatgatcacattctagaaataatagaagaagaacaatttgaattaaatgtcgatccattaaaattttaaagttttgtagaggatgtcaagaagcctatttactataattgtcataggtttactaaattattgacgcttattagattatacaatataaaagacaagcacgggtggagtgaaaagactttaacagatttactagtttttctagtagagttatttaccaaaaggtaatgtggtaccttcatctttttacaaggcaaaaaagacactttcttccttaggcatgcaatatgaaaaagtacatgcatatcttaacgattgcatcctatatcgtcacatgtttgtggatacaatatcgtctcccacatgtggtgagtctaggtggcaatagaaaaaaaaattgacgaggtaaaggttggtgttcttgcaaaggtattattaatacttactcccaatacctcgtttagtttggttctttcaaaatgtcaatcatgctaaaaatttgatctagcatgctagtgatagaaaattaggtggtaagatgagacatccagctgactaacctgcttagaaatcaattgatgctaggtggcctaaattttgcaatgaatctaggaatatccatcctggtctttttgcagacgaaatcaatccacataccgcccttagtagtaagtatagtttctggctagttttgcttgtgatgtataacttgaagccttgattggtaatgaagagaaagtttactatgcttacactgtaaatatcaggcccttcacagcctggtaatgacattgatgtttgtttagctcctctagttgatgacttgagtcaattgtggaatgatggtgttcctgcatacgatgcctttaggaaaggagaattcaatcttaagtccatattactgtagactattaatgattttctagctttcagaaatcatcagaatatagtgtacaaatcatgtcctatttgtaaggagaaaacttgttctatgtattttgaaaactcaataaaaaaaaatgttaatgggacaacgaaagttttggccaaacgaacatgtgtttcaaatttggaaagaagcatttgacggtaagtaagaatttgaatagccactgtcacgtttgtaaggggaacatgtgttggaaaagttgaataaagttcaatttcaccttggaaaacaaaaactgactccaaagaaaagaaaaggtcatcgtgagaaaagtgacgttgttacaaatgaaccttaagagccatggaagaataagtcaatattttttgagctcgagtattagaagcatttgttgttacgttataatctggatgtgatgcacagtgagaaaaatgtgttagatagccttcttaataccttgttcaatattcttgggcagagcaaagatggcatcaaattcttcataaatttgaaagatttagggatttgggccaatttacatccacaagttcttggtcgatgagcattcttaccactagcttgtcatgctctaactaaagtagagaaaaaatatttctgtggttcgatctcccaggtgaaggtacttgaagggtactcctcaaatatctctaattgggtagatatgaaaaaattaattttgagtggtctgaaatctcacgatcatcatatattgattcaacacattctaccagtgagtatctattttgtgttgcctaagaaagttagatatggaattactaggttatgtttgttcttaaaatctctttgttgtaaagtggttaatgtgactaagttaaagaatctcaggttagaaattatagaagttttgtgttatttggaacaattatttttgccttccttttttaacatactggttcacctaaaagtgcatttggtgagaaaggtgaagttgtagggacctgtgtacttgagatggatgtacccatttaaacgatacataaaatttcttgaagggttatgtcagaaatagaagtaggtcagagggttgtattgttgagtcatacatcgttgaagagacaattgaattctactcagactacttgtcagaggttaccaccgttggctctcaccctacttgggtcgatagtgaaataattagagggagtaagggtattcctctttacagtgtaagtcaggctaatcatgaagaagcgcactaacttgtgttgcaaaatactgacgtggtccaactgtacattgagtaagtttaagttaacttttcaaagttaaaacaatataattatattcaattgaaagaaaaattaatccatcgaatacttgaaaggaccattttaattggatcaagaccactaatccaactaaggcatgaaatcaaaaatgggtacaagctgaatattattaaaatttcagtacatggttaaaaaaggtaatattaacattattgttttgttacacatcatatattggtttacctttgctcattaatcaacttgtatgttgataggtatatttggaaatgtgtgaatctccaagaaatgtatccaacacactactttctatatcacgaggtccttcgtgtgatgtactcaagtaccaatcttactatataaatagtactcaaattttcacccaagcccgtgataaatctagaaaaatacaaaatagtaaagttatgatagttgccaagactttcaaagtatctagatcaaaagaaaaaaatcccattgaatgtgacatgtcttctaacaatgtaattttatgaaatttgattagcttagagtagtttttcggatccctgttttcctttgttattgggttaggagtgataattgggttacaaatgatgaatttggattcaagtttgtggagttgaatcgaattggacacaaatctgatagatttataatggtgtcccaagccagtcaagtattttacatgagcgatccattagatgcatgctggtcagttgtcttaacgatgcaactaaaagattatgataatcaagagtctaatagcgatgatctcatacttaatgactaaattcatcgaatcgccaattgatgtcaccattgggaatgatatcatatcatctcgtgatgatggtgaaagattatgggtgaacgaatctattaatacatgagtcatagaatacgtatttgtatttagtcattttgatatatttacttttagctatcaatttacatatctttgtatattctattgtatgtttctaaatttgtccatcatgaaaccaggcggggacgataagtggaatgcttggtttgattatgatggttatgatggtccatccgtgccaagagaatgtagtgttgatcgtgaacagttatccatggaaccaacaaagaaaaatactcacgggagaaacaaacggagcgatataacaaaagtagttagcaaggggaaaattttagaggttgagtacaacaaccacggacaaaactggggaaagagagtgatggcaaaagttacccgaattggaacatgggtgagaattaatgttccacttcgagacatttcgtggcctaaagtgagtctggacatttaaaactaattctggaatgacataaaggtaaaattaattttattatttgagttatgtactattaatggtaatttttacttataactacgattgtcaattttttaggccacgttcgatacaccgcagataaccaagtaatcagctatttctaaaggtggagagaggtggaaggattggaaaaataccctaacggatggtatttttaaattcaatgatgtggctccccaacttctcgagaagccaccaaaattgtatgaaagcataattaatttgcaacaatagagagagtctgtggctacgagattaagtccagagtttgatgtgaggaggaaaaaggcccaacagagcaggaaaaaaatatttacaattatcgtaccgaatgaggtggtgtaaggatggttcaagaacaaatggagaaagaggcaagttaccaaattatcaaatttaatagctctaaaatatagaaaagactttacatgaacatgaaaggcgaggtagaggacccagctgcaggaatcgttaaacggatggtaagtttaaagtataattttatttatattgttaggttttataatttatttttaactctatttgtaatgtttgtaggacgactttcttaaataagtggaataaggagttgtgcatgtggacgtgttcaccacggcactggggatagatgggcatggtggacgggttcgagccatggatttcggcgttacccagaccaaataattgaacacaacatgaactaaaagaaaaaacatggttgggtcaaactatgcatcatcagatttggagagatgtgtccgtgagacagaagaaatcaacaaaaagccgcaggacaatgtggatgcactcattcgcctagttagttcctaacatagttgcgttgcgggcacatcccatgtgtttgattccagtgttggaggaggatcgaatgaataagctcatcctgaccttgcctttgatccagtagcacaatcatcgagtcctgccgatgtctatactccactagatcccatagcacaaccaatattgggtgctgctaatatctctactccatcaccattgcattttataaaggtttctactccagcagcaccaccgccacctactggtggtagtttagaagaggtaatcttaatgttattttatgaaatgatctaatgcaaaattataaatatggtcaatttacaaaatgaattgttgcttatttgatttaaatttgtagtccttaccatgttggatgcactgtttgttggagccttgtgggatggtactgaaggttgcttcggggcacattatgaagaagaaatatttgaaagatggaaagttcttgattcacaatgatgaatacctatacaaagattatcgtcgggtattcatcgaagaagttaatgtggagaattcactacttccatctcccataacccaagatgtattcacaacagtaggtcaagctataaatcattgtgtagcatggccgaaagactacccttaacatagtgtgtttaattattaatgacattgctaactttattatgttttccatatatagacacagccacccaccaaaaaacttcagaagcaacccgtgagaagcaaacaaacctttgaagatttactcggtccttcaatacatcctccaaaatacccttagaggtcgagtaagccaataaggcatgcttgttatatccaaccacgacaaattagctcaatcataccttctggaactccgtcaaaaggtggccgaagtcgtccataatctaattctaggtttcttatgatctatttggggtcaaggatgactctatttaggttgttaaaaatgacattcatgaattgtgcaccatgcaatacttgggagcccaaccgataggagcttagtgcaagtatgatttccaactcttaataataaacttgataatgttcttttgacaatgacgattattaattatgactttttatgaggcacttgaaagaaagattattagacatcaatgggcttaacaaacttatatgaatttttaaaatccatgtgcaattgccacagaagtaagtaactgttgtcaagcactagtcactcatatgactgggtcggatgacaaatctagataaatgagttattttccactacaacaatcggtatatgtagatttaaaatgaataatttcagtattattatatattaacagttttacatatatttgttcgtgtagaaaaatatttcactggatcatccaaccaagtacgcagacagtggcgtacttggattcagacaatggcgatgtaagatttaaactttactattttcacgcaagttctatatccaacatcccaatatgtaagagtgtttaatatttataaatttatctacgctaactttactttttgtgtagatcattcaccatatacaatcaaatgaaaggacggcctgatagacctagccagtggataatttctatatgtcttgaacaacctgacggtaaataatgtggatactacatcatgaaattcattgaaagtttcatgactgtagaagatcaaatacacgtgttgatacaaccggtaaaataattaataaatattattctttattaaatagcatatgataatagactttactaattaatgtatatagctctgttttacagggtaagttctctacttcgtacacaaatgtcgagataaatgttattcgcgataggtagattttttacgtgaaagcgaaagcggagtgacaacggttgccttgttgattagtgtgtatatatcttggggtgttcgcggtgcgggtggt

SEQ ID NO: 114949 - DNA, 1749 bp, Cannabis sativa
acacatatggggcctcccccgttcccacctagagtccctgctcttatcaacgtttccatcccattgccattgtcattgtcattgcctgctggtgagcatgtattttttgtaacaaattatcagttcgtgttcagtattgtgagtttaaacataacagtagttacggttctaataatactttgcagagtatgctttccacctcagccaccgtcaaatatgtacagtcctattgcagatatgtccaatcaaattatcaaacaagttaattactattttaggtacccttttttgttcacttcttatatagatagtttattaattttctttttcttaccctcaatttgactgctaatttatcaatgttgcagcgatgctaacttagtcaaagaccaatttttaaggtcaaacatggatgatcagagctgggttaaaatctcgatgattgctaactttcctaatgtatactcttttatagtagctagggagtagattaagcatctactttctctaccttaacatggaggaaataaattatcttagatgaattcaatgacttgcttgtttgtgatttttctttttcctacactagactagactaccctccccatcatttatgctagccccataacacatataattatttttgagatatgaatatttattttgtttgattgcgattgagctttttgggatacagttcacaagtattgttgagtatggagtggagaaatggtttctctgaatttctgtaggaagttgtacttctctatttggtttgttgatgccatacttcttttgtgttggcaattttctttggttacaatttttttctttgtcctcttacattaatatattctacgtagctgttttttgtttgtttgtttatttctccaaacagttgatggatttcaattatgcattattttaattattgcctctcttcacataaatactacaaacatatattcattgtttctggttcaagatatgatttgcttaaaatagaacgacccaattgaccacttgagtaagagaaactaaagaactctaatacatctaaacatcgaataataaaataatcacgatgttgaatgtggtatatgtccttattgacaagttagtggtggtgaaaagaaagaatgccagtacttattaatgtgtcagtaattttaaaaatgaaactagagaattttcaatttttaggatggctaatgttgtagtttactttaagtgtttgaagagagccaaatcgatatcttgtctttgtctatgatattgtattggttgtgtatggtgcaaatatctttgtaaaactacttttatttttctccctatcatatcaaatgctcttcggtcttgcagatgaaaaaatttaagaatatgcagttaatactgaactccctaaaagcttcttcagttttggaagtccaagtctattttgttccacctaaactactcagaattgctgatcatttctttctagtcttggcatggtctaacacaacactgttgaaattgttgcagggtgacaaggtgagaaggcataataattggatgaaatggtcaccgttacaggcttcgggtcgagtttccactaagttaggtttactatcccctgctactaattccagttcactgagtgctttcgaatattaaggtagtctttggtaacacttttttaattagttttctgtttttaaaagtagaaaagtaaaaatatttttcaaaaatatgttctttaaaactgtt

SEQ ID NO: 114950 - DNA, 931 bp, Cannabis sativa
  modified_base (77)..(77): a, c, t, g, unknown or other
ctcaattatagtgtggaagatcgtgaagaatccaaattcaacaaagaaggatatttgggctcagatcttgataatantctgcgacagaaaggatacaagcactacaacaaatatgattattcataacattaaaattatgtcattaatgtcttttaacaacatttttcacaatgttgttgaatgggggtgccgtggaaagttaagtacattcagtgacattatttaagtgtcatgcatattgttataatagaacattttgacaacacttataaaatgaaatattttaatatctacattacatcaataaattgtcatataaataagtttttacaacaaatattaagtgcaatatttgataaataatgacactaaaataatgtcatttataaaaattagtcttttaaaaatttcataataaataactaaaatattttatttttcaaaattaactacaatatgtttttggcggttggtacaaatgctatattaattatcaaaataaattaatactccaaagcttaatagattcactaaatatataatactgtataaaaattacaaagtcattatacaagagcgaatacacttggtttcttcaataataataatataaaaactaatacaattggttacaattaatagaatataggaaagtaaacattaatcgtaaaatatatacatgtgaaactattgtatatgtctttcaaaaaaaaaaaaaaaaagaaactattgtatatggttgtgggacagacacgctcacgctcatatgcacttgccattaatggcttgcttgcaacatcatacatatcatttatggatcaacctgcataccatctagtataacatacatagataaataaactttgttaataaaaacacagaaaaaatagaagatattaaacaaaaaaaaaaaaaacaattattaccaact

SEQ ID NO: 114951 - DNA, 1876 bp, Cannabis sativa
atttaaaggattttacctgaggatttgtcaagagtaagagttgctatggaaccattactagtgagctttatatgtgagtctccatagaagttagaatatccatcactaacaggaattttaggaaaaagatctgttaaatgtgtaacaattggaggtgtgtaatgcctaatgcttccagaagaaaccaatgctgtaatgcaaaggaataagagaacagaaaagggtaattgagtttgccaaaatgccatgttttttttttctctattgaactttgacttagagaacttgtggttgatatctctttttattgggaggttttagtgaggttcgtaatcttgattggttgttaattagctggctatatctttgataatatctcttgttattaaaggttttgaagctttaagacaaatatcaaaaagatgatatgggatggatttgagaaagtttggcaggacttgttgtgggggctattcaaaggtctgaaattatctttttcttagcttttgggacccccctagagaataattacacaataaatttcaagtttttagttaagatagtgaccaattgtaacaatcttgaaaaggcaatattttggttcaaagtggttgtttcactattgttcaagctgttaaggtttggtatcatatcattattagtattattaagtattcggtattacatattttagtttaacaattattataaaaaattaccatctattggccaaacgttaagttcttaatagcaatgctcatatacaaatatttggctaactagacttaagtaaacctttattagtatagtgcatataaattacacataaacttgacaaacacttgtattcatttagaatctcacttggacataaaaaacagggggtagtagtgagtagaaaatgtcattgtttcttgacaaaactagattttgccagaagtgtgttggctggctcagatagatattgtttgaattttgatatgacattgacaggagtacatagcacatatgtactaaacaataaaaaggccatgcaagtagccacaaaaagctttgaaacaacataacaacatctaacactaactaactactatcttacacattagtttgtccatactctgcaaattgatgacttttatatatttgtttatattaaaattgagttatgtcatgtctagtaaattggtttattcatattactgcagaaaacagagtatctttttttatacaaatctgatctgagagccagcctgtgtgttgaatgaatgaaagatcaattgagaagaagccaaagggagagagttggagagtgataaacaaagagaagagagtatctgattttgcacatgctgttgattcctaggccaattttgatttgatatacacttgtcaagatggaggccaaaagacaaaaaattatcttattaggggccaaaaatataatttataatagatatgtaataattatatatgttaattatatatttaaatttaattgatttatataaagtttgaaaagtaacaatttttttttatatttggaaagtttttcataaaatgtaagttttatgaataaattaatttctattttttttcagctgtgttaacctgatcttatatgagtttcctaattagtttgatcagatttcttgtgaagaaaaccaaattaagactttccttttctgtaaaagaaaaatcgcacttactgctcaagattttgtaggtacacaagcagaaatttttgggctgattgaagatctttttcagagaagttttttgtaagctatggtcttgtttagactgtgtatgagttgtcaataaggtgtatattgattataaatacaccttatagcagctaggttcagtatctctttca

SEQ ID NO: 114952 - DNA, 2521 bp, Cannabis sativa
gtgacatttttttttttttttttggaaatcaacagtattttccattactccaataaacttttttatattacttcttactattacttcttactatttacaattcactaaaccataatgaatcttctatgatactttgctaggtcatacactttggattctagtcttacatacatttttaactttctgtacaataacattcgaaccctatcatttgtttgctgccaaaattttgcatttcgagctctccatagctggtacactaacattgcacacgccgcagataatatatgccttcgaaacacagttatcttcttcttctctatgatacgaaccaagtcagccaaagatattgctttggtctgccaacccagccagatctttatctgctgtaagcaatcaatggagaaagagcattgaatttttttacatcaacttttattattgtactctaatacataattacaaatcttatatgtcatctaatattcaattaataatttattaaaaaaatataaaataatactaataatacaaagataaatataaatttaattataatacattgtaaaagagtttgttaactaaaattaataataaaatattaaaaataacataatagtaaatataaaaacatatcatttatcgtgatgcaaattttacattatgctatgtactgatttaaatttggattactttttattatgtgatatatttacattataatttaacacaccagtagagtagaattttaactaaatgaaccatattttgtatttgtatcaatcatttgcatctttattggagatgatctaaccaaacagtgcttacacagtttcaatgctttcttttaataaagttacaatgcttttgtattaaataaaaggaaaaattacatatgacgacgtagatttgcattttattacagaaatattgcaggtgatatcattatcacatatagcactccctttaatcataatattgtaacacgcatatataaaataattattttttgttgggaaatttacgacaaaagtctttgaaaagttcatgttgatatagattgtctccaacttccaaaaatagcggcaataatcctcaaggttgactattttgtaagttcattaatcctaaacttaactaatctgttaacatatctataactgccacgtgttgcaacataatttgtccacctaataattttaaattaaaagaattaacaaaatacattttaaaaccaattttttcttttctttttattttttctcctccatcttcttccttcagcacattgacctctcccattactattttatttcttaaatataatcatcccatgattatggaagaagtgtggaaatatattaaatctcagagccctaactctgaacccctaagtcccaaatctctatctcggttgggatgttttcttgacaccaacgaagtctcgccatcaaaaaatggaggacaccatgagactctccatcgttctggagtcaaggctaccgtggccttcatcgagtttcaaaccacgagcttcaagtttcctgaagctccctttatcgttcagttaccattaagagttgtcggcttagaaacttttgggtccaatcaaatcgtgttggagattcattaagtgtaatgacttttaaaaatatgatctacttgcaaagatctttcagatcttgttgatggtttctgcaagcttcatcgttgatgatagatggccaccgtgcgcggtgaaactttggtgatcatggggatgtgggtgtgggtgcgggtcagggtgtggttggaggaagaagatgaagtagggatttgttatggctagaggaagaaaatgaagtgggggtggtgtggctggaggaagaagatgatgtgggggtgggtagcgtagctgaaggtatgaaaaaaaaaaagattttaaaatatatatattttttaatttaaaattatttttaattaaattattatttggaccaataatattttaatacgtggcaattttgaataagttaacagatcagttaagtttaggattaatggacttacacaaaagtcgaccttaaggattattgccgctatttttgaaggttggggactaatatgcatcaacacgaactttttgaggagctttgtcgcaaatttcccttttttgtttaataaacatctgtggctgacccgcgctctctctcattcaggtatttttaaaagtttaaaatattttttggctacactactaattatttggtttaaaaattgtaccattatattctactctttaaggtgatcattttaatatgtgaaaaatataatttttttatctggtgaaaatgattgattgaggctcaaatttatatattttaagcttttaattatgtgtacaaaattaatttaattaaatatttttatggttttaattgtaaaattatttaattaattttaattttgtgttatctatcagattttacttagtggttatcataccaaaattttatctttttctttccttcttctttatttt

SEQ ID NO: 114953 - DNA, 1343 bp, Cannabis sativa
atcactagcttatgctctgacccgagtagcatgggacacgtggaatcccgtgtgaatcagcaaggaccaccttacaaggctaaatactcatgggtgatcgatagtgaagtagtatcgtgagggaatgtgaaagatgatgtaccacgggctcgggggattctgatgagtcactcgtaacctcctactcgtcaaagctcgaagtggatgagttttcactcaatgaagataagtctggacggagcctaggcttggtctcgtaaataaaatgaagaatgtcactatcgatctggtggttacctccccagtattcaccagggttgatctataaaagaaggaagacaaagaggtaagaactggatagaaatacaaattttttgaaagggaaaaacacgtctaatatttcgaccaagccaatttaaaagaaagaaaggaagaaatttcattccaatcatgaaatttccaaatcaagagctttaataagtaacgaagaacctagaaaatcttcataagccctgaatggataatattaaatagttcctagcaaaatagtgaggaaaagctaaaaattcgaaagcctatatgttctcggcgtgtattaaagtcaaaaatcaaaagccctaaaatttctagtctcgaatcatcgaagaacagtttcaagaatttagatttcccagagcagttcaaaataataatgcatgtatttaaagaaaatgcatgaaaagaagaaataggacttactcacaacttagaagtttgtgaatgtgcttgaatagatgctaaagattgagcttcggtcatagagttcttcgaagatgtcagagagaaaataaaggttgcactaatttttttttagaataaaactggctaaaagagtttaaaataatttttgacctattatataggcagttagaagggtaatatggtaatccaaaatttaaattttggaattcctcctaagaaaatataatcatcacgtatgttgggaagtacatacaataacatccatatatagtatcaatcagtactccaatcgaggcatagatcttaaggtaacattaaatgccctcgataccaaagagacaatagaatcttcattcagacgtcacatcggatcaaggacggtacgaagagcaaacacgtgtcatccattcaaccagcttagtggctgaataagtccacgtgtaagcaggaagttcccacgcaaacttgagacaaatgttattccaattttcgcacaaagtgatgcgacatccatttggttgtcacatggagagaattttgtaacctggacgggcagttcgtgttggaaattattttaccaggatcagatcggaagagcgtcg

SEQ ID NO: 114954 - DNA, 4495 bp, Cannabis sativa
  modified_base (103)..(103): a, c, t, g, unknown or other
  modified_base (379)..(383): a, c, t, g, unknown or other
  modified_base (4467)..(4469): a, c, t, g, unknown or other
tatgtcagggtattttaggtacaacgcatataaaaagaggtatgtttcaatcaaatataaaattagaagtaaatttgatcaattgattaataaaagtggtatntttcaacttacccctaaaaaatatgtaataaaaatgggaaatttacatggtatattaacttttgctattttttttataaaaatactatcagacggtatttcttacttttttactgtgttttttttataagtttcatattgcagtgtactgtgttaagttttcattgatgttctattggtattttttaggtgttctactgttgttttaagtgttttactggtgttttatagaaacacagtattttttaaaagatttccgtgtgatagtatttttgtnnnnnttaacccaaattccagtatttttataagtttcccataaaaattgggggttttacaaaaagaatagatttggaggcagttttacctttatactgtcaaaccaaaatttttataaaaatattatgcttactttaattttttttttctcttatactatacacactccaaaacacatatggaacctctatttctaacacctacagtccgaaccactaaagcaataccaaaacagccaaaaaacaactatactctagtcagattgtaagtatttaagattccaatcctgtaacaataatataaaaaatcaactaaaacaactccaaaaacttcaaaacaaaataactaaataaaaacacaaaaaagaaatagtatacctcaataactcttttgtgagtgtggacttccataatatcacgagagggaaccttcaacttggaaaatttccccttacactaaatacattaaaaaacaattcagaacaaccaaaaaatacaatcgttaaaaaatataaaaattaagtatataatactaagtatcgaataatacatatagaacaacaaaatatataatatttaacaaaatcggagagtgatgaacaaaatctcaaattaataactaagacagaacatgtacaaataaaaaaaaaattaaaaaagaagcttaaggtgcttaagaagcggaagaaaattttaaagatgatggagataagaaaagcaaaaagtaatagaaaccacaattgaaaaaacgtacctttcaaacaaatgaagaaaaaaatttgaaaaaaaacttaagaagaagaatttttttttgaagatgatgaagatgaggagatcagtaagtaatgggtttggagtaacgtgtattcagctattttttttttttaaaaaaaaaaatcgactcaaaagaacaagtcagataacaacaaaacaattattaaaaaacactaaaaaatatatgcatacaataagaaacaaaaaatacgaaatacataacaacaacaaataaattaaaatgagctgaagaaatagattagagaaaaaaagctagaatatgtacaacaaaaaaggaaaaaaaatcaattgaaaaataacataaataccttcgacactttgggtatcccaaaatcttcatcatcaacttcgaaatcaaagtctcaatcttctgatcgctttcaaacattttaattttctctttttttacagaatgaacagctgattttcttttaggttcaaagttataaaagatgtaaggctatggggaatcttttttaaaaaaatatttcttacctatttctaatttactaacaaaaacaagaaaaaaaaaaggaagaaaaagaagaaacagctgaaaataaataaagaagaagatgaacaagaaaaagagaatagcaatatgaacgaaaaaataaaaaacctattataactataactacaaatgaaaaaaaaaaacaaaacatgtaaaagatggttttgataagttcttcatcataatttttaataaaaaaattgtcacatcacatcatatactttgatattaatcattacatcacacacttttaaaatatttaatacaataaaaaagataagaatactacccttagtgacacgtataataaaatgccacacaaaaacgataatatacaacctaaattctcttaaaaaaataatactacaaaatatgacatattttttcaaataaaaaaattaaaatataatataatcaaaaattcgtttttactctcattatttactttatatcatttgaattttttcttaaggatatatatttatttatgtttgtattttatttatatttcatatatatatataaatatttatatactcaatattaacttttagttctcaaacacaaagagaaaaaaaatattgctagtataataaataaaaaataagagataaattaattaacattaatcactacatttaatttttgtcaaatagatgctatacaaacataaaatgtttagcataattcgtttgaatatattttttgttatcctatattttctctatcacttaatgtaaaaaaaaatatttgacaacacaaatttatatatataataataaacaacccgtatttcgcagcagatgtttaaaaaaatatgaattatttacatgaaataaattatgtcttttatttaatgataactaagtctttaaagtgtataaaattttagcattactaattttctatagaactcatagaaggcgtcacatcattccctatgtttcatcttttatattaatatatagatataaattactaaaattaacaccatttgatattgatagtaattttctttattaattatatgttttgtaattttttaattctatataaactgtaaagttttagcataaaaatctagttaaatgataaaaactgaacaaataattatgacaaaagtacacataaattataatttcctttataaatatatagatagatatttataaattattgtgcatattaatatttttaattattttaaacattgttcaaaattttagatatttattaaataaaaagacataatttaaaaaataaaaataactaaaatttcataaaatatatatttttaaaaaataattaaagaaattttaaagtataaacaaaatttaaaaaaaaatcaagaatatatgttgcatttatcttaaaaaaaattataactaattaaacaattatcattaattacacaaaaaaaattatgtaatattaattttgcacaaactaaagtaaaagaaataataatcagtaaatagtctctaagtgctatcatcctcctatatttcatcctttatataggtatataaatatagattattaaaattaataccatttgattttgttaataatttttttattagttatatattttgtaattttttaattttatataaactgttaagttttagcataaaaatttaattaaataataaaaattgagcaaaatgattatgataaaagtgtacacatgtattgacctcgcttttagccaacgacaatgagtcaaataataagcgataagaaatataatcaaagtgaagtatgaatgaataaataataaagaacacaaagttttaaagaggttcggtcccgttcagttcggtaatagcctactctccttgatttgtattaactcaagaacaaagaatacagtttctcctctcttgaagctctcacaatgaaatttctgagtatgctctcttagatttctctcaagtaattctttcgacccccataccagagagaattgatcactatttatagggctaaatgtttgagggtaagtttctcttttgcttacaatgtttataattggtaagaatatatattacatatttagaatacacagattgtggaatttggacagcttgccatatctctgtgatacgatcccagacttatagggattgcttttgtgcttcacgatgcaagttctggaattgctaagtgttaatgcgctgctcggattgtccactgctcggctgggtagacattatccgtgcaggtgtatgttgtgctctgttcggaatatctcttaagccaaatgtagggaattaggtccacatgtatccagcatgtgctgccacgtcatagtacaaaaaatgggataacatttgccccccaagtctgcacggggcttctgaagtcacgcgtagacttcactcgagccgaccttgcatctggatgggtgacatgtgttggatgcgtctgttcgtgatccgatgtgactctgaccaggagtcccttcagttttcagcataatgctctgattaaattgtacctcgagatgcgcctttcactcacatgcttttgacggttactcttctccaggtacttgattgcttttaatttcccaatatttactttgaggggaaaccaaggcgtttgagattttacaccctttcactgatttgcttataaatagggcaaaaaatcctcataaaccacttttactatttttcttgctaagtaatttcagagcaaaagtagtttttttctcttgaatctgtcgtgaagttgtagcagaaagaaccgatcagctgttgggttttatgcccnnnataaaactctttacaatctgattagt

SEQ ID NO: 114955 - DNA, 4452 bp, Cannabis sativa
aataatctggattacattgaaatagaattttatttagggcataaaaacccaacaggcctataacttgatttgaaaactaattccatatttcaatcaagaaatgccattttccatgaaacaatctttccttttcctaaatataagtcaagaaaatcacttggaccaattgtttcatgttattgtacttccatcacaccaaccttccacctctgttcccgccaacatcagcagcacaccaaaaaccactaaaatttccacaaacaaaacctctaaaattggcagatccattaaacaacccaggcatttgcaagattacatctactttgtgaacaccactgcagattccacctcccaccccattcaaaaaaatacatatcttaccataaactctctccccactttcttaataccatattatctacctacaccattactgaaccaaaacactactctgctgctgcaaaagatccaagatggaacaaagccatgaatattgaaaccaaagccttggaagatagccaaacatggattgtggtttccttatcccctggttatacacccattggatgttaatgggtatacaaaatcaagtaccttcccaatggggcaatagaatgacctaaagcaagattagtagccaaaggctacacacaaaagtatagtattgattacctagacacttatgcaccagttgctaagttcaatactcttaaaattctccttgctccaacaacaataaaaaattgggaattacatcaaatggacataaacattgctttccttcatggggatttacatgaagatatctatatgaaacttcccccaggatataaacttgccactaagcttcccccaatgttgtttgcaagcttcgaaaaagcatatatggccttaaacaagcttcaaggcagtggtatgcaaaactaagtgcaactctcacctttaatggttttgctcaatcccaatctgaccattcattgttcatcaaatcccacaacaacctattcatggttgttcttatctatgttgatgatattgtaattgctagcaacaatgctacaacaaccctcgattttaaaaatatttttgaacaacaaattcaagttaaaaggccttggccctctcggatttttcttggaattgaagtaagtagatctcctcaaggcatatatatttcccaaaggccattcactctccaattactaaacgaaattggttaccttggtgcaaaaccagattcaacaccaatggagcctaacctcaaattaagctccacagatggacatctattatccaatccaactacatatcgtagcatcattgggaaactcctatatctaactataacaaggcatgatctctcctatgcagtcaacaggctaagctaatatttagcctctcatagaaaacttcacttacttgctgctcaaaggatacttcaatatctaaaaaccactcctggtcaaggcttattttttttcaaggaaatcagattctcaagtttctgcttatgcagaaacaagtctcaacatttaagttttctctaatgcagattggggtagctacatcgacactaggcaatcaatttcaggctattgtgtgttcattagcaactcacttgtctcttggaaatccaagaaataggccactatctctcattcatcagcataagctaaatatcgagtaatggcacatgctacttgcgaaataacatggatcttaacaatcctaaaagattttcacattgctcacaccacaccagcaactctctactatgataatgatgctgcaatacacatttttgaaaatccaattttgtatgagcagactaaacatgtagatattgattgccacattgtaagggaaaaagttcaataagggatactcaaaatgttgcatgtttcatccaacaacaacctagctgatatcatcaccaaggctttattctcagctcctttcaaagacattatcatcaagatgagtgttaaagacctctacactccaccttgaggggagctattagactataagcatgttagttatgttagttaggaagttagaattagttggacacgtgcccttgtgttagttatgttaaattagatctcccctggaccgcttgttttacagttttccaagaagaagaaaaagacaagtaaaaatgctcgtggctttacccactcaccagacacaacaccaacaacaacttggtgtaactgaatttctgttttgcaacagaaattctgctacaccctttacaactaaatcagaagctataaaaagaaaaaaagagacttaccaatctcatgttgagagataccagaaagctgaagacccaggtttgagagaggagctctcagttgttgtgtccaggtgtacatgcaaagaaaagaaaacgagagttagtgagaatcaaaagaaaacatagaaaaagaaaaatcgagagaaaatcataaataccagttaagtttgtgacttggatttctcacctgatgtaatattcttcttcaatagtgcagatttgagatcgttcttcaaggcgagctcgaaagaggacgtacccctgatttagggcgaacctctataatctctgtgtttggtttctctatttcttttcactacttatgtttgatcatgtatgtttgttgtgtttgtggtaattttctggggaaaatttctgggaaatcgatctggtttgatcgagaaggatatctgattctagggtttgagaatcaaagaaggagagaaggaaagagagagaggtctgtcgaactctcgaaggttcttagggattctgggctagggttagctcatttgtgcttggttttgttcaaggaagaacgacaaatcgttttggctaaacgatttgtcgtgcagggataaacgaccttggttcttggtcgttttgttaaatttgtgtattaacttttttgggacaattttgtccctgtcgtttttttatcagttcttgagttgatgtaggggcattcttggaaagtcaagatattcctacaagttatattctatttttctgatataacataaatatggcccctcctcattccttgtatcaagagctttgctctataaatatgtattatacgaccaaagagttatagtgaatatgtgaccttgacaaagagtctaaaagtgaaaatgttctatacttaaattgtaccatccaatataacataatataacatgtaatgatttttttccccttttattacagcaaattaaataagtttcatagttggttggaattgcctaaattacaacatttgacgcactctatcaccatgtctcaaatacagctttggcaattcgtctctatccttttttgttttttttggagaacagtctctatatctctcttgctcaaaatttgagtataatttatgttgagttgtttaataatagagatgtaaaaattataagtaatgtctaacaccatttaaaaatggcctatcgtaatattaatttaataattattataaaatattattaactaataaaatgatactattattattgtcttataataataataataataataataatactatattaataaatttctttttgaaatgataatatattaataatttaagtatgattaatggatagagaaaataagagagataataaataagaacaaaatatgtgcattaaaatgttttggtaccggtcatgtttggatttgtacaaacccattatgtagcactaaatactatcttgtcattaaaaacaaaaataatacaaagattcaaaatttgtaattttaaataaataaaattgaatatagagacccccactcttactcctgctgcaggcttattattattattattcacattcatttcatatttattagtgggagaggaaaagaaaaagttaatagaatattaatggtatcttttttggaagtatttgggttggagatgatggagttgttcattgtatgagcaacacccaccaaatcaaaatagcatagacatgaattgaattgaagcaccttttggggaaagcaatagctttcatttacatgtattacaaataaatgaaatgaagaaaacaatctcaaatacataggccactcaaattaaaatagaaacaatttcaaaaaaaaaatattaaaaaaaaattacaagtgatgaatttagcaaattggaatctttcttctgaagcaaatgaataaaatattaatacttttttcttaaaaaatataaaaatcatacaatctcacagactcttcttggtaatattttattatttgtttttgtggttataggataaggatgttagatatatatatttttaattgaattttacttttataataatataataaaattagataaatattatttttgattttgtattttgtaaaaataattgattggattatgtattttgttaaatgacaaaatacaccttgtattttttaaa

SEQ ID NO: 114956 - DNA, 1802 bp, Cannabis sativa
aaccgtaaaaatataaaaaatatttttaaacgtaaaaatataaatattttacaaaaagtgatgtcttatgttcctttaaaaaaattactacgtgccctatgttattatagttttctttttcttaaggggatatgctattctacttgaattgaaatagtactaattaataatattgtaaatttattacatgtgtataagtaaatgtatgtgtgatttttccttcataaaaaggccaattaattttaacatgtcattggcaaattaaaatattagcattaatacataggatacttaattttgtgaaaaattatcgttttttttttctttttttgacaagtgaatataaatacagtatttatataagttttgatagtgagatggaatttgtttaaattagttagtgtggttaggtaaagtattaggtcatcgttttccttttaacctacaccaataatcttacaattatacataatatctttattacatgaaaagctgaccacgtcgtaggctgatgatctcaaactgtacttaatttcaacctcactataacggagttatttggaatgaaatcaatgagaatttattagatttgtcttgttatgaaaaaaatggcattaaatatctttccagtcttgattttataatccaaactggtggtgtacactgcacataacactactggtctataattggattctaaaataaacatattttatattacaatcccaagccaaaatgagccaccagaaccagatggtggaaattaagtcaatattttgagaatggcttttttggtgctatgctatctatttagtatttaccaattcataaatgaatatgaatttgaacttaaccatgataattatttatgaaagagaaaaaataaaaagaaatgctgagaaataaaggtttgatttaattataaagttaaaaaaaaaaaaaaaaaatcttaggcaactaacctaaaaaattaaaataaaataaaagactaaaataatcttaaataactatttaacaccctccctcaaaattattaaagaaaaaatataatttactattatactcccttttaatcatgctaataggttggaaattccattaaaataataagaggaggaaactactgagatttttttgtttttcattttatgtagtattattatttaatttcattgtgaagtttgaaacattgatttggtggcattcaaaattggtattggtaggggtggtacgtaggtgaataaaagcattgaagattcctggctcaatgtatagctccatttaatattgaaaggtggttcaatctaactcgtaaatgactaatcatcaatcaagcacagccaaaaatatggcattttcaggtccacacactcttacaaattacaatgatgggacaatacccatctcactctgtttactccatgcaattatcaatcacttcttgaggctttacccaattttagccaactctctttactaccaaaaagctgaagatatgcatatatagatatatgtccataactcaacagcttaaacattattcatttcattcagtaaaatatattatatatcattgaaaatagaggatacaacaaactttaccaaacaggacaccggccttgtcacggcatcttttcaaaaaataaaaatatatatatgtatattgtaacagtgcaagttgggaatgggttgcccagaatttaatattttaatttaatgcagttgatatctataaatagtggtagataatgttactaatactcaacaataaaacaaatatatcaaaattacttatttgccat

SEQ ID NO: 114957 - DNA, 2465 bp, Cannabis sativa
agtatatatacttatataagtaaaattgtgtttttttattattttttatttaatataataataagtaaattatttccattaattgaaataatttttaaaatttttttataaaataatatactcttaagttattttgtagaaagataaattattattcattaattaaaagtgagatataaaaagatttcaaaaatatttttttttatttgtaaaaagattacaatatgcatggtttttgagttataaaagaacaagttatttatttttttgtagtttaatattttgtaaaggttaattaagtaatttacttagtggaagcctaaaacattcttttttttataaaagttatagatattgttcacaattggcttaaatggtcaaattttaacctttttacaaaacacaactttataataattctttaattaattaataattattggatagtttgtatatttcaatcactatttataagtacttttagtattttcaatgcttagataaattacaacttcttccatcaaaaaagaaaaagttacaacatcgatgtataatgtagataaaattcaaatatggcatatagtttaaaagttacaaatttaacatagtattgaatttgagacaatttttgttgacatacccttattagagcaatttatttaataaaaaaaaaaatgtgttattttttagcactacataccaatttagcatttcactaattagaatctaaatttgagattttttttgaccaattggataggaagaaaaggtaccgatcaaatctttaatcaattttaaatatgctctaacaatcattatacaaaatgaatatatgaacctttttagaccgccccactaaattattccaataaatgcttattaattaaaaaaaattatatattgcttagaggcaaatcaatttattactcttcataaacattgcatataatattacactaaaacacgtgaataattttttcatgttcaaataatttcattattaattttcttgaattatgatcactacaaaatagtaactgtactataacacgtggaaaatataagaatgaataaattaaagagaaaatagtaattaaaatcaaatcaaagtgagaatcaaattgcggcacatgagccatgtgaggttaattattattaattaaaggctccacacattgtgatgagtatgatgttagtgtcacaatctttaattaatttaatgatgtttttttgaacaaattatttatgtgattctttttttatatatactttaaaaataatttttttaatttatacaaaaatttacatagaaagatataaattgcaactaaaatttatattacatctcatataaaaattacgggagcaactaccaaaataagtcaaattataaatttaaaaaaaaaataaaagaataatatatttgaattatttgttgtattttgtcatcatttaaaacgtgacaacaagtatagaacaaaatctttttcggctaatgaattaaagatccttagatttttccaaaaataaaaaattaaaggtgcttaattattagaatctcactttacgtcatcaaacattatatggaaaatctatttattgggtttaaataatagtttcctagaactctgttttgtcggcctatttctttttcaaatttatttttatttttaatttgttttggggatacaatttaattttgaatttattaaatgaacctaataataaaagatgattacaaaagggctcatgctatgtgggtcctagcacacgtggaggtgatttggaatatttggatgcacatgtttcaaaactaatctctcctaattaaaaaaaaaaaaagaaaagaattaactaattaattaatttattaagttgattgatataaaaactctttatgaaattattatgattttggataagtaccctaaagcttttaggaaaaatcattaattatatatattttatgattttggataattttgataaaaatattattttaagcactataaattatatagtatttttcctaaaaatttacaagtaaaattatatattttatgaatttttaataatttatgtaaaaatctaaatatacataagaaaaataataaaaataaatggttcacttaaggagaaatcatatttttataaactttgtaaaaaaaatataaaaataaaaattctccaatttataaataatcttaaataattacatacacaatgaaaaaaaatactaaataactttcctatatgttaaaattgatagaatattcaggaaaattctttgctctcaccactaaaagtattttttgtgacatttcattgattatagagtgaggtacatttaatttattatatgtaataaataaaataataattttttggagaattatctcatatactgttttttaactttttttttaaaatttacggtttgtgtttctaaagtagttgcagcgcta

SEQ ID NO: 114958 - DNA, 3478 bp, Cannabis sativa
  modified_base (3432)..(3453): a, c, t, g, unknown or other
tttaatgcgaatggtccatcaagtatttacatatatacataatcaaatagaagtttactttaatgcgaatggtccatcaagttgatatttgaatgagtcaaattttatttattgttgactgaaaaagaaaaggaagaagtttatttctatataactaaatgtagttactttttcgcagttgtaagatgttgagctatatacatattactgattgtgcttaaaaactaagataagagaataatccaaaagaaaagatggcccacaaaaattggtgattcagagtaatagagtgctagaatccattcgagatttatttcgataaattaatatgtttggatttattcttgttttatattttaatatctggaactttggagggttgtgtaataggagaattcagaggatacttgccaaatttgtcgtggtgtttgttcttaaatgcaacaacattcttctgatgatattataaacattaaaaaagataaaggaaaatgtaagggtctcagggtctctgcagctcgtccttactatatttttcttattattacctcatcacacacgtaccattttcatcgttttctaacaaattaattgtttgtcacattaaaattattataatacatatatagtttaaaatatagatcaatatcgaacattaatgctttctattatgtcaatcttaccaaattactgttcattctttaattatcttgatcttgtgacactaataagtcaataatatgtacatatactattgatgtatttgaaaaaatgctgtagttacctagtacaaatttgttatgaaaagaagcatgagtttggctcgaaattatttggttatatatgtggagcactagacaataattgtacgttatttattatgtagagaagggaagagacatgcattactacatatataattgggttgacctaagcatatctagcgctctggagctaacaaacgatcattgtaaacaatgtctttgaatatcataaaagtacttagtttgaatgatttttaattttttcttattttgttattatgtatatatatatacatttatatatatatatgaaactctcgaatcgaagagacagactatgatgacgtatatatgagtaataagatgtgaagttttgaaatcgtggcatcccattccaacctcaccactaattttatttcatcctaggaaaaatatctctaacaagtcttgtaaaatgtactgtcaacatcatcatgtagatatacgttcaaataatttagtattatacagaacatgggaattcataatatataaatattattttgcttttgttggcgattcttgtcatgcatgctatgctataaataggcattacagcaggaaccgattccgaccatgtttgtttagttcaagtttatttctttggccatgtccactcttttatagccgttatttatttcttttgaaataataaactcattaattcgtctttattacttgtacttatcttttcaagaatataactagtttatttcggcaaggtagatcatgagattatgcttgcacacgtacattatatatttatttgtattgaaaataaacactttgtatacaagtgcgcagaatctgtggcttcatgattttagtttgaataaaagtttagatttaccccggaaaatctacattttttggtaaatatagccaactgtccagcttctttctctctatgttttgtttataattaaaaccaaaaatatatctcattattttaatcttctttgagcggtctaaattaagatactcatcgcctcccactcatattgacatttaatgtatattgtagttttaataagaatttagtctatatggagaaattttaaataatttatggtgtcaaaaatgatattaaagtaaaacaagttcgagtataactttatattttaaaatggttacacttaaaaaatgtttttctaggttctttgggtttcttttctttccctccctcttttacatttaatgcccttaactgccattttaattcctctgtcatgatgattacgctcctaatatttaaaattcaaatcctcctttcattaattgttctcctaaccattacttttgacagcacatgttttatcacatttaatatttatggctccaaccccttctactctctctactcggatcatccaactgtaaattttagctcttggaggccacagagagtaatcattactactcaaatgatagctactctagttcagggagaatctgagcaaacatgcactggttttttccactctgcagaaaatctcttcatctccaggtattatctcctcactctacgtttttacaatttaataaagatctgggttaatgattctgcatgcacacgttctctagctttcacctacctaagttctcaaccttctcctatggcgtcttccttgtcccaaaacccacctaccaccttctcactcactaaagaagaaaaccgcatccatgtcttcgatcatgtttcccttaactttggaacatcctctgattcccattgtcttgttatcaaaattcacacttctaaatctcctaaaccctactgaatcgagaaaaccatgactaaggcatgggctctccgtttcccaaccactatctccaagtatcactcaagattgttcctagccactttccagggtaaaggagaagtgttctggaagaccaaccttggcacttcgacaaaagcctcatgatcttcgccaacgcataagaccttgacaccctcacaccagaccaattccatttcgtccctttctggatccaagctcactacattccttttggccgaaaatcttcccaacttgcccagttaattgctgatgagcttggggaccttataaaaattcacccccttttaagtttcgttccttaggatcagaatcctccttgatatcaccaagcctctcaggcgtggtatgaacatccgcttttgtatgatcgccaagactaaatggctaagttttaaatatgagtgactacaaaacttctattatttcggcagcatgctcgaccacacttataacaaatgttgaagatacctcatgagttgtgataactttgtagtcccccctaaacttggttataaggaaaccctccgtgttcctgccaaatgcaagtttaaaaagaacccctttgatctctctgattgatccaccccaattgatgaatatctatcccatggtaatgactctgacaaaggcctttaacaagtaatggattaatttttgaaccttgcttctgacttcactgctccaaccctcaatcgggacataaccgatgctcctaatgaagtgcatacccccaactagattgaatatggctttttccactctttcaccctcccttgttatggtcacttctgtgatcactcacactgttgggttttgtgccctannnnnnnnnnnnnnnnnnnnnntcagatttacttattaataaaaatc

SEQ ID NO: 114959 - DNA, 1503 bp, Cannabis sativa
  modified_base (26)..(33): a, c, t, g, unknown or other
aagactaaaaaaaaaaaaaaaaaaannnnnnnnaaaaaaaaaaaaaaaaaaaagcggaatgaatttggaggtacatttcctaggaattaggaaacatctcttgtagttgtatatattaacttttctcttttctctttttaagacttaacaatcaaaataaaacaaaaaaaaaccaaaaaaataagcaatcaacgtggaacaagaaaatagctaaaatctaaatattacttaaacagtgttccctgttccgcatccatgtttagagtgtccaatccaattaattgaacacgtgttttatttttgaacagaagtgtaattaactttttcaaaatatgttttcaacaccataaattgaggatgcaaaaaacaaatgtgtccacctgagaactgtccaccaattatgaacaccaataatccaactatatctatacctagtatcaactaagcaactaatatagttgacaaaatatatatagttgtcaagacaagaatgttatcttccttaaaattatctaaataaagccaaaatcattttgtaaaataacattaaaaacagaaaacatttatttgaatctgaaggccctaaagtagtaccaacattgcaacaaatgaagaaagatgggaataggaaagacttgcgtggttgattgattgataatccaatggaaatttatcaaagccataacttaattgaaatacacagaatatgggtctgtagcaaactaaattacaaatcaagcatacattaaaaacactattatactctatttgtacataaatcatacccaactcagaagcaatatatcttcattacatttctccattcctacacaaaaaattgcattgatgatgctaattgctactaagccatctttggctgaggctgaaactgagactgagctcaagaatcccatttcatgcgcttccaggagcatcacttccggtaattggcttgcgattcaagtaacggataacagcatcttcaaccctggtattagaaccaaaaaaaaaaaagactcgttatacatatcatgatttcttttctacactgaaatatgcacattcagatgttatagtacagcagctcagatatttgactctttaatagattcagatcaaattgtcaaaactaagattcagttggcaatctcaatgaatgctgatggaataaggttaaaaataaataactacgataataaaattatggcagatgaatggcatttaataggggtgagcaagcattgtcaccacaaacaagaagtgctaatatttcagttttacaatgcgtgacagagtatacataaggaaaataaagggttttgatatgcaatgatagacaataaataggcttaccatggctggttgaagaaatctgaccgacgctccttttcagcacttcgacttccttctccagctacaagcttcagatccttgctttgggattctattaaagcgttgataaattctaccggtgactgactaaacccaaggaaaaaagcccgc

SEQ ID NO: 114960 - DNA, 4345 bp, Cannabis sativa
  modified_base (2041)..(2041): a, c, t, g, unknown or other
tttatgctagttaagatatcttattctattttatgatattttttttttaaaaaaaaaaaaaaatcatgcattattacttatttagacaaattattattcaccatataaaagctttaatattattacttttatttttaactatattaaaattttattattaaaaagatttacattattattttaatataacttacacaattattcataaattattataatattaacattcattattaaatatatttttaatttttaaagaaatattatttaaaaatattttcctatattaaatctttattttttaaaaaattataattaaaatcttaaaaattatgtaactctttacatttaaatactttttttgcttttatatttatttttaaggtaaatattacaataaatttttcatttattaaattttttatttaaaataaataaattattattataaatattcatttttcaattatttaaatgttaaaattttattatttaattaatttttttatatttaattattaagtatttattttataaaaaaatttcgtaccttaaatttttattattaaaaaaattataatttagattctaaaatcttatttaatcatttacataaaaaaaaattatttttatttttatatacataaaaattatttatatatatttacatttatataattataagtattttttcaataatatagatttattctaatttttttactacattttttttaaaataatcaaataatcaattatataacaattttataatcttgtacctatttacaagttgtaaatttttttaaaaaattaatgacataacattttttaacaaaattaaattataaactctataaattacatttattattacataatatatataataatatactgtatatattgtatatatagtatatactgtctatacaatatattgtatatactgtataaaaatttaaaatcaaaacttacacatatttctaaatataatatacttattgtatacattatatataaacatacaacacatatatatacatattatatatataaacaaacttatacactcataatttacactatcaaccatatacacatatatataaatttatataccaattacaaaattttttaaaacacaaaaaccaaaataccaacagaaaactaaaaacaccaacctcttaatttttggtagaagttttgattcctcctccgacgttccaaatctccgttagtatcgcagccggtcgtacttaaaacaaagacaataaaaaaataattacaaaacaaatttaaaacagagataaataataacaaaaaaatgatattataaaagaaacattacctatgtaatggtggttcacggcgatgcaatcccggcaaaaaatagagaaatggccacagatagaggaggagaagagaaaggggcagtggaaatgagactaatcgggtggggaaaattttgggggagaaatgaaaaatgtttttcagagtgaagggggtcttttataaagttttattactgacgggacctgctggtattaataggggtttcgttggtaatgaaaaaacggtcagattgccctactaataccggcgaaacccgcctctaataatccactgataatagtccttttaaattttggggggtcaaattcccgcccaaggaattagaggcggattttccgccgataatactcctattccgctgatattaatattttttattaaatattaatttttttatttttaaaaagtaatatcggcagattaccttttccgccggtaataacctaattaatactggcagtttggctccacccgtattgctatataaaaatatttaagtgaagctcaacttttgcttatttatttatttattttttttttttgctaaaaactttttttttcaactgatggagtaatctcagcccatatgatgtaaaagtgagagatttttctaatttgatagaaaaattaagcataaaaactcaatttttttctaatttgactcattcatgggtaatacccattnagagtgcacccatatatatatgatataaatgagttatatctctagatggaagagttatatgctggactaagagcggcaaaactggtttcgacacagcacacaaacacgaatacgacatgaattttatgagttagggtcaagataattagacgtggatcgaaaacaggccgacacgacttgacacgaaataaaaacgggtcaaacactatacgatccacttaatacaaatttaacatgtttgatacgatttttttaacgattttttttaaatataatagaataaaaaaatatattaataataatataattatataaaaatatatatttagtgattcaatattaaattaaaaaattttaaatttaattttaatatgaaataaaattgaaaatattttaaaatttttaattttcattatatatataatagactatatatacataaatatatataagttttctaatggaacctaatctatcaattttctctacaagcttcaataatagaaaaatgggacatagtgggtggacacgaacatgacacgattttttacaatttaggttagggttgagaaaatcagacactgagtcaaaaaataagtcgacatgcctgacacgaaatatagaagtgagtcacataagatatgacacaaatatgatacgatgacacgttttgccactctattttggatgacttaaatctgcacatctcgaatgagaagacttaatctcagatatggatcttacatatattagataggatgacttacacatccaagacataagatgttataccaaaaactaaaataggaataaatttaccgattgataattttggctgagtcgcagataatgtccctttctttaagaggtttcacagctatgcctaaagattgcacgatagtctatcgaccacaacatctcaaggataaaataacttctgtatacaattttgttatcgctcaattttgttaaagagatgtcttctcctattgttcagatgcgacttatatagagaagtcaatcaaaatataaaaattgttaaatgtaatggatcgtgggaggaacattggtttatagaagaaaaaggtggatcattgactaatcacatttactgcttcaattaattaaatattataaaataattaataaataaataaataaaactatttatttattaaaaataatctgtaaaaaaattaaagtgataccacactaatctgcccaccaactcggcactacatgacacgatcggtcgacgacgaaggtggcacatgagtgtgtggtggtccagtgtgtgagtcctcacctattcgcacaaaactagatgagatatgcatatgatatacatgaattatacatctagatggaagagttatattatggatgacttgaacgactcgaatagagatgatctacacatctcggatgagaatacttacacatctccaatagggatcttatatatcttagataagatgacttacacatctctgataaggatgacttacacattataccgaaaaataaaataggaacgaatttaccaattgataatcttgctgagtcgtagattatgtcactttctttaagatattttgaggctctacccaaagagtgcacaaaaatctatcaaccacagcatccctaagataaaatagtttttgtatatgatttcattatgtactgaacgtaatcactctattatagtccaaaaatatttgctttgagaaaaatcgtaattttttagaagataagttttttttgtgttaaagagatgtcttctcttgttgttaagatgtgaattatatgagaagtcgatcaaaatgaaaaatggtaagaaacctaatggatcatcgaatgaaagatggttaatggcagagaaaagtagatcattgattgatcgtatttactgcttcaattaattaaacataaataaataaaaatatttattttattaaataagttttctgtaataaattaaagtgagaccacaccaacctgctagctataagttgttttaaaataacaaaaattttaacttaaattatttttcaaaatttaattaaataacaaattaagttactaaccacttaatttgaaaaaatattccattttaagttgatccaaaattaacaaactttcaacttaaaacaatattcaaagaatctctcaataactaattcctagaatttctgaacttaattctgaatttcaaaaaaaaaatattcaaattcaagttgatctaaaattagttatttataactaattttcaacttaaatatattttaatgaaatattaaataa

SEQ ID NO: 114961 - DNA, 1670 bp, Cannabis sativa
tctctcatctgacggctgccgtacatcacggaatgcattccgtgaaagtacaatcacgggacaaaatcatatccctatattaatatatataaaatataattgtatatatactattacatggacttattttctcatatcattgtcataaatggctagagttttcttcttttcaaacctaaaagcaaagagttacccagtagttgaagtgtatatgatcttgtttggttgagtttctcgaaaagaaattcttgaaaaaatactaaaattataaaaataattttaaaattagaagtttaaattaaactcattaattactcaaccaacaacagaaatacttttgaagcttaaaaaatccaaaaacaatttaaaagtttagaaattcaaaagccaaaaaataattttgaaagcccaacaccaacaataacatgtatataaccatatttgagaaatgttcaagagcactggtgctactagctacaattctatcccacacagcaaaaacccaattcaccctttctgcttgttgaaataacaggccatgtcctgttttaatactgtaatttagctctttgaacttctgcagatcgacttcaactttaaatgattgtttgatagaaattaaggtgatgtttgctttggtgtaatagaaatgtaacggtaatagtaatagtaatgtaatggtaattaataataattagtttgttattggaataagtattgtaattaaaattattgtgtttggtttactacgagaatgtatattgaccaaaatatccttattacttttattttttataattataaaatatttaaataaaaggtaaaatagacttttaaatttctttattatatttttattataatattatattaatttctttatgattcaactttaaagtaatacatctatcatggtatttaaatccttgcctagaacctatctctctcattattctagataaatattctattcctagaacaaataagagagtagatatatgatctccttgcctcaaattcctcgttgactcaaagagtccatgaatttctccattaagtaataaagaaattttttgggtagtaatacataccataataagtttaataaattatggtgggaactgaaatgcattgagcatctcttcaataaatccccattctatagtgtcatacgctttttccaaatcgattttgatcatttaagtcggcttacaactcttcttttcatataatctcacaatatcttgacagactatgatattatgagctatgtaacgtccatgtacaaatccaatttgattttcagctatcaaatctagaaagaacctgcctaagtctcgaacaaataattttggtagcttccttatatatcacattacaacaagattttggtctaaagtttttcatactaaatatccaatcatttgactttagggatgagtgtaatagttgtagcattgatttcttttagaattctccttgtattaaaaaaattttagcactactgctgtcacaatttcatctccaactaactcccaattgtcttgataaaaagatctctcaaattcatccattacaaaaaatcttacttttagtcagaacaaatttgtgactaaagataaaaaatagttgtgtctaattataaattattattattgtgttgtgactaa

SEQ ID NO: 114962 - DNA, 1068 bp, Cannabis sativa
  modified_base (56)..(68): a, c, t, g, unknown or other
  modified_base (1040)..(1042): a, c, t, g, unknown or other
acaatcactgaaatagtaaaattaaatgaaactagacaaaagtccttaaatccaannnnnnnnnnnnntcagggggcatttttaacgaccttaaaagttcagggagaaaaatttggtgtatgtcaaagttcaaagggcaaaaatcttaattagccttttttttatgttaatccttctccaatcccactcaacctgaaccaacacatataagtacatattttaacaaaagagtgtcgaacgttatcacaattgataagggaaaacgtcaacaacaaccacttacaacacggggcactaaggcaggtttaccaccggcagatgcagattgtaataatttagggtaattttttttagatagtttttttttgataacttttttttttttttgacaaataagataaagcttcattaaatcaccaaatcgttcattattatagacatgaactctgagggggcgtcactcacctgataaacacgatcagagataacactagtagatctctttgagaattgagctactttgtttgtagatcgtttgataaatttttttaaaaaaccacatttatggttaaaactatatgatagactcttacaatcattaataattctgccaaaataagacaatatagcatatgaacttcttatagcttggccaactacaagacagtctgtattcgatgtcgactttgttccactgctgatctttataatccaactgagggcttcgggaatctgaattgcttcaacaatttctggttgaacttttcctctagtgcaaattaatctagcctctacaatggttttgggccacaaaggaatagctaaaacaattggagtgataaaaaaattacagcgtcaatattcaccttaaacattttttctattagagttcgccaatactcaactccatcttcagaattcaccaatcctagagatgtatcttgtgttttgtcttgagctctttgctattgattaaggacagtctttgctaacaccacaacctcgcccacaaccttattttttgttgggttttatgcccnnnataaaactctttacaatctgattagt

SEQ ID NO: 114963 - DNA, 2287 bp, Cannabis sativa
tcatattaacctttagtccagatattgcgcaaaatgcttctactaacctcatcaacttgtataaagaagtagtggatgtctgtaatctttttggtttctacctcataaatgatggctcagcttgtttttcagtatgtaaagttatatcgacttgtattatattgtattgtagggagagaaatcttgttgaacaagtaaataacatttctccaaggtttcaagatggtttgaaggctttctccaacagcccaattattggagaggtatgcatttttttttactgaaatttctattgttttctgttcaataagtgtatccacaaagatgaaaaatgctaatagtatatacatatgtttcacatgagattttgtagataaggggaactggcttggttcttggtacagagtttacagataacaaatcaccaaataatccattccctcctgaatggggcaagttccttcttcctttttacctcgaacagtttgcatctaaagttgtcctaacaaattttcaaaaatttccaggaataggctcttattttggagctgaatgtgtgaagaatgggatgtttgtacgcgtatcgggggacaatgttgcaatggctccaccttttatcatctcacctgaagaggttgatgaggtagtaaataagaaccattcctcaatccacttccacatatcaattgaatatgtcttttttctttccttttcaattatacacttgagtgacttaatatttgtgtagttactgattcaagacaagctttactcacaacaacattattttatcagataatacgaatatatggaaaagcgctgaagagcaccgaagagagggttaaagagctcaagtctaagcaaacttagaaaatatttatagccttgttcatgttaaccataccttatcagtgaaggattcataaaacaaaaatggttctataaatatataatctttgattgcttaatttctatgttagatcgatacataattatattcaatttgtgagacaagactgaactgtaaaaacatagtaaaagctggagagaaacaaagagaataataatgattaaactaaactgatcacaatgaaagctccaccaaatttaaaatatgcaaaatggactagtttaaagggttatcttaaaattatagagatcatcattgaatgccaagacatagtcaacaattttcacttttttctttttccctttaagaaatgaaataaacattctacaagcaattcatatatatgtatatataaaaagcagaagtgatatgcttaggcagataagatagtgagagaaaagagtactggtgaggagaaatatatatagtcagaatttggattctttctgggcttttcttctggcacgtttttctcttgaggttggtgatggcttgaatcttccattatcagcttgtgaatcttccaagtcttggaaagatttctgtaaagatacccaaatgagatgaagtggtataatagagaagaggatagaagagaaaggaaagatggaaaagaagagcagttacctctctgagttcagaaaagcttacgacatagaatgtaacagcagcagctgccactattcctagaataggaaggcctaaaccctgtaacccatccatcctatgctacttcctctctctctctctctctctctctctcttaaaaaccaagattgtattttatattatggttgttgttgattcttgggcaaaaaagggataaggttgtaataaggggtagttttggcagccaaagatgttctgaggggtatatccgccactggcggtttatataccattatgttagagaatttttagggtaaatatattttggactgtttgagtagttatatttacacctaaccaaataattataatttcagatgcttctgcttagatacgtctcaagtgttttttacggtcgacggtgaaagcaaagtcaaagtattgattgtgtgtggcttagtattctttgtcggccgagaagaattatatcgccataaatcaaagagtatttacgatcgtgttcgaggctatttcataaattctaataaattctttaattattgtaattctttggtttttttttccttttccttttgtcattattcacacattatacatgaaaatttagtaattatatgtagggttatttgcggcaaaaccccttaaattaggcaggtttttgcaactaactcccaattctaaaattttggtggtaaaacctcctaaatccagcttctttagcagttagccatttccgtctatttttgg

SEQ ID NO: 114964 - DNA, 2324 bp, Cannabis sativa
gccgagctccgagtgacggaatcgggttcgggttctacaatcgcgtgcaaaagcgcgtgcgcggctttcaacgcgccggagttttgctgcactggggatcacgcgacgccgcaaacatgctcgccgactcagtactcggccatgttcaagagcgcgtgtccaaccgcgtacagttacgcttacgacgatgcctccagtacctgtacctgttccgggtcgaattacttgatcaccttttgcccaaccgggtcatccctttgattaattaattaattattaatatatatattctattgtaggaagctttcttaaattaaattatgtgttagtacgagtttttttcttttttttttttaggaaagtgttagtacgaattttaattagcattcctatgtgatcggataaaactaaatattttatttttttatgtattggattggatctgataattaaatactaagatctaccgtatcattgacattaatttattatttacgatattttatcttcacatttgttttcattattggcattatatttacatataaaaaaatatgagtgtacttttaatttattatcaataaatggatattattaaaaaaaattaagagtttttatgtttaatttttttttatttaattaaaaaaaattgctcatttttattgtttcattgattgaaaaacaattgaatttgatttaaatatttttattcaaacatatttttttatatagtgtaaaaaaaattgatatatttttaaatttagtaactaaattaaaaactttattattcgctatttaatcaaaatttaataatttaatattttttaaaaaattattatttataattaaatttatttaataaaataataacatgtttcatatgttttctttcttcttgggccaaaaggcaacaatcccgtacaaaataaataggtcatatggttttggattttgaaataaaataaaataaaataaacaaaattgttaaacatggtaatctgtttataaatttcgaattttattttaacataattattaaatgtatggttaattaatattttatgcaaatatttacttgaaataaataattctttgacaatgcaaatacaaattgcacctccaacttgagtaaaagtatgatattttttaaagcaataaataaatttattgaaaatacaataacattatacaaactaaatatatttgccaattgcacaaggaaaactagaagcttgtcacgaggcaaaagtcggatgaacataatgatagatatacttttctgacacaagatcaaatcttatcctatgtgtcagaccatagtagtgtgtgtaccacctctgaatatgcctttttgtctgacggctcctctgagcgtattgtctactaggtgcaacctcttcccgacacgtgccctacaccaacagtggtgccatttttacagaccctttgccccacgagaaaaaacctttttaagggcccaacagtctgtattcttatgtattttacctcaatagtgggtggggtttttacagaaaatcatagacgggtcatgggtatacttgtacccaaacttcagcctatataaacccctttatttcttcacaaaggggggatcaaaaaattacatagctgaagctctgctaaaatactctctaagctttcatcttcttcaagagaaacatagagaaccagagttagggtttttagtatacacaccacttctaatacattcaaatgcctataaggctaatatactaactcatggactagggataattaactttcgaactaagtaaaatcctttgtctcatttatttaatagttatttaattcctaaagctttcacttaattagttttccaaaatctcggtaaatattttagtgccttcattgagaggtgagaaaagatttgagccattacatttcttcaaccatggtggctgcacaaaaaaaatggtgatagaaaaaattcctcaggcagaccacaatgttgtcatggatgatgtaaaatctcaccctctgggcactcccaaccgagccatgtgaggagaggatacatctgaagttggcaacataagggatgaccctgatcgtcatcacaagcaagttgaagatgaagaccctaaagtcgagggtgacgtggaagaagatgatgggtacgtcaaagatagctactataaagatgattatcattatgaccaagaccgagatctggtccaagtgtccaacaaactacttgtgtaatgaccgcttaattttagtatgagaattagcagataattagagtttaatttagaattagacttttaattattatttacata

SEQ ID NO: 114965 - DNA, 1867 bp, Cannabis sativa
  modified_base (45)..(55): a, c, t, g, unknown or other
atttctgatctttattaataaggaaatctgattatattgaaatgnnnnnnnnnnngggcataaaacccaacaacatgatgtgtggcaccagtatctatgatccaactagaattgggaatagatgtggtcttaccagaaatatttgacacagcaggctgatcagtttgtggatctggtggaattgtctcttgcattctctaagctagcatattcatcaatctttgacattgagtagcaagatccagctctccattggggttttcattgttgtcatttcctactgtgaaattggaagtggaatttccttgctggttagcagattagttaggtatttctctaggaaatctaccatataagtgatgaccaggtggataaccattgatttcatagcatttagctatagtgtgtccagatcaattgttaccacaattcccttgagtatttccagcaaattgattagaatgctcattggtagattgattattttcaacttgatggataatgattcctctctgtttctcttcttgaattttgcaaggaaaggcctcatttacatttggaagaggatcttgaagcagaatttgagatattcaaatacaactcattgagtccaatcaagaactcgagtaccttgtcttcgtcctgatactcctgaattattttcattgctccacaggtacaaaccggttgtggcttgtattcttaaagcaaatcccaaagtcccttaagtcgagtgtaataagctgtaacatcactagatccttgagttaaagtctgcatagttctcttcacttagaaaattctgggagcattcttttgatgaaacattttctgcaactcgggccaaatctgtgatgcatcttccatgtacatgatactatcagcaatggtgggagatatatagttgaggatccatgacatagcaagactgttgcatctgatccacgattcgtaatcctcattgtcttcatcaggttcaatcaactttccattaatgaactttatcttgtttctcgccattaaagtaaccataatcgatttgcgccaggaggtataattctcaacaccagtgagaattttaagaactaatgaagcagatgcattatctccattcaatagaaagtaaggacttcgtggatcggtagtaggaagctggttgttttcatccaaagtagaaaaatgatttgaacctctagcaactccgttgttgctattacttcgagtctaagttcctcctcctcgagccatggagaagtagaggaatcaaagaagaagaagaagaagataagcggaaggaagagctcaataatcggttggctcatataccattttagtttcagaaagagaaagagagaaagatgagcatgaatcaaaactaatttcatttatatagaaacaaagcaatacaacaagcttttatacactgatttcagtgagagataacactctaattacctaaccaaccactctaactactaatcgaatttgtaactaactcaatacaacacttaataataactaatcataatttaaagatgatttttattctaaataatttaaattttgttataataaattataattttattcttaaatagtgtatatttatatattagaaaaattcccaaataaatggaagagaatcgaagtgaagtcaatataattcgtaacagatgcatatgttgtagtgatattctttttgcattcaaaaaagaattaagtatggaagtaggtctagtaattgagaaacaaaaggtatattagaggtgggccaaagcattattgccacaaagaagagaagtatatatttatatatatatatatatatatatactagtaaaatgctacatgcgaggcacgtatacta

SEQ ID NO: 114966 - DNA, 4003 bp, Cannabis sativa
aaaaaaaaaaaaaagcaaccttttcactaatgtcactctttttgttataaatttatgaaaattagcatgtggcattcatatacactttttaataatagtattttagaaaattttcaattggaaaaagtgtcactattttagaaataaattatagtacatttttccaaaagattatttcagtacacctttttcattttggcattcagaaaaaaattccagttccaacattatattttttacgggccatttgtaaaatttttcaaaattttttaaataatttacaatgttaaaaacaaagttcaaacaattgattactacataaaaaaaaaataaaaaaataatcacgtacatgtaacaaaatatttaaaccttattttcggcactataaactattataaattttctaaaaatttataagtaattctaaataattacaacgaacacgatcaagaaaaaaaaaactaaaaaatttcatgaatggtgaaacaaataaaaatgtatcgaaactacccaataaatgggagtactatagaattacctaatattctattttcatttaaaatataaactaagtgttgtttgtgtttccgtttgggggacatgtgacatttttaataaaaataatggattcaatcctcatcaaatatctacatccgaggggtagaatatctacattcggagttggatgtcaggaaatctagaagggccccttgcaaaaataaaaagaggcaaccaaggcctttcggatgagtatttgggatagatctagaagagctctaagagacgctgacgttgcaatcctttggcattgaatcccaccgaatgaagggattgtccctcatgtcagaccctgacaatgtgtgtaccaccaaaaggagcatcccttttatccaacgactattattctaacactacaatatggaaaatgtggcgcatgcacgacactttttgaccttaagtagtcccctatcgtacagagcataaaggccccatgggctaggccttagtccgcggactcaaagtcaatgtatttttgtatttaccccattagtgagccatattacacgcaaactctagcggttcatgggtgtatccatacccagatcctagcctataaactacttgataccttcatgcaaagggtcgaaaaattcatagctcaatcactatagcaaaaagctagggttcttaagcttgtaagaacaacattatgatatttcaaggctttttagcccaatacaactaactagtggactaggattcattagtacctgaactatataaaaatctacatctcctttttcaactatttgattcattttcctagttcttattttaatatattgagtttccgaaaatctcaataaatattttggtgctttcattgagagctgagaaaagactttaagctaaattgtatctgtaacaatggtgactactagaaaggctgtcactaagcttgttgcccctggttaggatgtcaccatggacgatgttaacctgcccctacagtgcacgcccagccgggcactgcgagagactaggaaacgttcgaatctagtggtcatccagtcgagaaagctcaacattaggagaaatttatcgatgaaaaccccattgatgaagacgagatggatgaccgagaataagaccctgatgaaggcaaaagtgagattaaagatgattattacaaagacatattattatgagcaagatctcgaggtatatcggatggttgaagaacttgcaataactcagcagaagttagtagcacgagatgacgtctcttgttagatgaagaaaatgctagcgcggataaattaaaatcttgaaggataacgctccagaagagcttgtctacaaggaaaataatgtcacaaaaagtgcaaaccccgtcaacgcttgaccttctgctgtgacgaacgacaaatggaaagggaaagtggatgaacttcataaaaagacttttcctgctgtacctagggctaaccagaatgaagtcaaccagcctttgtggaaaaataaggccacccatactccagggctgggatgcccttccgatctgcgagccaaggttgaccgaaatggtagacctagtgctctagtgctgaggtcaggcaaaaattgccctagaaattctataaaccaagttagggaggtcgagattatttctcctaaaaatagttggtccactatagacctttgtaggcacctaaacgtaaaacgggaaaaagccaaaggtgaaaggacaaggcctcgcagagactgtctttgaaaccatatcaatgataggatccccaaaaatcatggcatgttcacctaaaacatactaccttagaatctatttatgcaaaaagcaacatcaaagttacaaaatcaggtgcttacttgtgatacttgacaacgggggtgtcagattctaggttggtgcaaaatttcttggctagaaattgctcaaccatcttataagctcgttggaggctttttgaaagtccacgaacgacgattctgaagtggcagcggtcggagcagcatttgggaacaaccgtttttgaaggtttaacaagcggtcgacaagtttggcaccaatatcggacattcaccatgggaagaactttggggttgcaaaggattttctctctataaaagttcaaaaaatttaaagaaatggctaaaatgccaaaccatcgggtcacaagctttttaaataggccctggaaatcttcctacctcagatccaagggctcagattgaatttgagaaagtacaaatatcctcaatccaacagtctgggaatgccaaatgtttcatttaatacaattcacataatcaaggacacgtgcaataatgatgatttcgcctcgagtaactcgctgacatgattagttgtcagttcgcaacctgagacaacacacgcccccgcaagctgtgtgacacacaaaccaaagatcacttgacatgtgtattccactaatgggatatgaaaggttcaggagttttcacaaccttacaccaaagaatattaaaagactcaggtcgttcatggcctcggatataatgataaatccatatggtggctacaagcctctgtggctctcgagctgcgaagacttagggataaatttcatctacatttttggatagatgacatgtaggcctttctgtaagcccattaactaggtccagaaagatagattagtcaatccatacgcaaagtcgggaaaaacgttcaaatctcataaactgttccccaaggactaagctggaggcatggtcccgaaggataatcacacattcacacaacaggtattctaagaggcatagacggatgtcctcaggggtcattcgggaatagaagtcaaagagatgtccaggggatacaagtgcccaagatatcatcttgcgtggcatacctctgacaagaatcctgagaaatctggccgcttctaccctatagcaggcctcagaaaggtgcacagcaaaagaaaatcacattgttgggccaatgcccactaatctgacattctctttcaacaaacgacggctcacgcctacacgtgcctgtcaatagtatatccacatacagacaacgatacctacataatgggcctcacataaccggcccaatagtcaatatttaatagtattttaccttatcagtgagctttttccacctagtagaccctaatggattcgatcaactcgatccattagccaaaatgcctataaataaagtcacaacccttcatttgaagggttacaagttttggctaggaaatcttgtatgagaaaaaatgataaaatactctataaccatggagcttaataatattgtctcatgaactaaaattttttaacgcccaatcacgtaaaaaatctcatcttatttatttcttattcttattttctttaacttaatcttcttttaattcgattttcaaaagtgtcagtaaacataaataattttaaaatacaatatatgtagatttttgaataatggctt

SEQ ID NO: 114967 - DNA, 1466 bp, Cannabis sativa
atgtaattagattggatggctttctgcagattaaaagtatgtaattgtttataaaaattttaaattatatacataaatattaattaattgacaataaaattatatcaaataattttaaatgtatagtttaaaatatatatgaaaaatataataaattcatatagaactctaatgaattctcaagaaaatatgtcatacggtttcttatataaaagagaaaccacacaatatatcaaaaaaaaacaaagaaatatcttcaaatgtcactataagaaaatcaatttttaccaccgaaactactaaattgcacccacaaaagttaacatttaccggagcatctactagtttcgccgacaataaagagggttttatttggcattatgaaataggctctgataatcacgagagtagggaaaaattacttttttaatcgttaatcaaaataactccctaatcattattcaaaatataaagttacactttaattcattgaaaacctacatctaaattatatgtggaaaaatctagaataagactacaatattaccaagaaaagaaaaaagaaataatagagagagactagtagtgtttttcatttatttatttttctaaagaaatatatgacgtgatatgtgaaatgatctaccacgttcatagtactagccatagccatgtgaatacaacattttttttcttctaaaaatctatctactttactccaatagaaattgtaccattttgtctattcttcaacggtaagaagaatgtaaaaaaccacggccaaccaactctcaaccacatcataaaaatcacaaatagtaccatgtaaccacttgactactcacatatgatgcatgtaaatcaactttctaacgtatgaaatcctaccccaacctaagtacattttctctttcccataacacctcaaaacatacacacacactcacaaacacaacctttatgattagtcttacccataatatcatcatatatttctcaaaccccacattatctccttctttctctccaactattctcccatggagaaaaaaaaccacctcaaagatgatacttttttgcagcacccaattctcattctcttagttcttgtattgggtttggttatcatggacccttttcaaatgggccctgtcggagggcttgagttcaggcctgtcaagcacaacattgctccttacaagcaagtcatgaagaattggcccagagacaaccagagccggcttgggcttgggaaattggagtttgagggtgaagtttttgggcctgaatctttggaatttgatcatttgggccgtggcccatatactgggttggccgatggacgcattgttaggtggatgggtaaggatgttggatgggagacatttgctcttgtaacttcaaattggtgagtggttttggaaattatattcactttttatttttatatattttttttagatttt

SEQ ID NO: 114968 - DNA, 3463 bp, Cannabis sativa
  modified_base (55)..(59): a, c, t, g, unknown or other
tatgtgtttagttcatcgttttagaagttcaattttaggttgttaaatcaacatnnnnntgagtagatctaagttcctggtaagatatgattccaacacatatatcacatcacctaattaggtgagctcgtaaatcacattgcctaatcaggaaagcctgtgctataacttggcacccatatatcacatcacctaatcaagtgagcttgtatatcatattcacattgtcattgcctaattagacaatcgacaattatgaaacctgtcatgccatgtggtacattatgcttttcttacctcatgtttaggttccggtatgttggctgacctacttggagaacgatcgacgatctcagaccctatgtcataacaacgataaaccaataagtgtctatcccaaaacactgcttgatattcgcataagacaatctagggttttttttatcaaatctcacggtataaatatactaaaataaaacttatattttggctctaaaatatacactatattgtagagcttgtcataagctttgaaacagtaatagaacgtccaaaacagacacctgagtgaaaagtaatgacaaaaatacaatttataatcttcctccgttttggtaaaaacgaccgaccattttcttgcacaaaaatactgaatttctcactcttcaaaacactaccgaaatctatccaaatcatttcaaacttcataggacatatatataccatatatacaacaatccttacgtaacagaaattaaaatcaagcccttaaacagaaaacgccattaaagctcgaacttaaacttttcccatagctaccgaagaacaattttacaaagtcagaatctccataactactctaaatcacacagtcactatataaaacaaactgtttccaacttaaaatgaaactaatccttttcttaagctttctctcttcaatgatttattatcctgctactactggagcttgaatcgctaggttttgggttgaaaattgaagaaaataaatagaaaatgatgagggttttttcgaacagagaacagaggagagtttcattattcgtaccgtttcttctaaacataatatatatatttgtatattaataaattgataaattaaatttatgagaatattaataataatattactatattattaatacaaactttattattaatagttatcttattattttttagccactaataaatctctacttctagggtattaggtcaaatcacaaatacttctagtgatcctaatacttacattgtcaacttattataatattctcatcaaatcactaattaaacttgttataaaatttttggcccccgatcgagccaccaaggtcgccaaactttaaaatatttttattctacaaatagttcatcttatattcacccatgctatataaatcataattaataaattacgcttatttatccacttataataaaattaattttttttgttgaaatagattagtaggatcataatcccactaattacctgattaacccatagtatataataaatccctaataattcaccattattcttgtcgggatattacacatctaagtgaatttttattcctttttattttcaagagaagataataatagtagtcttattcctactctagttgataatgctcggtttgttgatgattatattgctcctgatatagaaaatgacgagggtcctatcattgatgaacaacctattattgacaaggggcatattattgaagaaggtcatgttgttgatgaaggtcctattatcgaagaaattccaattgtgaaagatgtcataaaataatgatcaacaaatagatgttattctagaagcacctcatctaagaagctctcaagagacaaaagagttcaacaaggtgtgatgataatttttaccatggagaaggagaatatgttattggtcattttatggatcctctcacttataacactcaatagtccatattcatcaaaatggataaagatatggtgatgagattgagtccatgaagaaaaaggatatatgggagttagttctatttacttgatgattttaaatcaataggttgcaaattgaatttcaaaactaaaaaggataataagagacatattgaaaggtataaagcacgtttagtaccaaaatggctttacttaaagagaaggtattgattacactgacactttcttgcatgttttcactaaatattcatttagaattattatggctttaattgaaattttttttagagttgcatcaaatggatgttaaaattacttttctgaatggagaattaagagagaaattctatatgtctcaattcgaaggctttaaggaaaatgaaaatgaaaatttggtttgtaaattgaaacgatccatttatggtctcaaataggcatctcgccgacggtacttgcagttgcataagcttgtgatatcgtttagtttaattgataacaagtttgaccaatttatttatatgaagatctataaggagttgttattttttttcttgttctttatgtggatggcattttactttccaacagtgatttatcattactaaatgaggctaaatttttttagtaacaattttgatatgaaggatcttagagtgacatctttcattttcggggattgagattcattgtgataagaatcaaaagttcttggataatctcaagaagcttacattaatcgtgtgctcaaaaggttcaacatgaattggtgtaaggttgattctgtttctgttctgaaaggggacaaatttactaagcaacaatgtcttaagaacgacttaaaaattgaagcaatgaaaactatcccatatgtaggtgtagtagggagtttgatgtatgctcaagtttgcactagatctaacatttcttttgtagtcaatgttcttggaagatatttatctaatcttggacatgatcattgggttacaaacaagaaagtcatgcaatatttgcaaagatcgatgagttttatgcttgtgtatcagcatgtcaacaatttctgagttgttaattattcatattctgatttttatggttgtgtagatgatttaaagttaacttctggatatatttttaccttggttggtgcaactatttcttagaaaagtgttaaatagactttaaccacattaactactatgtatgctgagtttgtcccatgttatggggcatgtttgcaagctttttggttaaagaatatgattttagatatacgaatagttgattatatttcctttcctatactaatctattgtgataataaactgtctttttcttttcaaagaataacaagattattattgcttccaacatatggaaataaagtatttcattgtgacttggtgaagaaataagacattgtgatagattattgcaagaccaagttgatgttagcagtgttaaaattttatgccctaaataa

SEQ ID NO: 114969 - DNA, 6731 bp, Cannabis sativa
aatttggatagatacttttattctataagaatattatatcaaattggtgcggtgagctgcggacaggatgccaaagaaacttgtggagaagagtgacactactgctgggttcgaggacgatttcgaagctctaaaaattaaagtctttggaatcaagaattcaatggaggagatggtaaccaagattgaacaacggcttcaagaaacattgcaacagctgttcaagattctcttggataatcaagaaagatcaagaaccctccaagaaccaagggaagatgtcaatggagctgctggcacccaaaggcatgaacaaaacaaaaatttggcagcaccatttgagccccagtagagtagaacacaacaaggctctagagagaggtctgatggcacatctcccatagtaggattcaagggaactcgacattcagatggtggatcctttgaccgaggacaacaagagactcgttttcgtcatgagaatcgccttaagaagttgaagatgccaacgtttgatggcgataaccctgaggggtggatagtgcaagcaaaaaggttttttatttgccatgattatgacgaagaagagaaggttgaggcagctttcatttccttttctggcgacgctttgctttggtatcaatatgagagcaacaagcgtgacatctacagttgggaggagttgaagaaattgttgctccgccattttcgagatagtcaagaagggtcgttgtacgatcagtttttaactgttaaacaagatagttctgtgtcagattataagaagaaatttataaggttattggcacctttgaagacatttgatccagccatacaattgagcactttcttgaatggtttgttgccatctttacgagctgaattgcgaattcagagaccacggaatgtggatgacgccatggacatcgttcaagacatagaggacaagaacaaagcctcaaggcaacgatactcatcttcccatcgcatggcagtaccggagtcacccacaagggtagagaaaacactagctcggactcatttggcgaattctaccactgaaagtcgaaggcttattgattctgaaatgcagtacaaacgccaaaagggattgtgttttcgttgtgatgaaaaatggtctccaggccatcgatgcaaaaaaccacaattacaagttattatgattctggagaatatagacaacgtcatctcagaccatgaatcagaggaagataaaaaagaaaaagtggagttagaatcaacagaattgctagacaatgtgtcagtttctttccaatcagttgctgggttatctaataattccaccatgaaactcaaaggacaccttggttcaacaacaatcgtcattttgatcgattccggggctacccataattttatttccaaatcattagtggcaacaatggccattccagtcaccaaaacaaaggagtatggggttacaatgggcaacgacaactcgctgaaatgtgaaggggtttgtaaaatcttaaatattcatttccaaggtgtggacgtttgggacgatttcttacccttacaactgggcagcgctaatgttatcttaggattatagtggctcaccacacttggcaccaccaaaaaccaattggaagtcgcaaaccatggagttccaactgggaaaaaggactgttactattaaagggttaccatctcttgaccgatctttaatctccttaaaaactatgattaagactatccaagctgagaaacaaggtatcattttggagctgaatgctaatagcaaggaggacacacaattcgacccaactgtaccagaatttttggccgaaattatcaaggaaaacacagttgtttttgatatgccaaagggccttcccccatcacgatcgcatgaacatgccattacactccagcctgactctggccccataagtgttcgtccatatagatacgctcattcacaaaaaacagagatagaaaaattcatctttgacatgctgacagtaggcttcatacaacctagtaccagccctttttcaagtccgattcttcttgtcaagaagaaggatggctcttggcgtttttgcgtcgactaccgtgccttaaatcgagtgaccataccagataagtatcaaatccctgttatagatgagttgttagatgaactacatggtgctctcatcttttctaaattggattcaaaattaggttaccaccagatacgagtaagaaaggaagatgtgtataagacggcatttcaaacacatgatgaccactatgaatttttggatatgcctttcggtctcacaaatgctccatccaccttttagtcactcatgaataatgtgttccgccctcatttacgtgattgtgtgctggttttttttgatgacattttagtgtatagcaagacactagaactccatcaacaacatttgtctcaagtttttgctctcctacgtaagcaccaactctatgccaataggaaaaagtgctcttttgggtagaagcaagtagagtaacttggccatatcatttctcagcaaggggtggcagttgatccggaaaaaataaaagcaatgctagagtggcccatgccaaaaactattaaagctctccgcggattcctaggcctcaccggctactataggaaatttgtggccaattatgctcgcattgcacagccattaactgaccagctgaaaaaagataagtttttatggggaccagtagctgaacaagcttttaaacaacttcaagaagcaatgactaaggcctcagttcttgcattaccagatttttctcaacctttcgttattgaaactgatgcgtttggacatggcttgggagctgttttgttacaaaaccaaaagcccattgcatgttacagccaggttttgggagttcaagctcgcagaaaatccatttatgaaaaagaattgatggctatcatctatgcagtaaccaaatggcgcccttatttgcttggtcgtaagtttattgtacggaccgactagcaaagcctaaaattcttattggagcagcgagtcataggctcggagtaccaaaaatggatttctaagctcatgggaatgaactttcagattgaatataaaccagggacacacaacaaagtggctgatgctttatctagacaagtagatgaggccacacttgatgccatggtcactacagactggacgatttggcctgcattagccaaggaaataatagctgatcctgtgcttacacagttactagaagatataaacacaggcaacaagacacatcatggttttcatgtgcaccatgacttacttcattactagaatcggttagtcattccaaaaaagtcaactttaattcctcaaatccttgctgaattctatagtaccccgtttagtggacattcggatgaactaaagacctataaacgagtagctgccgaactcttttgggaaagacttcgggaggacgtgcaccaattcatccagcgttgctccatctgccaacaaaacaagttgctcaccacatctccagtcggcttactccaacccttagcacttccggttcaagtatgggatgaggttactatggattttattgaagggcttccaaggtctgacggatgggatacgatcctcgtagttgttgatcgcctttctaagtatgcctattttatcaaactcaagcatccattttctacccctacagtggctgatgtctttgtgaaggaaattgtgaggttacatgatgttcctcaatcaataatatcagatagggacagactcttcctcagcctcttttggcgccacctcttcaaactacaagacactactttgaagagaagcaccgcttatcatccacaaaccgatggacaatctacgttgcttcacataccagcagcccaatcagtggtcaaaatggatggcttgggccgagtactcctacaatacttcatatgatttatctctcaaaacttccccctttaaggctctatatggtagagaccctcctgctcttataccctgcaaaaaagggactgccatagtgtcttccgtggatgacttgttggattctagagatgccatcttggatgatcttcgaatgcatcttcttcgagcccaacacaaaatgaagctctgttggaattttcagttggagacatggtctatctcaagctcagaccataccgccaacgttctcttgcaaaacgttccagcgaaaagctctcagctcgttattatgggccatttcctatcattcaacgcattggttcagtggcttacaagtttcaacttcctgaccacgcccaaattcaccctgtttttcatgtttctcagctccgtcgagctattggcgctgaaccagcgacgcccaccattcccccacaactaacagctgacctacaactccaaacggagcctgaatcagtgctcaatctccggtttgctgctgctagttccctcattccttcggaagtcttaatcaaatggaagtcgttacctgattatgaagcaacatgggagccttacaacaccatcctagagcagctcccttcttttcaccttgaggacaaggtgaaggtgttcgaggggggtattgataagcgtccagtcaagttaggatacgctaggaggtcacgagacatttaaagatagggctgttattttttattccagctgtaattgttttgttattttatctagctggttattttatcttagaggattgtgttttattaattctttttagatcctagctggcaattaaattattctgtttaatacatataaatagggggctgattcattgtgtaaaggaggtgggaaatagaagagaatagactctaggagagagcagccctctcgaaaggttgtaattggagatactagcatctcgaaagctagattattattttatttcatcattaataaagagattttctttgagggcttttataattttgtgtaccaatttggatagatacttttattctctaagaatatcatatcactttctgaagttaaatactgaaagaaattatgtctgtttgcggcttgttaatactttcaggtgctatctaggggtggaactactgaaaaatgaaggaagtgaatccattctcaagtccctttggcaacatttggatgcaatcctgtgctgctctttgaaggtaattattattataattattattattctgaaaactacatttgcctaagcttgagttttttaaagtaccagttttctaagcttcaataaactctactcaaggcaatgcattctactcaaatgataaattttgtggcagtatactgtataccctacatgcctaaaaatcttaaagatattgatgaaatctgccaaaacatgctgaaatattattagttgagtaataaagtactgatcttgaaaagctttggttttactacaaattgtttagtgcagtaattggttttatcatggagctgaaatagtctcttctattcttctgtgatttaaaattattccatgtttttgcaggcaatgccggttttcacttttgcaaatcaggcaggactggacatgcttgagacaaccttacttgcacttcaagacattacattggaaaagatatttgatgacaatggaaggaagaccctttgctcagagttccctcagataatgcagcaggtattaactgttattagagtccattttgcactttgatcttgccttgataattctttgcaaaatgattactgactaaatccagataaggtgacaggaatattccacatattaattacttgaaaaaaaaaagaaaagaaaagaaaaagactattttgccaaggctcccattccatatcggtttaggatgataacaaaagcttttgggaaaaataaaagatcataagaaattaatataccaattttgagcattttcaggttctatgcatcaaaccttttctgatgttggtattttcgttcttcctccacagggctttatgtgcctccaaggtggaatctgcatgtcaagcatggggaggccagtttcgtacgagcaagctgtcgcatggaaggttttagacgaaaaagaaaatgctcactgcatctgtttcatgtttattaattggtctttcgtatgagaaatactttgattaattagataacttaattagctttatgaagatctccggtaggttagagcatcgttttttcctttttcctttgctatggacgaacttgtaacatgccttaaacagtctggatatgcagtatttaaatgcattattggtgcctaatttttgttctactatctttttttaaggtgcttttgaaaagctataatgtaattggattttgtgtgtgattggaggtgattatagaatttagtatgtttgttttatcatgtaattacactgttattgtgtaattaaagtagttaattaaaaggttccaattacacttggattttcatagtctccgtgagaattgagtgtaattacatgcatttaataatttttttttattttaaatactaactactaaaaaatattattttttatgtaattattaatatattaggaatttatatggaattatcactttatattcaactacactttatattttaatataggctaattactattagtaattttttcccttgaactttgacatgtactaaatcgtgttccttgaattttttttgccgttaaaaattcccccgaactattgag

SEQ ID NO: 114970 - DNA, 5115 bp, Cannabis sativa
  modified_base (3959)..(3959): a, c, t, g, unknown or other
  modified_base (4208)..(4208): a, c, t, g, unknown or other
gtgttattgatcttatttattgcagaagtaaagagcaagttgctgatatattcacaaagcctctcaaatttcatataatttaaaaactaaggaagatgcttggagtatgtgttttggaagatcaaaattaagagagggtaaattgagtgtttataaacacatcagtttaagagagggaatgctgaaaaaaaaaaattatgttattatgattttttatgtataatctaaataattacgtgagtagtggtttggtaagttcttattctctaggagatagtagaatgtggtgcatgtttacatgttgagtaattagtggtcttatttcttagtgtaagtgaagagttagaaactctatataaagaactttgggttgtacgaattgaagtgtgcaagcaataaaagtttttattaattttattttgttctccatatatataagcatatatatatatagtaacactgaaaccattcgaaattgattgcttaaataaaataagtttattattcgctataatcaattatttttaatctcttgaccattattattatttgttgatttgtgcacttacaaatatttacatataaatcttgcaatgataatttttgggccttaagtattcgggaactcaaggcgcacgtcttgcttacctcccctcaagaccaaccttgaacaaaattgagtcaatttgagccatttaattcaacaaaaaaatgttaatagcttaattaatcatagagataaaatatttttattttatcttcttaattataagaatactttgatagataaaattaaaataacttttaaaaactaatatgtagtattattactcttttttcatgtgagatcataaaaaaaactttaaacttagttaactaattatgtttgttgtacaaaaagactaatcttttaatgtgtaaacagtagtctttaatgagaaagagtttaaaaaatactactactaaataaaaaaaaaatagggattgttgaaaaaataaataaataattaaggtgggtccatgtgcgacatccttttatttaatagcaggacacggggggtcgtgacccgacccgaaagtctccctattaggttgaagctccgaccaaacccgcaaaatcggtcctatcagtgacatttgagacttggttgtgttaaattagtggaagcatgatttttgaaaattataatgcatttgtcttaattttggatataattgtctgctgtagaatgcaatttatgaattttacacattttatttaattcccttataaaacaattaaaaattacataacattgtatagatgtaaaacatggtgtccttcaatgcattgcaaacatgttaacaattaagcattacatataacaaaactaaatacaccaaagaaccaaaaaagagaaaagaaaaaacatggacaattgactaagacataacccttcaagtagacaaacttgagattatagatttaacaaaacaaaagatactttaaaagttcaagattaataacctttcttctaccctaaaccaaagaaccaaaaaagatagatctttctcctttatatacatgaaatgaaactctcatgtagactatgacaagtgacttctgttgaaatttgttgcttccaatttatttatgctcttttgattaccgaagtcaaactcttaacataaggaacaaaatatagaccacccctaaaatgagtgcaacaataagaggaattgataccaaatttgtacacaaaaattatgtcatcttctgaactcatatacaacacttgatctttccaaagtgtcaatggccttctaataccttcaaaaggtcccaatgttataaatttggtccaacaataataattatgatcaccatttctctttctcatcagaacccacatatcaatgattgttggattcgatttagcaaagaaaaacaaagcaatctcttcattccaagttacaattcttgtccattctccaatgtctctatcttcacaatgtttgagccaattgtcatggttttcaggcacccttatgatttcaatttcttcattttcaatttgagtagaaataatgaggagcccacataacttcttacaccaacaataacaataacaaaatttctttaagttcacaacttggaaaccaaattgagggagaacttgatcaattctggaatcttgaattagtttccaagaattactattcaagctatatatttcgagagaatcaaagcccttgatcgcgatgattttataatcattagctcgggaatcatatccaaaccctaatactttcacattaataaattcgtcgcggtagagtggaacaaacttcaattccctcaaagcaagattgcataaagcaatagagtaaattgtattgatacagattatgccgttatagtatgacactccgtaataatgtgtaaaagggtgaaaattcggaatacaaccatcatcatgatgatcatgatcattattggccaatattgtgaaaatataagaggtgatgggaccatagggagaaagggctgaaatgttccttagatatatttctttagaggaccatagcttggtgtccatattggcatagtgcttgagtacaaaaaatgagttattcattagagaatgaatggaatagtaccaattcttacaaacaagtttgaatctttgcagagactccacaggcaaccatgacatgatttcaattgctacatcctcattcaaatcaaagaaattggtcatttttgttgtacacttgacttaatttcttgaatcttggttctctgttttgggatttgtttttttaagtgaaagaaaaacaaagaaagagagaaattgagaagtgaatgaagtgatgggattgttttattgaaacttgttatttaaagtaaaccttatgagaatatggggatgggatgagggaaccaattagttagttggtttgttttagggggtgaagactactatcgagtgtgctagcctatagagtactattcttacaataatctttttttttcgtcattttaaagttaaaaagaataaattattaagaggtgaatggaaataaatagcactcttagtagaatctgtattttattttttaaaatacattattaaaactccactttattaatttattgaaaatcacatttttacaatatatcatacaataatctctttatttttattttataccatttaaatataatgttggatattgattttctgcagtttcttattagggtactattttattgttactagcaggaggataatacttttggctaatttttcttagaaattttggttggttttttagttttttagtattgttgagctagtgatatgggttgtgtgctaaattctaagtttatttttaatcttattttgaagaatgtcaatctaatataattgtgtttttttagtttggtgttgtgatgtttttcagttttgctagctctgacaataattttataatgggaaggtatcttttcaatgtgatggggtgttgtttgattgtgttattagttttattgtctaaatttctaggggcagttttgtcccatgtggctcgggataagaattttgcaacgcatggtttggcaaagcatgcccttcggttagacgatgagctatcctggctcgaggaggtgtcgtcgtcgattgtggattgttgttttgtttatcatgtgtgattttattcagggcgtcaaaaaatatatatataaattttagggaaatttttaaaaatacccttcttttatgttttatttacaattttacggcttaaaagtttcaattacaaaaatactcttgtaaagttttaaaattacaaaaatacactttgtacaacaaaaagtaaaaaaaaaataacgtgaaatcaatctcacgacaactataaatcaactatataaaataacaaaaaaaaatctcatgacaattataatacaactataaatnaattataaaacaactaaaaaaatagttcattatttttactaaagatgtgtttttgtaaataaaaaatttaaaaagtaaaaatgaaaaatatgaaagtaagtgttacaaaaataactaagaattttatgaatctaatttattaagtaatctaaagtataatactctcactaaagtaattagtaactctaaaatatatttgcaaatgagatagctaaatgtatggagctatttattattattattattatnattaatattattattattattttgaaacaatgtattgagctattttacatttttcttttaattaaacttacatttttgcatgaatgtcccctacgtgtgagtgtctcaattaatggctctaaggaataacaaaatttaccgtaaattaaatacataaatagttaccaattcagaattttcacattaggattaattgttttaaaaatatttataacaagttttgtacttaattttgtgtttattttattaattttagtatattattaaattaaaaagaaattgtttaatttttaatgtattttttcagcccccatgcccaacaaggtaagccctagcagactgcaaaatgaggtttggccattgaaatttttaggaaattttatacaaattacttaggtacttatttttatatttttactggaaaaaaagatcagatttttttacaaatctttttagttacacttgttgtttcatactgcagaaacataatataatatagtgtaaacatacaaacacaaactttttatcttttaggagtaatataaaataaaatcccaattttttatttagagttaaatgtcactgaacttttgctccacataaataattctttttaaaaaaaacaaaaagaaaagaatgtagagagcagagcatgggcctaaccctaaactgtaagtcaacttaggtacaagggtagtggccattttgaaggcactcaaaatctcatttttgtaattggcccagaagacccatattcatgaggcccaaagcaaaggaacatcagcctattgcaatctaaacatttggcattaatcaagggaaatttagatggtatactaatttttgctatttttttataaaaatactgtcaggctgtattttttatttttttactgtgtttttttat

SEQ ID NO: 114971 - DNA, 5222 bp, Cannabis sativa
  modified_base (5148)..(5171): a, c, t, g, unknown or other
atatatatatatatataataagctgggaaatgttaaaggatagagtaaattgtagcaaaaatacttaagttttatattgagtagtagataaatacttaagttatattttttgcgtgtttcaaaaaaaaaaaattttttgcggtaaaaataccttttgtcactagtgaggatcttgcgtaggtacctcctcgtttttttgccttgtaatgtctcagatggcgttccatgtcattaaaataagtgccacatcactcccaccatttaaaactaacccctgccacatcatgtatcctaaaccttataataatgccctaaaatttattaaagcctcttaaaatcaaaataaaacacttgcaggaataaataaataaataaatatgttatagaacttaaacttaaaatgcctgaagcgaaacttttccaccattgttgaaagctcgaaggtgataatgggacggtggttatgcgattgtaaaccaccattggatgttgcgattcgcacctctaggacgatgaagaatctcggtagaaggttcaagtgctgtcgaatccataaagtttattttctctccccgataattctggtcagccgataaattgtttcttatggttgaaatcttggttttttttttatttgtaaattttgtttttttttttaatttttataaattctctttctcttattttggatcgatcttgattgtttagtttttcaaaggatggtgagtgagattttttcgagtcggttgacagcgagatgtttcaaaattgtggaggtggatgttgtatccatggatattggagtataggcagcaagattcgatgggttagtgttctgtggatcaacaaagaacaaccccttccagccatggaggttgtacaagtgaaaatattgatactcgttgcagtagtcatcacagtcatgcacgtttggaagattatagcgaaaatacttctacatttcaaggggaaaaatctaattattggcttttgtttttaggttgtgtagttttagttgtactctttataatgttgttctgaattgaaaaatgttaagaagtgtactattaagatttaatgtatgaatcaatgacttttttttttttttgttaattcataccatataattaatcaaaagatacaaccttaaccatacaattaatcaaaagatacaacccttaactttgcatcatcaaaatacaaagtttatcaaaagacataaacttgtttcctagaataaagacattcaaatccttattcatatacataacaattttagatagtaagtttctgaaaagacctattacttgtgctttttaaacaaaatacataacatagtttaatggcatccaaaggatggacacaaaatgacatcaagtccaccaaattaccacacataaaattagatagatgtataaaataacatagttaatgttcatatgttaatttggcataaagttcaccaaattgcaacaaaatgcttaaaacaagaatccctaactattggcattagctgagatcccagcatcagtatccctttgcctttgcttcatcaacctcgccttgttttcttagttgcatcagttgggttggcagatggtggtctcccccttttcttttgttgagcagactgtaaaaataaataattagttagtactatattaaactaaacacgaattgactagaagtgttgatgtatcacttagttttatatttctaagcataattaattaggtaataataatagaaaagtacaagtctgcaatattttcttatcagtatgttagctttgacaagttaatacaagacaaagactgtagtgacttcatacactacactaatatatttatccaaatacaaccctttacttaagaaacttacttagaagtcaaaaacgaattataaagtaattttaatcctaaaattgttcaatttacatgtgatccctatccttgcatataaatatacagtttttccactttcctactttgcatttttgcaactcttttaaccgtggcaagcatttcataaaatgcttactgtaaaattttcacgtgaatcatatataacccttttcaactattaatttggtcaaacttataaaaattaggataaacccctttttaaaatttaatatataaccttgcacttacttagtttcagctttattctgagctggtatgaaaagaaatacaataaggaacctcactagtggtgtcaataactaagctagatgaaacgatgtctctaattatttcttctttataaccttttaattgatactgtcacatataggtctttttatcatagtgtttgactctaaaatctattggattataacaagttggaacaaagaattttataaattatcagttactaaaaaaaataacagcaaactcttccttagaatctttctaataatagacaatttatagttagagaattgttaattcataagcaatcaaaattgaggtccatactctaagctaaaaaagtagcaattagtaaacctttacagtctacaccattcatttaaactaaaacttaaggttgttaaaagtcattaattagcacaaatggcaaaaactaatctgtggagttggatctttttaacacttttttgcattgtgcccacgaacgccgcacctactacatttgtgaaattgtccaaatcttttgatatttgttgcatttgctagtgatggttcatcaacatctcttcttctcttcttttttggtcttcctagtagatttgtctcagctggtgcttgaattggactgagaccagatcctggccaaaactttggacctggaattgggtgtatgaaatcttcgtaggccttctccatcacccctttcttgtaaaagtgtgagacataatctttcacttgatgccctaattgccatatggttctaatgcatgaccacaaggtatcccactcagctggtaccttttgtagctgaaggttatataaattaagtccactgcataactaactgtactaggacagtccacttggaaatttacttctgttgacagtattactagacaatttgaagcaattttcttattttgctcaatgttcttccatatgtttctcccatattcctctctcaacttcttcacactctctcttttattttgaaacctacacatgatccaatatcttaacttctccaaaagggttactattggcttgtctctagcatcaagtactgcattgttgaaatattcacaaacgttattcaagaggacatcacacttgacgccttttgagaaataggcctttctccactctgttggcggccttgcaactaaccaattgtatgcaccctgattaacttctttgatttctgccattttcctctaaaactatagtatagtggctgctcttgtagctgcccccaacatctacttcatcaacaaaccaggatggtccttcttaaaatttgaattaaggtgcttcacaaaaatgccttagagtagaatttgtggaaaccctccccatagcattctccaaatcgttctgcttgtcactagtaagtgtgcacaaatctgtcctttcactttctagatcttggtttaggagttcacaaaaccaagtccatgaattacttgtttccttctcacaaataacataggcaattgggtagatggcattctcaggatgtatcccaacagaaaccagcaacaaatccttgcaatatcctttcaagaaattaccatccaaacaaattagaggcctacaccatttttgaacccatccttgtaagttttgaagcaaatatacacccttttaaacatccttttatcaccttctagcttagtctagatcttagtagtactacaaggattagttactagtatttacttgcaatagtcatccaaaatagcatactggtgagccacagatcctttcaacatctctggggaaatgttcttagccctgtaaaaagcccatttgctaaccctagaagatttagtgtttgacaccatctccttgaaggctgagaagtgcaaatttgggtttaatctgaagctctccaagaaaagtttggcaaagaactttgaatttgcaagcctattgtctctgaattaactataggtgtaaaaattagccacttacacccattcactttacatgtggccctcacccttcctttaccattactaatgtacttgaagtccttgttatttgcaataaagtattctctaagggcctttcaaaaaacttcaatagtagcaagaatcgtccctttcttcaactcaaaagtggtcttgtcccattgttgattatactcatgtcttgcatttttcctaacctcaccttcctcatcatcactttctaaactttgcaagtcatccttactttcaaccccatctccttcacactcattaccctgaccaccttgattgcaaacattagtgacacttgaccattgctaggattcgttggtttcgctatattcctctcagcttgtacatcttgctctatattcctcatgaaattcaaagtcttcttcattattgtcctgttgtgtcccaactctagtttggtgttgtgatgttgttgggtcaattacaaagagttaagatggtatttggtcaacaatattgggatggtttggtgattggtcatttgtagttggttggtttagtattgttaggtcaattatagtgggatggtctggtgtttggtcaaatgtagtgggttcaggtggtattgggtcaattgtattgggtttgtttggtgtgggatcaattatagtgggctggatttgtgttgggtcaaatgtattggactcataaagcattgtgtcatttatggtaggttgctgcaattttggctcgtctgtagtggtttggtatattattgggtcttcatcttctctacctggttgagtatcaacttaaggagtgtcttcctctgcatcttgaatctcagggcccattctagtccttgaccttcaaagatgacatagtaattagtacaataacaatcgaattctaaatcaaatagttcctctcctaatttttctaggtcatcctcatcatcctcatcatctgattcttcagaggagctacttatttcaaccacctcaatttgtttacttggagtgtctcttgttaggttttgtgccctaaannnnnnnnnnnnnnnnnnnnnnnnatttactaattaataaagaccagaaatcgtattttatgttgcatggttcac

SEQ ID NO: 114972 - DNA, 2576 bp, Cannabis sativa
aaaattcatgtaaacataaatcacttcaaattttttaaattgataactaatcagattgtaatggattttatttagggcacaaaacccaacaaagacttcttagtaaccaacgagtataacaacccctcttcctgatttgtagcctccaaagatggaaaaaaagcaggtgcctttcctccaaaatcaaaatcgagttgtccccattaccattaccagtaatcctctcaccacacgactctggtacaatcttgggcttccaaacatgtagcttctcttgaccttgccccaacaggccccgagatgtcactttcttgaaccgtctcgagccacgagaagtagtggacggttgacgacgcacagtaccacccaccttgttcccggccacggacacaaaacgaccagagaaccccctcggaggcccagaagtaatagcaaccaacggcctgtcgctggcacttgaaaaaacatcatgatatttagagacggaagacaaccaaaggaaacagggtcccatctccatcgtccaccgtgaccggagacgatagggaacatccccgcctttggtggcccagacggccgcacttgtagcaaaaaatgcctatttttttgaacttaaactggatccagcgttttacccccgaggccaaatcgaagtaacagcccgacatcaatggtttatcaatgttgatgtccaccagaatcttgaaaaagagtttccacgacatcggattatcctcaaccaatttaatattaacgacattccttattaaacctcccaaaaaagtaccgttctcaaccgagaaatactcatgagaaaggttatgcacctgcacccataccctcatacaatccaccatagttggaccttgaacagtaggaatccaagccttaagcgccagagaatagcctttaacagtccaaggaccattcaccaaaacccattctctatcttcaacacttgtaaagccaaatctaaagcagttactcttcgatgaagtatcagacagagaaaaaatagacacattcttcttccacactttagtcaccaactcagagattgtcgtatcatccacaaacatgggagctatcacttttccaatcagacagagagacgacaaggccttaagagaagtagcacacggagataatgagatagatgcttcgacacaactgaagaatttgcctttaagagaggcacttgactcattaacaacctccataaatacagacagctagagacaacacactccttacctaaccagaacaacacttaaacacacaggacaaaacaaaacatgaaacacagggaaaaccaacagaggtcgacacaaaattactccacccaaagagacaggaaggacccacaaaacacacaagaaacgaacgaaaaaaggagacaagggaggaaatagatacacacggggagacacacaaagctaaacaaccaaaagagaataacagatgaagtttgatagccacgaggaacgcagatcaggtgaaccaagacaagacagacacgacaccgaagagagaacagtataagaccatctctcttttatcgacctaccaaacattcactctttttctttaccaaattctctcccaaatccctcacctctctcttctcccatggaggatgttaattaaccaccatcaccaccttgataaaatataaagtaataagtagtaatacttatagatgttaagaaacaacactaagccaagatgccacctacccgaacccatgcccattttttttgcaagtcctgcgcagttagtgcgatctaattagagcatgggactaacatttataggtatataagtgttcttaaaatattaatttttttatatttttttctcttatctataaaaatttatcacttttttaaggcaaattatgtggttcttcagttagttttgagaaatgtgaaacctcaagggttatattaaccctttagattgaattgcaaataaaatgaagggtatctaaaaaaaaaaaaaataagtacttgttgccattttactatttgtgtagtatttggtaataaaataagatgttaaaaaaaaaattctggaaaaataagatataaagttaagaaagtcatttttttttctgtctattatttgatgactaggcaacataaccgcgcttcgcgcggtcattatactaattaataaatatttttttggtttttttttttttataatttacggttattatattatgttatgctgaaaatatctttttattgtattataaaaatgtattaatttttgtgttaattttaaagtagtaacgaacaatggttagtttggtaggatttaataattttatcagtaattttaaatttcatatttttatcataaatttattacatgaaaatacaaaaacttatctctaaagtacaaaaaatacttaatttattctccaattttgactatttaaaaaattaaagctaaatttatgaaaaactaaaataataacaaaatatttaaatggacaaaaaaatttggaaaaatagtaatattatattccataaaattcaaaaaatgaagaaaaaaacaacgaagattga

SEQ ID NO: 114973 - DNA, 5119 bp, Cannabis sativa
tttattccatttcctatttcgattttcccatatggcccacatgactctaatggcatcttcaaattcattccgatcaattatctttgctaatgactgcaacaaatcaaaagttgatccgtctcccagagtagcacaattcttgtaccaaggaatgagtttccaaatttttttaactttatcacagctccatagagcatggataggagtttcagcatggttctcagaaagatcacagcagggacttactttcatacctctatgaatcaaattcgtctttgctggcagccagttgtgacaaactctccacccaaaaagcttcatccgaggaggcagctgcagactccatatcattttccaccatttatttactccttccatgtttgagcatctagtggggtgaagatttatctcccttccaactctatagccacttttcactatgtattgaccatttggagtgtagggccaagataaagtatcttcaatgaataggtcgattgggattccttgaatccaacgaatgtcttccttatgaaaatgccttgtgatcttctccatattccagtgaccatccaaagttatgaaattatgaagtttggtctgaggaggaaggctgggatgtttagagagcatagcctcatgaggccgtggtaaccatttgtcctcccgaacccggatctctctaccattgccaaccccccatctagccccttcctttagaatcttcctaccccaacaaattcctttccacacacatgaagccccattaggacagctagcttccatgaatgaggtaagaggatagtaattgttcttcagaacccgagatagaagtgattgaggattatggatgagtctccacccttgtttggccaaaagagcttggttgaattcagttaaactccggaacccaagaccgccttcctccttaggcttgcccaatttgtcccaagtgctccaatggagctttttattctctttagtatcccccaccaaaaattagctgccaaggaatggagatttttgatgagtttctttgggagacggaaacaactcatggcatagcttggaatagcttgcacaactgcttttatcagaatttccctactggcttgagagaacattgaagttttccaccctttgagtttgctccaaaccttgtccttaattacttcaaagacctcttttttccatcgccccacaaagcttggaagccccagatatttagcatggtgagaaacaaggcgcacccccaaactatttgctaattcttgaccctgagttgaagtgattctcttacccatactcacctctgatttctctagatttatttgttgtcccgacaacctggagtatttatgtaataagctcttcatggtgtcacattcttccttctttgcatcaaggaaaacaaagctatcatcggcaaaaaataagtgagagactttgatcatatccttcccaaattgcaccccattgatatttccagccctctcagcttcatgaataaggcaagataatccttctgagcaaagtaagaatagatatggagatagtgaatcaccttggcgaaggcccggggtaggttgaaaatttccaattttctccccgtttatgaggaccgagaatgaaacactttccacacatctcatgattttctccacccactgttcctcatacccaagacccctcatcatcattcttaagaagttccattccactcgatcataagccttgcacatatccaatttcagagccatcttcctcccatttccaaacctttttgttttcatacagtgaaggctttcaaacccaattatggcattgtcttgaatgagtctacctcccacaaaggcactttgttcttctgagatcgcttgttgcatactatgtttcatccggccggcaaggcatttcgccactattttgtacaccacattacatagacttatgggtctaaactcagtcattcgagttggctttgggaccttggggatgaggcaaatgagtgtatcattgatatccttcactggcatcccgtcattgagaattccaaggcaaactttagacacctccggtcctattgtagttcaatactttctgtaaaacaatccaggtaaaccatcactgccgggtgctttttggggatgaatggctcgcatggctgtgtacacctcctccgtagtaaatggctccaaaaggtagtcattagtagttcgagatatgcggtttgggacaattcgttggaagtcttctagttcttcttgagtggcctgagtagaagtgaataatttcataaagtaattacaagccaccttccccatgtttctattccctgtaacccagtttagccgatcatcaaccagccccttaatggtgttttttgcctttctattacttgcttttctgtggaaaattttgtatttttgtccccttctttcagccataaagctctacttctttgtttccaaaatttctcctctttatcaagccaaacattttgttttcgttccaactcctgcatttgttgccaatcggtcgctttagtgctactggacagtatagagatcttatccgcacactccttcagctgccttgtcatttctgtcttctttgatttgttccattgttgaagagccaccccacaacttctcagcctattttttaattccagtgtatgctcaatcggcttatccctgctgccaaaccgaatgcactatttccgtacaatcgtcatcatccgcccaagcgctctcaaaatgaaatctagttctccatctaatcccattattcatccttgtaactggcttattttctgttaacagcagagggcaatgatctgagttagttcttgctagatgactcacggtagctgcagggaacatatcgaaccattcagagttcccacagacccgatccaatctctcaaaaatgagattatttctccttccattacaccaattataatcactaccctcaaatcccatgtcccgcaattgacaagaatccaaggcctttctgaaattagtaatgagataacccggtttggggggtcctcccaatttctctttttggttgagaatttcattgaaatccccccctccccacagcccatggtccaacatacattctgctgattcttttcaagagtttccaagagtgaattctttgggttggatccggatcaccatagaaaccagtgaaacgccaccattgcctttcctccatccttatgaaagaatcaatatggaaaggagaaaaggaaaggatatgggtttccacatccatagcccacaacaaaataagacccccacttttcccacgagcttccaccgcaaaacacccaacaaaccccagcttaattcgcaaagcttccgcacgaactttattgactttggattctgagatgaaaatcattttaggagtgtactgattcactagggaagttaaggaacgcaccgtccaagggttccccaacccttgggcgttccaaatcaagagattcatggttgtaggcgaccctgagtttcagggttcgcctcttccatgttcttagtaacttccaaatcccccatgtgagaaatgtccgctactttgtcttccttttttcctttcttggccttggaatccttcttcaccgcaacctttctcctgtttgcttttgcttggtccttcgagctgcttcccaccacaaaagaggcagcttcttccaatccttgggcgtcttgtgcataggaaatgggaatattaaagattatactcttgagcatctttggacataacagtggctgtttttttcaaattcccgtaccctgaatcaccataatcttccactatccaacgtttccccttattccaatcatcacttctcatttaattctccccagtttcagtgtcccctgcttgcaaaccttccattcttggtaatgaacttaaccccctttctataactggctgcaagtgatcttgtttagctttattgtcgtcccgcatattcgtaactccgagtcttgcatttcccaaataagtaagagcagtagcatctgtggaattcttctctataccagtagccggctgtttggtattgttctcaagactgctttgttgttctattccttgttttttacctgttatcccatctctaaccccagtattcaccttcatccatgtctcgtacacattcgtggcttcctttccttcctcagatatagttacaggttcttggttacaatcttcctggccatgcccaattcttccacacttaaaacacatgaatggcaactcatcatatttgaactcaatccacttcttcttgcccgaacttgggagagggaaccctggacataccggcttgtttatcgacatccagactcggaatctaaagaacccatctgctgccatctttgtaacatctgaattctgcacagtaataacctcccatgccttagcggccattcacacggtattgtttatagtcaatagatcaattggtactccatacgcccgaccccagattgggaagctagtcagattgtgtttccaagattcattagaattttccattttctccaaaattagtaacccatttgataaataccatggcattttagataagactctgctttgaattgactcagatacaaatgaaaaagttaagaaaagacctgaatcaaatttctctttgatcttgagattccattctgcatccttcaatcgccatattcctcccagcactttcttgagaaaccctcggctgtgatccgagttcgtgcataggcgtgccctcaagttggctttggcaaccgtaatagacaaacttttatcaacttcccattcctcatcttcatcaatgacctgaagattatgggtcttctgcagtagttcatccatggtggaggcaaacaccccaatccctacaaccgggaacccttcaaaaacgagggaagaagcagggtcaagaaacagagttcaaccctagcagagcgcgcgaaaatttttgttggctgctttcaaattatttaagttgatatttagttatctctaactaatcaacttaaatttgaatatcttttggatttaaaatttcaaaattaaattgaggaattttaggcattggtta

SEQ ID NO: 114974 - DNA, 4942 bp, Cannabis sativa
  modified_base (1444)..(1444): a, c, t, g, unknown or other
  modified_base (4325)..(4333): a, c, t, g, unknown or other
tcctagtgagtctactacttgaaacgatacgtacacttgcgtgtgctaaatatcgcaacagtaatcttaattgcttcaaatgcatgttactaacttttgcaattaaaaattaatatacatctttttagtcttctttttattgctctgtttcagagctatgtttttccatgacattttgcattttttttgacagactgggaaggattttatgcgaagattgtaagggacaaaagttatctttccagcattagattgaagttgtaagattataattgaaattccaattatttaagtagtagatagatattttacagttatatctggaaaacgttggaaaagttatttttaatactaatggccttgtctactttggtactgtagatagcacttatccctttggatatttttgttctatgttatgtaccaaatcaatataagttacaagctgtagggtcatggtgttaatgaaaataaggatagttcatgttcatccttactttgtacgcaggtgggcctaaggtaaagagcaacttgagattaaacaatcatactaagagactacaattgaacatttgaaatatgttttggtgtgatattgagacatttgtctgatgtgtgtgcttggcctctctatttgatgcatctatgtacatgtgtatgtgttttttttttttttttttaatttgtggtgcatagtcgtgtgtgaaaaaaaccactgaagagtaataaactgcaggagcaaatatgagggacaatttcaaggtgattatgcatacactatggataatctagaataaatgcacacaagtattgaaacacttaacaattgtgaaataatagcaccataattgtaccatagtactaattaaaatgacaactcaagaatttttcatgacaactcatgaattcgtggtggaaggactcttcaacaccttctcttaaggtgagttgtgatagtattgctttattgaacctttgtaatgtgcgtgctttaatgattatatcggtaacttgaaaatttatttcggcatattttctttccacttcttttgttggggctttcagtttctcaaatattgtcagttttggacaataatagcatatcctagaatgcttgattttcttagcacaattgattgatggtatacttttccaacagatattcaagctcttttaatcattgatctttcttccttagaggtggctgcttcaatggttctctcaaaatattgtagcttttggttcgtgagacttagcttgggtgcaaagaggggagcaattgggcagctcacgcacttactatatcgtcaaactctactggcattacaggtgagatcatgcctaccgattttcagagagtgctccaagagttggagaggtgtgtgtgtttagcatcttggtaggagccaaaccaggggcttttcattctctctctctctctctntctctctctctctctctcttagctttttctgtgttccttgttggcagctttgattggtggagtctgctattgtaatctctagtttagaatttatgtaattcagcatggacaaagtacggttcaaggaaggatttcattgtaattgtaaatttttatgtaaagaataaatgtattattctttgaaaccaagaataaatgtgtttcatattatttaaatatagctttgaatataatttgtttttaataaataatttattgaatataaattctaaattaaaaaaatattataaattagtttttaagactaaatgttggtcactgaatgcttaatttatataattatttatttattactgacaactaaattatttagtcaccaaatattaatcttttaatgactaaattttagttggtgaagtttaattttttggtcattgaaagtgcacattggtactcatgtaaccaatatatcaattttattgcgactaaatttaaaatcatttattgaactaaattttagtcacagaaaataacactattttgtgactaaaaatatttagtcgttgaatattttctacgaccgactttcagcgactaaatggcgactaaaaataattagtcgtaaaaaatcttcgatgactaattaacgagttttaatgactaaaaatttagtcggtgaaaataggttttttttgtagtgttgaccttctatgactcgagattactcaactccgagatgtcatctttcttgccacatgccaaatattgatgtccatatcattagggctattgttggtgtaaataaataaaaaaaaaatgagagaatttaaggtagaataaaaaattttgaaaaagtaaagatttaaggagaaaatttaaagtagaaaaaaaaatagaaaaataagagaattaaggagaaaatagatatatagaggtatttgaagtaattttagactctcacgttaccgtcttattcctcagtttatatatatttataaaaaaagatttgatttgtttttaaaaaatgtagaaaagagaggtgtatttttgtttaaaagagtgtaaattagaatttctattgcacttgtatgaaagtgaattagatagataagataaaatggttgaagttcttttacttgtggcaaattttaacacttacaagtgtgaaactttgagaatctttgaagacagtcaattttagataaattaagttgaaagagatgcattttcaatggacaaagacccataaccaaacatctttaatttgcataattcattacatcccaaaccttgttatgagtgtctataagtatgttttctgctgttgatgtagaccaatatcttaggctcaacactagaagacatggcaagttgaaagactttttagtcactttttattctgctaaagaatcattacatttacatacttagtggaagaaaatgtcaaggcagaagcagtacaaaattgcattatttatgttattattagtatcttatgagagttaaacaacaacaccaccaaaaaaaagaaaaagaaaaaaaaaagatcacaaactgtccaaactacttagctgaacattagtagatggtaagtgctaaaataaagacacacaaaaaaacccattttgtttggtgagataatatcaaaatatgtggcaatcaaatgaaagcattttggaagttatatatagatgtatgtataattatagctggaaaccatatagataatgattttgtaaatggaaggttcccgtagttgtaatgataaagtgggaaaaggaacacattgggaccaatgtatgtcaatgtttccttgttcttaattcattgacaattcaagcaatagttaaatgtatattaatatctctcttccacttttttctttcttatctaagtgtgggctaataacttcagcaaaagagtgtaggctaataaaacaaaaatagtgttatacttccaaatttataggggccaaaagaaaatgttatctttttttttttaagtgtttaagctattaaataaatatattcttttcatttttttccgaacctttttttagcttcaaatggcatatatgctacacatagcacaataatattattgtccaatcatatacataggggaaagaaaatttcatcttgagggtctagaaaaaataccattaaaaaaaaaaaaaaaacagaggtcaaaagttatgaacatatttataacaatagtacattcttcttgctccttatcaaaacaatggtaatttggcattaatttgttaccactggaggagcatttcattcgtgagggctgtcaaagataattggtgagttgcatcattatttaaaattggtcaatttgcatttatgtccaagatagcttctttcaccaacattttttgatattttatgtgaattattattcaaactagactggataaatgaaatatataactaaaatgatagcattgtagtactttataatgtcaataacaaaatgttccttttctttttcttttgaaagggtagtacaaagggtaggtttgaaccaaatcgagcttacaaatgaatgtgattcaaaccaatcccaataattaatttcaattgttaagcaaaaaaaagaaaaaaaaattctatcattgtcgcaaaaagtcatttggccttcgtttttatgtaattagcaattaaaaaaaattcaagaaatcatttggaaagttacactcaacttcttttcagtgacattttccagtccagcagtaggtatataaaacctgatactgtatttaaaaatatgagtatatatatggaattgtacatatatttatatttatacgaacactaccttttaatgggtattacctttactaaacaatttaactataaatattaatttnnnnnnnnntaaactattagattttgatccaacaacaaataataaaaagaaaaatttaaatttttatatttaatttaactacttaattaaaaaaatatcaaaaaatattactttttacactatatcaaaaatatgtttatatacaaaatacttaagtcaaattcaactttgttttgccgaaaaactttttttcttaattttttttttcaactgatggaacaatctcaattcatatactgtaaaaatgagagattttttataattaaatagaaaaactaaacataaaactcaaattttcagaatactacccataaatgggtaatacccattaaaagtgcaaatttactaataaatacaaaaaaataatgataaagtagtcattttttttataataattcacgtactttattcaaattaagaaaggaagaactttgttaaataatactttccccaccatttttataaggaatgccatcgagagtattaacttttgggtaaataccattttagactttctgttttgcaaaatgttaccaattgaactctctgttttgttaaatgacaaaatggaccctgtattttccaaaatggtaaaaataggatcctgagctcaatttt

SEQ ID NO: 114975 - DNA, 1728 bp, Cannabis sativa
aaaaaaaaagggaccaaagagttagagttaattagattttataatccaaaatccaatcataagatgataaccaaaagtttcttcattgggtatacataaatgttgcttcactattattggtgattgagaattgataaattatatgaaataagttacttggatttgatgattttgaccaattaattaagagcacatcttgattaaaaataataataatgattaatggagttgcactactaattaataattaagtactatttcccatataaattataattatatgagtttggatacaaatgctctttatgtgtcattggtttaattagtgtaaaaattgaagcttgtgatttattgagagtaacactttataatattttaattaacaaatgatgtgacgaatgacgtgaagagcaaagatacatttcatttcctaaaatatgtttaaaaagccatttaaatttgaaaaagtagaagagtagacttacaaaagattcctaataccttttgtttacttttgactttcctttcttgtttaacccctaaaatgttgggattctattcccaaaatattgtttatgtactttatttatttatttatttatttttgtgtaatttacggcataaatatttaagtttaatttttggcggtaataatacctgatttataattttggaatttctgtaagtatctggttaagtaaattgctacgtggcaatacctgattggtccaagttattaaatttttattatttttttaaaaaaaattagttcaaatatactaataagaaatgacacatggatttaatggcttaatatttaatgggtaggtacttatagagtttcaaaaatataacttaggtattattaccaccaaaaactaaacttagatatttatttgcaactagaagttaaactatgccgcaaattactctttttttcattacttttgtctacattatgagttttttatttttagtatttaaataaattatctcaattttttttttatctaagggtacgttatagttatagtaggtatttaattagttttttattttttttttaaaataatttaccgtgtcaaaaataaaatttaaaatagatatttgttattagtaatagtctcacattgctaatgcgtgaaaaaataatattatatataagatgcgtgtgctattttttcattgttaattagttttgagatagaactttatacatcactatttaaatctcattttcagtattgtaaattattcataattatttaaaaacagacaaaaactctactataattgttataggatgaatttctcatctaaaataatgagtacaatctcgtatttgactgacatgtggacccatttttcgataggaaaaagatgatgtattaagaaggctaactcctgcagggtaacctcgcacaaggtctagtcacacactatgtcacaaatagtgaaaaaggataaaagtgagacataaagagaagttagccgcaacatatatcgaatatatgcgatgacttggtgtttcaccccacgccctatgtaaagatcgcatctctacagtgattggtctggatgactagtgtgcccgacaactcatccgaaacccgcgagttctatgttgtttgtgcataaatgcacaatacgcgatcgatcatgtaacgtccccgcttcaagcctccattggatccttacacccacagaatgaatgactcttatacacga

SEQ ID NO: 114976 - DNA, 1700 bp, Cannabis sativa
atcccacttgaccttccccaggcaatgtgggattgcacaacttacctggtgttttcccttacagatcacaggactactgactgtcacaagtacaatcataatgctggttgagattgatatcgtggtcaatcgtaccaaatacaagaacgttcttagatcgtctgttaagacttatgtaggtgtatgggggcctagctgcaggtcgattatatgtttatgtatgtttttcttactgagtttgtcgactcacagttactttcacatttgtaggtaatggcgagacaagaattgagtagcggcgagtctcgagcttagtgaagatttcaacaatcttttattattcatgataaaccacataaaatcccaatatactcccagttgcactaatattatttatcgaatttttatgtgtacggatcttcgaggtaaaatgtgctcatattttgttacatacatgtttaaaaaattagatatgggatcctagattttgaaaataaattgtaaagtttatatttattataaattttaaattaaataattttttttaaaccctttgattagcaaggtttcagagtaattaagaaagcactgtaccacgcctataccaatagggtattacaaatagaatggcttagctgagaaaaacatagacatattgttgaaaatggcctaaccttgcttgctaaagccactatgcccttcaagttctttcatgaagcctttaggacaattttctatcaccatactagacttcttactcctgtgttgcaaagtaagtgtcctttggacattttgtttaatcaaatgtcttactatacttggtttaaaatctttggctacaaatgttatcccaacaatagccatataacaaacacaaacttcattttagatctagcatttgtactttctttgtaacgttcccgcttcaagcctctattgggccttcccccacagactaatgactcttacatacaagtacgtcactcttggctgcttcatggaatgacgactgaccatatagaccaacactagtctttccagcgtgctttgtcctcacttgcccacttcttgggaaaacttctcaagaggtgacctatcctgaaattaccccaggtcaagcacacttaactttggagttctttcatgatgggctaccaaaaataagatgcatcttgttgatatattaatctatttaatctctcttcaactatgtagtcccatacctacacagtctcaaaatcaccacacttaaccttcccaatgcaatgtgggattgcacagctcccagtctttcctcttgtagatcacgagactctgactgttacaatcaccccctttagggtctaacatcctcatcaatcacacttccagctaggttaaggctctaatattatttgtaacatctttgcttcaagcctccattgggccttcccccacggactaatgactcttatacatgggtacgtcactcttggcttcttcatggaatgacgactaaccctgcagaccaacactagtcattctggcgtgttttgtcctcacttgcacgcttcctggaaaaacttcttaggaggtcacccatcttgaaattaccctaggtcaaacatgcttaactttgaagttctttcatgataggctaccgaaaagaaggtgcatcttgttgatataggtagtaccaatcaatccatttaagctctctt

SEQ ID NO: 114977 - DNA, 5526 bp, Cannabis sativa
tttaggtattaaaaagtaaaaaaggacatttgctttattattttaaaaaagagacattaactatctatataattagaaatagggtcatttacttacatttctcaaattttatgccacaatatatgtacacataatatgacactataataatgttctctttagaataaaattaggaaactttcaatattgctttacaagaggaaaaatgttcgttggaaagcttttacaagttattaaattttctcaaagaaattcaactttttggagatgctaaacttaaataccacatgtatatttgaccattatcatttcacttgttcaaaattttttacttaaaaatttaaaaaaaaaaattataaaaatacgttaacaatttttttttatttataaaagtacttcttccctaaaatatttttttagttgttttataatttatttatagttgtattttagttataataagattatttttttgtttatttttaaaggttttatagtttatttatatatttttttttaatttatagtttatttatatatatttttttaatttatagtttatttataattattgtgagattaatttctcgttgttttttctcaacaaagtgtttttataattttaaaactttacaaatatattttcatgattaaaacattataggccataaaattattaataaaacgtggaagaaatgtatttttaaatttttttctatttacttttgtctaattttgaagtccaagaagggagccaacatacaggctctttccataattcaacaaggaaaacagttggggccattaaatatgatgatgatggtgatgcactaaagaagaaccattggaagaatcgtatgaaaagaatagtcacaagagttcatagtcctcatccttatcaaccaaaaataaaacacccatcatattcaccttgccccatatgtttttttttcttctttttattaatgaattgccccatatgttggttgaaccgaaagaaccaagtcaactattataagataaactaatgcctaaaaggtcccaaacaaatgcacaacgaaaattaatgagctaactgaatacttctttctttgtgttcacactttttttctctcttttctacagagaccccgttataaggtttcaatatttattattagctaattaaggtcgttaaaaatacctttattgaaattgttagatttaaatttttttgtctaatttcatttaattttattatttcagtgcttgtttatgtacaaaattatgctccccagagtttgatatctaccaaatcatacccctcgaactttaacatttactaaattataccccatgaattttcatcaatgttagacttttttactaaaattggaaaacaatctttaaatccaacaatctcaataattcaagagtatttttaacaactttaaaagttcaaaaaaacataatttgatacatgtcaaagttcatcaacaaaatccctaattagcttttattatttattaaaccgattagtttctaaagaatgatttctcacaaaccacgatactgccattctttctacctaatctgtagtagtttcacttcatatggttatggttgcgactgttattgtcgtaaaagagaattgggaaagtacacaaaacacaagggaaaacatagaatatgataactattgttcattacttaagaatgtgcaaagacaagaacggttgtttaagaataattgttaataaataaaattaaaaactctaaaaggatgaatgtttgaagatctgatggaaatcgtctacatagatccatagagaggcttacagaaacatctggagatgattattaaggaaaattaacacatttcttgtgattttctgacacaacgactgacttttttcctgaattcgcctcttctttctctccattctttctgcaataacataatttgcaagattctaaatcagagtgccaagtcaataaaaagttgatatatagaaggaaatgaagaaaacaatgacacttaccgcagcttcgacatttgcaggggattcatcgttggggctagaaagcattgatataatgctcaaaactatactctcaacctgcaaattgaattcaaatttgcccattatgaatagggaagacattataaaacttgataagaaaaaaatatcctcccactcaattaatgtataatctacaactcaattgaattttctgcaatgcaatttccactcattggccatctctatgcagttcgagctacaattagggtagatgacatggttatgaatatttaaataaatccatcatagcccaaccttccacactattcaaagttataaaatgtcctttcacacgaaactttgaaatcaatctttgactcaaggtattcaaatacttttctatattaaattgaatcaaatgtctatataagtaaagtttattattaaacttcaagcactgtaaactactttagaacaaccaagaagacttaagttccataaagtgaattattcgaaagaaaaaaaagttccataaagtgaaacttccagttctgctagttaaagtgtggggcttgatccaattttgccaattgagagcatgattacaaaaagtaatggtaaagaaaaattactagaagaataaaaaagaacaacgaattgagctataccttaaaaatttgttacctaaatatgaacacatgaatgaaatgtaacaggacacacttttattattcccatcctccttaggtcttatttccattccctttataacccaacctaaatttatatgcagcagtgaaaatataatccacagtgatgaaaccaataaacacattcgagcatatgccatattcgacctgtcttttaacccatgcactttagcaccttacattatgtgatgcagtttcaaacaaatgatttcaatcatcttgtttgactaaaatgaaaaaagttattttccagttaaatggttcttcaattactcatgcttggggaaggctgaacaattgcagtgcaagaaaaaataaaagcactcaactcaagcaatccctgcaaaccagagttgtgctagaattaaaaacaagcacctcaatctgggcctaggttgagatccatattgcaagtgttcaatttgtctcggaaataaatctcaaccttcggtcttaattagccaccaccaagttaaactgcgaatcagagctaacattagacgatcaaaaagtcgataagataaaaagcacatgtgcaattccaagttttcactttcagactcatcccaagcaagttacactcagaaccgtaactgagattgttatatccaaaggtgcctctgccattgctgatactaactaatatatattttttaaaaatagaaagatctgtccaaccatacatggtttctaccataaacttatgtcaactatactttctataatttcacatcaatgaaagcagttaacaaaacatgcacaaacataaaaggcacaaacgaaaagagccagatgtcaaacaatcaataccgaatatctatgatattgaaggtagtgattgccttgaaatatcaaatacataccgtatgaactggactccagcgctcacttgcaagctcatagccatttggatcatcaccaggagcatggagaattgaaatgcaaaccttaccatcggaataaactgaaattttgacagaaactttaaggaacttacaaaggggaagaagttaaattgatcacaaattcaaaacacatcaagaagtgatttaccattaggatgccacatctctgatgtaaatctcactgttggtgggctgtttgggtaattggaggggaaactcattatggcattaaagaaaccaccctcactagcacaaacaaagagcaacacaatacttaattattcataactagagccaagtcatgtcatggcatgcccataaatgcttatcatttgtcaattgtgagaagatcaaaactatcaaattttctaatatcacaagtaggggtgaaaatttgtgtcgaggtgtcatatttgtgttcatgttatgtaggttgttatgtctaattggtcaccctaactcgatccacatatattgatcaacctgattagtattgcatatttgatttatatacacattaatttgtttgactcatttaaataatacactaaatagaagtacatacaatggacaaaattcttaatatcaagtgtaaataagctattttaatttacttactactgtaaatttatttttttatgaaaataaataataatttaactataaataaacaattctagtgatgtacatttttttcgattttttttattgatgtacttaatataaacaatttcgtgtctgtcaatttcatgtcacacgggttaaccttaatctaacaaaaataattatcatggtattcctgttctatttttgatgacacgaacatccaatatttcgtactgaattcatgtcttgttatatcgtgaccctaatcaaaagtggaaaaatatcacctttttttccccataaaataaaaagatagatttgggtaatcaaacaaaagtataaaaaaattcaacttagaaccaaaactgaattataaataacttaaatatgtgtagacgcagagattcaaggaatccagtacagataaccaactacaataacacagtaccctatttcactttctcaaaacatataaacgaaaaagaaaaagaaaaagaaaaactggaaccaagactcaattataaacccacaaaagaaaaaaagaagaaagagagattagaacatactagggagtatccgcgggtcccatgatcgtaacgctccattcaaagacgttgctttcgtcaaccaatcctgctgagaatccatccacaggagttttgtagagatctgcagataccaaacaaaaaaaaaaaatcaaacccaataataatataaaataaaaaaaaaaaaacaagaaaggaaattgatcaaagaaatagaaaaaggggagtggagtggttattgatattgacctgtgagttgcttttgaaggaggaggcttgcttgtgtagcagccatggaagaaggaaataacaagcaagctctgtttgttgtttcttctttcttgtgtttttctttaatgaattgaaatgttaaagcagagactctgctttttatacacaccaccaaaccaagataccataccgacttcttttctagatttgtcgtttctttttctctctcccactcactctcccccttaattatattttcttattattgttactatattttgcaattatttttttttattaagaattaatactaatatttttacttgcattggagggtttaaagatataaaatagtaactaattataaataattaaagaatgaacaaaaaaaaatctatatcaaaatcaatttttattggacaataatcaaaaaaatgattctaattctcttttaaaaatcaagtatttttttttatatatgtgttaagcaaaaaatttcacatttagaatattaaaaataaatgca

SEQ ID NO: 114978 - DNA, 2544 bp, Cannabis sativa
  modified_base (2510)..(2514): a, c, t, g, unknown or other
taaatatatttatttatttatatactttttatttattatatatatttattttgttattgtataaatttgtgttttaaagttagttattactgtaacaaagttaattagttattttattttaatttatgtaaaattatagaactaatgcaggaaaaaaaatggggaaaaatacaaatggcagaaaaatctgtattttttttatattcccgacggtttaaaaccgtcttattttgcctattttgcgacggtttttaaccgtcttatttttaaccgtcgggaagtccacattagcgatagtttttaaccgtcttattttgcctattttgcgacggtcgtataggcgacgattatagaaatcgacgggaatactttaaacgacttttttataacatcaagaaaaactattttttgtagtagtggtagtatcaacaaccctttcgaattgctcctagtccatggggccacaccccgagaatgaaatttattatatgaatctcaagtgttcacaaaatcaaattgacttatacaaatgaagactccttctttgaatttaccgcaactgttgtaatctatccttctaatcaaatatctaaagttccgagaccttaagctcccttcaaatcataacacttgcacactttctcccgaagagtgactcattttcaatctttctcccgaagagtgtcgaacttgcactttttttcctaaaaagtgtgtctcacgaataagacttctcttgaagcttggtgagcgatatacaaggtgttcaacctacacaatttcaacaagaaacaatatagaataatacaataataaaatactaagaacttgttggactcaaattcttcacataacaaagaaactccatctaaatttgaaagtaattttagaaatgatacactaagagagataatagaaaccaaggtccttagagtgtatttattcactttggaaaccctctcggtcatgatcaaagaatcaagaactaatcaggtcaataaatgaaaaatcttcccaaacaggaaagtcagaatatgtttaagcagacagtcaatctattcaaataggtacgttgaacttggacaattttttattttaataataattaatatatattgcttcaaagtttaattttgtcttaagcctcatatatcttaaggccggatgtaatagttgttatggtaaaaatgtatttttttttagatcgaacttcaaattttatattatattatattataattagtattataattttttttttatatagaaattagtattataatttagtgtaacttattgtagttctgtttacatgatgaattttaatgccaatgtcttattttccttataattatatatattgttattgaagtataatatgtgcattaaagtaagtattattgtagaaagaagtgcatgtctaactaactagatgtatatatctatatatgatcatttcaatatggtacacttaagcaagcaccccatgagccatgcgcaacttacataaccatcttttctcattggtttgtctcccacttgctatggcaccaatatattgaccaaaatctttcctaccaacatggaaaaatttggaaaaaatggaacgaaagcgcacttatgcacatgttatatacgatcatatgtatatagtatatacattattaaaatttgcatgttaattaagggaaaaaaaattgatgaacttatccaaatatttaaaaggataatattgatgatgatgaagataaagtttatgtgtgtgaagagtagtgagatggcatatagaacaataattggaagtaattgattaagagacagaatagatcatgaataggggtagggaaatggaattgcatttgcagtggtgaaatcaaagcctcccaatgaaggaacattattagatattgaggatcaagtttggcgttgccttgcttcttggcaccatccataatatatatatatatatataaaaatctatatatgtagatatatatagatatatatcttgccactcccacttgggaaaaaaacaactcacaactcaactcagctcaactcacctttcacccaagtgggagtcggacaaagcatttggacaatgtgtgtagtagggtttgttacgtagttagctcaactcaagtcagctgggccaatcaataaatctgccatcagcccttgtcgtttcacaaaatcataaaaccaaacatttcctttctctctcaaatcaacatgtgattttttttttcttcaactaaattaacaattgtcgtatgataaaacgtggaacctattcctaatatcacatcatcacatgacaacacaaccccatatatttgatcaagtatatcttgaaaatttatcataaaaaaagtattatcttaaaagattatgcagcatgtttaatcataggaaagatgtatatattaaaattattttaccaggatttagatttactaacaagtatatttttaaaatcctaaacattctaaaacgatatgaaataaacnnnnntaaagtttcagaaaccttacagtggttgca

SEQ ID NO: 114979 - DNA, 1281 bp, Cannabis sativa
tggtggaggtgctgatggctgtcgtgagtgaggaataataggggtgagagtgtttcgaactaggcatgtaacaaagggccaaggacctgacttccaaaaaatcttgtctatatcgatcataagacgattttggaagggcagcacctcccaaccaaggaccatagccaagatcacgttccttaccattattaattttttccgtgaattgagaacatttttcaaacacatgacctataatcccatattcgtaacagaaatccggaagacgttcatcacaaaaatccagccacagttcatctttgatccaaggcaaagtaaccatttgaccacgcagaagtggcttggacacatcaatagccacccgaagtcttaagaagggaccccatccttcatttagggattcttcatgtactttaagaaaaggttcgattcaaacctccgatgatgtttgcaagagccttcgattttctgagaaaaggcaatctaaacacttgaacccagaaaggagtgacagtaaccgaacctagagaagcatatcccagaacatttggtgaacagagaaccatatgttggttatgaaaatgccatggttctttagagagaaccctgagtaagtctccttgacagccaaaagtgatcatgtagtagttatcctcatacttagaaatatccatagggaaacgcccaacccaatatctattaatgaaattatgaaattgctttggattgtggccacgactagagaaaattctacatataattctgtttgttgaaggtcttggagggggagcagtgacattagagatgttaataacttctttttccttggcagtgagagcattagaaacatcattgataaaagaatccataatgagtatagcaggggaaatcggatattgggaaagtagaaaggtagaaaattatggagaaagatcaagtacggttatagactaggaaaaactgaagaaagtagttaataagaagatgaaaatcaaaagaaaaccataactgtcacagagcaaatttgaagggcagacagtgctctatcactcaactatattatattattaccctctattttactagttattaacataacaatttaaaaaaaaaaaaaattattgtagtttaaatatttaatttatatttattgagtaattactgatgaataaaatattgtaaattaaaaatgataagataaaaacttaaatttaaaatttaaaatatctaatttactcaaaatatttaaaatctatatatttatatattatattatattat

SEQ ID NO: 114980 - DNA, 1614 bp, Cannabis sativa
aacatttttttaaaaaaaaaatgctggttcaccggttcgggttcgggcgggttgctcgggttcggatcgaacccgctcaaaatgttcagtcctaaccacaaatagattatcattatccgaaagccaaaggtccctagctaaggatatcgatactcatccctaaaccaacaaccatatgacctccttttcgaataagagattgggcttcgtaaataatattccagataaaacttggagaattcccaactctaaataaagaactatgtgatgggggccacattcctgtccacattcctgtccacataccctaaaatcccaatcaatggagttcaaataaagaagttgtcatagaaaaagaataagattgttataaggagttacacatatgtatggtacaagtcctttaaccaaaatccatacaaaaatacctcttacctgtaaaaacaacgtgcatatagaaacgcttccagttttggcctggtgatgtctccaaattgaattcatgaggtaatttactctcgttgtggtctagttcctctttgggatagtattaaaatcaagaaaatagtagatataaccactgctgattattgtgagggtcttaggcaccaaaatggtaccaagaactactagaacaaatttcatcacaaatagaaagtcgttcgtagtcttggcacttttttaggtctttctccaaatggttcaagctaaccagttgcttactaacaccaaggaactgctcaatctttttgatattatttttctcggtcatcataacaggttcacccccgttctttatacccattacttgtccaaatacatccggcgttattggaatttgtcgtccatatatgtttagagttgatgcggtggtgtccacattcccaataatccattgaaataaataatgtttgacgtatggaccatcatcccttatgcaagatttgtaatcggtaacaattatggcctccttttgctcaggcataaaatgcttacaaattctaaaaagtcgatcaaaggcgcaccttccatgtactttcaatccattctccacctcttcttgttccccatcactgttgtgctccactgttttctctttctctgcatcggttcttcttttctttgatgttcaccaaccttagtcttttttgcttctaattatttatgcttcttctccttttcaattcattgcttttgtctctagtgtatgatcattttttaagataatactttgcaatatgtgattattttcttattaataacatttcaatgattgttacctacataacgaataatatattttacaaaacaaagattgtacataatgtgagatatgcatactcactatattacctatatagtactaagattatttttgatggagatggcaagctttggaatgtcaaaatatattggtatgtatcaaaaatagatttcaattacccaaataataaatttatcatgaatttgtatgcaccaatcttaacgtgtattattattgtaggatttttaccaaattgtcctacactaacaagaattttaatatcagtatcaaaggtcaaaattgacctttcctagtctaattaattccttagactaaaacgacaccgttta

SEQ ID NO: 114981 - DNA, 3222 bp, Cannabis sativa
  modified_base (733)..(741): a, c, t, g, unknown or other
aaatatcagtattattagagtaattgtgtccatcaacaacattgtacattaattgtgttaactcatgcaaaaactctttttgagtagtgtaattactctacttttatatgccccattttaattttattcttttatttagcctcacaccttaattttaatttttttttactctatatgtttagttattgccaatatataaaaagaaattattgtgttacatttatcttaaattattttttttatcaaatattatcatactaattatttagtttttcagatgtcatcaaataaaagtgagaatgattttattaattaaacaatacattaggtagctctttcacaacttttttttataattgctagctatacatggttataatattattttatatgtttatatcaaataatacatattttttaaacatatatttattaaaggattaggtatcgtaagatagagaatctttaccaaatgacatattatgtatggatgattataattaaatatgtgctatataatacaaataagttactttagaaggttttgttttttttttaaattctaattttagtaaaaaaaaaatttaacattgatgaaagtccacagggcatgatttagtacatatcaaaatttaaagggcatgatttggtagatatcaaagtctgagaagcatggtttagtacataaacaatcacggaaatagtaaaattgaataaaattaaacaaaagtcnnnnnnnnnaacaatctcaatagttcaggggaatttttaacggcaaaaaaaattcaagaagcatgatttagtacatgtcaaaattcaaaaaaaaaaaatcctaattagctttatttttaatattgtgttccaatctacaattaaaaataataataataaatcactcataacaataatattaattataattagacatgtacattgattttccaaaattaattaaatgcaaatgataataatacaaagatgattgctttctttttttcttgaaaggcaagatgatttctatttgacaattttgtagaaaagttgagactttcaattggggatgttcattggatcacatttgatggatttggacccaactaatccatttcatttatttattggatactaaattttgtcatccgatcagatccaatcgaattgagtcatctgatgcgatccgagatctaatagatgtattgaatttggatcagttccaaccattggatgcattgagtgatttcctattagattggattggatccatccaatccattttatctaccatttaaaagaaaaaaatatacaaaaaagtataatttaaaacttaataatccaacatacataataaacattagtttagtccaaccaattctcatgatctcataataaaaccactaaaaaaataaatacgcattgataattttattagcattgagaactattaatattttgtttcattaattatatgtactaaatgtatattaaattaattaatatatatgtttaaataaaatatattaatataaaattataagtgtatttaaaaaatatataaatataattggataaccattagatgataattagatcgatttggtcggttattcattggatcggatgtcccatccaagaaccgacccgattcgattgaatttttaaaatttacatctgatccgatccaattatgattggatatccgattttattggatcggtcgattttaattagattggatgattttctgcacactcctactttcaactacaaaattagtaaacacccaataggagaaacatcccatttagcaagagaagattattatttaacactttaagatacttaaagaccacactaattgatgcaaagcataactaataataataaatataacacaatcaacaaaataagttaaaaactaaatctaactaagcaaaccagaagaaagaataaaaacaaaatctagctaggcaatatttctaattaacgataagatgcatctttttttttagtggtccatcaattaagaatgccaaaatcaagtcatttacaataaaaataaagaaaatcttgacaaaaaccctaattaagaatctaataaagcaccaacaatcaagcatcagaaaagtgtgaagtaggttcctaaactaaatgaacatctgtctgaatcaacctatcaatagttattagccaataatcttccaatagacattaggatataaaaaccccattcgaaacagccaactatgatgagcatccaaaaagaagatctgtatgtggctaatagacaaataaactatagagcatatggccaatagatagatttgaccgagcaatttgatccaatcaatgaaacattaacgcaccaataaagagaaaactcgactccattcgccagaaccgtattaatctttactaatctagtaaagcagtgaaaaatcgtcgttattgtaaaaataaaactaatataaaatagcattaatattaaaacaaaccagaatccaatgccaatcaacccaaaagtttaaggtaccacaagaaccacccactcccgaactaagaaaatcaatgagaaattccaccacaaaaccacaaatctcggcctatggccaaacacccataacgtgcctaaagcccaacaccagacctagagcctccaaattcccaaaactcacaacccaaaacatacagtaagagcccaaaaacaacttgatcgatagccactgagccatctccaaaacacgcaaccagatcgagactgcctgctaggcaatgaaactaaacgagaccaaagaacagcccaaaccactagcaaaccaaaagatacctaggagaaaggagactacaataagatggatgattcgagaagtccaccccattgcatcggtcatcgtacccgatcaaagccacacctagaccctaaaggggtcggtgggcttggccagacaaagaaaatgaagaagaaagaatctagcagtgtcaaggtatatgctagagagaaaatcaaacaacaatagcccttgttttgtccatataactcaattaatggcttagttggtgtgaaaaaaaaaaacacataattctcaactcaaaaagtatggaactatagttcaactttaaacaaatattaaatgagttaatttttgtggtaaaacctcacccttcaacgactatctcattggtatgtaatataatagtgtaacaagatgatccaaaccaaaaaaa

SEQ ID NO: 114982 - DNA, 1337 bp, Cannabis sativa
catcaacattaattttgtaagaactagctgcaggtgcaagccatttaacttgtggtgtggtgctggtcccaaccgaatttggagaagcagatttggaacacctggttttatccgttgaagcattcaaaggaagcacattcgcaatatgaaattgatcaatgtaggcatctgtgaaggtacaagtaataagcgctggtttgggtttagttccatgtaattccttgtttctttccgtccatatgcaccacattaggcaaagaattttctccaagtcagtattgttatgaaccgctgctaaagaggagtagatatcatggccattgaggttgctgatgtttggaaaacaaacccgaaaatgagttagattccaaacagcttctgctctagtacaccgaaataaagcatgtccaatcgattcccaacccccattacacaaggttagcagtaggattattttgattgtgtgtattccaggaagaactgatcacatggaaattttttttaaaagtttttatcactaagctagtgattttgtcctattgtttctaaggtcgtcttcaaggcttaccttgaggactctgtgatcagagccatagaaaccaaggtgaaaaagagaaacaaaaaggaagagagacaaccagggattattggccacacacgaatcaaggcgctcaaaatgatttccatgcttccaagtaaacttgttaccaatatggttgagtgggagcatgtaatacttatttaggaaagagtggaaatcaaacatagcatggggagggggtctagtggtggtgtttctaacattaacagagagataatcattgaaatcacaagaaattagccacgccaagttaggggcagaatcaaaaatcttatctaagagagttcaggataaaaacttgttagtaggatagggcgaactataaaaaccaatgaaatgccagttcatataatcattaatattaataatacaatctatatgactaagggagaaagtaataatattaacattaataacattgttccacaaaagtaaaagacctactcctaaaacactcctaggaagtttaaagacattatcaaaacctaatttgttcttggtacaagttccatgtccaacactcagcttggtttccatcactaaaaacaaaatgggttggtgttgcttcaccaatagggagagatttcggaatgcctgaggactccctaggcctctgttgtgatattttgcacacgcaagtgtacgtatcgttacaagtagtaaactcaccaggagtgaggtcaatcctacagggattgtagttaagtacgttgaaattaaacttttacttgtattt

SEQ ID NO: 114983 - DNA, 1616 bp, Cannabis sativa
aggatgttaataaaacatacttggtagtaaatctagatcctgataaaatatttccaacaatatatgcgtcggcaaaagctaaagggaaaaagttttccctcttaccaaaaaaccacgcaggaaaaattctctccaactttttttgacttatgttagggcatatatgtgtcgacaaaagtcttatgtgttgtcgaaaaatttgtgccaaaagacagtttagtttctaggttttaattgcaccggataagtgtcctttactggtgtacctttacattggtaaaagtgaagcccaattcatttttaattcccctggatcccctttcaccgacaacttttgccagtgcatttggccaaatacgtcgacaaaagtccactttcttatggtgctggtttttgctcctgggggcgagtaggattatttggctcttgttccgtaatatttgtttgtgtgcccttcttgttcgtgatccgcgaggtctccccctttgtcacctaacatgttgttcttcttgaacaagtggtgcatcattcaaagtcgcggccattgctcattccaattcttcgtttcatcagtttgactttgcaagtctttgccaaagttggcgattcttcaattctacaattagaacatacctcgtgggatcataagcatttgaactcctcctctctggaattcttcctcatgaacattcctctcggaattcctacttgtaggaccccttccttgattcgttctactatgagtttgagttcattggggttctttccctaggcgatgcactgtctcctcttccctcacttgctaatctagttgagtgatttctattatgaagaagttttgacttttctagggagatgaattttttttcgagttttaattttaattaaaggctctcaatgaaagtaccaaattcttaacctagaatttcgttaacaataatgagactttttgaataattaaaagtatctattaataatagagataatataagacacaagaatttttacgtgattttgtagttaaatctacatagtccaggagtccatattatttatgagttcttaatctgtttaagattacagaatatttgatacaaagtaataatctctaggtttttctacacttcatttttcaagattttttctcccaaaaattgctcttccttacatcgtaatagtttatgaaacgtggacagtccccacgtttcatatttcagcatgtgggataaatgaataaactaatagtaactaatttttatacttatcttgaaggtagtttctttagcgagatatcatacccaaaatatgcctcacattcttcagtaatgttaagaatgactaagtgtatgagacgctaattgaggtgtcttcctcgcttttgatgtttacaataagtcttaagatagcacttaggagtgaatcctttatgctccttagggtcaatcttcttacttcacttatgaacatttcgagatgaatcgtcttttgctcatatctcttagtttttttaacatattcacaagtgttaacgcagattttcgttaaccaaatttaagtcttacgatgataattcaacacagaaaaaataaaagctatagaaaaataaaaatatgaac

SEQ ID NO: 114984 - DNA, 2111 bp, Cannabis sativa
cgctcttccgatcgtttatatatggtattattatatgctgcctgcttggtgattattccatgaacttgaattagtcctttatttggtttctaagttgttaacccatcatagtaatctcaggtttcaaaacgctgagtgatcaaaatttaagctaaccccaggtgcatatttattatggccaaacattccatatctcaaacccttaagtatggttttttctcataaaaagagaacatgatgttttttggcctgcaataatgtttttgggtgaacttccacctgactgtgtgggttgctgtatgaaccaggatgaattcttaatctaaacgatccatccatttgtatggatttcttggtaaacagataaatggttatttcaatttagaattggtgtgattgtatgaggttagaattttgtgcttagtctacggaggatatggagacatcactagcaaaataaccacttctctcccctgacagatcacttccacgactgggtgaattggaagaagcagtggcttcacgtgctaaatggagcaatacatgtttacgtacacatttatatttactccaaccaatacttacacaaaatcataaattgattctttccattttatatagttgtaagatattagcgaaaggggtatttagcctgtgcttttgctgcttcactcgatattgttcactatggattttgtcagttactacttgatttactctgatcagtttcgcgtaataagcttcatggtttctgaatcagttttattttgtagcattattgttttactcagctttgttcatcagtttcttagtccttttgcttcaattatgtgcaggtattggaagggctgcttaaattgccagagaatagggaatgtgccgactgcaaagctaagtatgtattggatacttgaagaatttgataattgttttgtatactaaaatatattttggatatagactaaattctttaatatcaattcacgtcttatagtatgtcaccataaaataaataaatttactaggtgacacacactgtataagcttaaattgatgtctttatactttcattgcttttcaggggtccaagatgggctagtgtgaatttgggcatctttatatgtatgcagtgttctgggatccacaggagccttggggtacacatatcgaaggtgaagtattgttttttttttttgtgtgtgtgtgtgtggacatctgcatcaactctgtggttgtttctactttgactgaaacattttatatgatgttcagcaaactatgataagattggcactgcagataaaattttttttggatataatataagaaagttaaattgtatcatgtgtgcctttgtttggaatacaagccataattgttatcaatttctaagcaatattgttgttaggataacttggacatgattcagcttacaagtgatataccccaggcaccactttcaagttttattattgagagaaatataatgtttgatacgattctgcttcagtcactaacaaatcagcaagaacattatagaacagagcagtagtttaagtaattcaatgaaatagtaaattgatggagaagaagagatgagctgtcttaatgctacggaaattgggtcacaatttcaacaggttaaagagagagcctgggtctctcatgcaatgctaagatatctctcaaatctagcatacccactctactacaaacgagctctatagcaccccacaatgacaacaccaaaaacacccctcaacagcatacagcctagtagacacacttacccttgtccacttggtctagttcccctcctatcataggtgaagggtaccacagggcattcatataaaaagcaacctaccttacacagggaatccgatagcctgttctctccctagagctgtagctcaattcaaataagaagcaacctacataacacactatcattcccttgcagttcattctttcaaacatttccaaacatatcagattctcatgtaatcaaaagtttcctaaactattgtactttcctaaacccagccattgactaaattaactacccaaaatttctgtggtcataggcatagcctagtggttccacactt

SEQ ID NO: 114985 - DNA, 2014 bp, Cannabis sativa
tgattattttacatctctttttcaagcttctaactcgtcgtgccaagaggttattgattgtgtaaacaagtcggtccaagactatgttcatactgagcttcgggctcctattactgaagaagaagtgaaaaaagcaattttccaaatgcatcccgataaaagcccagggcctgatggtatgaccccggcattttatcaaaagtgttggggaatagttggtcgtgatgtggttagtgtggttcagaatttcttcacttcaggagaacttgggagtgagtgtagccaggctaacattgtgttgataccgaagaagaagaactcggaagacatgacacaactccgtcctatcgctctttgtaatgtggtttataaaactattacaaaggtcatcgtgaatcgcatgaaacccttcatgaatgatatagtagccgacacctaaagcgccttcataccaggtaggctcatctcagataatatcttgatctcgtttgaagtgcttcattacttaaaaagaaaaagaaaagggaaagagggttttatggcacttaaactggatatgagcaaagcgtatgatcggatcgaatggccattcttggaagcaatgttaaagaaacttgggtttgaagactggtggattcggttgttgatgaaatgtgtaacttcggctaattatgtggtggtccatggtaatcacgaggtgggtccgattgtaccaactcggggtattcgtcaaggagatccactatctccgtacctctttattctttgtgctgagggtctttcagccttgcttcaaaaatatgaaagaagaggtctcatccatggttgtaaggtgtctaacggcactcctcgtatctcccatatgttattcgctgacgatagttacctatactgtaaagccactatgttggaagcctcaagaatgaaggaaattttgcataagttcgaagctgcgtctgggcaaaaggtgaatttcatgaagtcatccatcttctatagcaccaacacatcttcggatgttcgagacaacatcagcactctacttggaatggttattgcaggggaaggaagtctttatttgggactgcctagtacgctaagccgaaacaagtcagcagtcttgggttatcttaaaaaacgggttcgaaagagggttgaggggtgggagatgaaattcctttctcgtgctggcaaagaagtgttgattaaaacggtggcgcagtctctcccaagctatgcgatgagtgttttcttattacctttggacatcactcgtgatatggagaaaactatgaataagttttggtggcaaggatctaataaggcaaaaaatggcatccattggttctcttgggatcgactttgcatgcataaatctaaaggtggtatgggattccgctcattgagagatttcaacctgtccatgcttggaaaacaaggatggagactcatgactcggcctaactccttggttgcaaaggtattcaaagctcgatacttccctaatggcactttcttttcggcggaattgggaaacaacccaagcttcgtttggcgtagtcttcttgaagcacaagacttggtaagaaaaggaactagatggtgtgttggtacgggggaagacattaatgtactacacgaaccgtggctgcccagtgaggaacaaccttttgtttcgtcaacccaccctggtttgttgggcagtaaggtgtgtaaccttatggaaatgggaggtgggagttgggacaaggaaattttggatgatttatttgaggagcgggacaagaagcttattttagacatacctttgcatagtactcaaggcagcgataaactaaactggatttatgaaacctcgggtttttattctgacaagagtgcctacaagcttcttcaaaaactacaaggcagatggcatcagctagaggatgagcaaacaaaattttggacaaagttttggaagttaaaaatcccacccaaggttaaaaacctggtttggcgcgctggtagggaa

SEQ ID NO: 114986 - DNA, 2938 bp, Cannabis sativa
  modified_base (2891)..(2900): a, c, t, g, unknown or other
tttctattatatttatacaatattaatataaatatattttagtaaattaataagtggttttctttaatttataaaattttaaaaatacacataacaaaaatacacttgtcaatgctcgccacaacaagttcttaacttttggcggtatcttgagctgccataaatttttccaaaaaccaaagttattcaccacgggtcgtggttcctaatcattctgcaacaacaaatacgcattgctaacagtgaagctaccgtttgcttcaccggtctaggaccagcagtcgccttcgtcgctgatgctcaatgggaggccgagaatgaagctagcatctcgagtattgaacatatcaaggaccaggtcgtgatcccaactgcctgaatcagtggaaaaaaagggaggaaacatgctggttgtaaagactaggattgtgagttgtaacatatggttgattcttatcagggagccaaggatggtgcaatatgctggttgatgtacctgaccgaattttgcgatgggccccaagtttataacttttgagcactccaaatgctacgccaaacgaagttggggttgcagccatgttctgtgttgagaaagtcagagtgggaaagtatcgtgctttgtaacccgactagcaagcgtgcttggattacataacggttgccaaccttgcttagcaagcatggcgagattgaaatcacttaaatgtcgaaatcccacacctcccaaatgtttatgagtggccattcgatcctaggacatccaaatgataccattgcctttgcttgcacttgttttacaccaaaactgagccattagcttttcaatctcttgacaagtaccagtaggaattaaaaagacgctcatggcataagtagggagtgcttgaatcactgtctttagaagtatttccttgtctgatctagagagaaacttgacatgccaactgttaaggaggtttatgactttattcttgataaatccaagaatagcatttttattacggccaatgatgttgggcaagcctaaatagaggctgccttcagaagcttccatcataccaagaacattgtaaagattgttaaggagagggggccgtattaggactgaagaagatcttggacttggtagcattcactttctgacccgaggtgctctcaaaggaatgaagcagattaaggaggttatcaaccgccccttgagtaacttgacaaagaaaatagctgtcgtcggcgaagagcatatgagtaatagagggagcacgattggcaactcggattccttataaaatgccattagattcaaaccgttgtattaaagaagagaaccgaaggcacatatgataaagagataagtagagagagggtcaccttggaaaataccacgggtaggaatgattggccccatgacacgaccaccatggacaatagaatatttaactaatgagacacactacaatacaaggtttatccatctatctgcaaacaccattcttttcataacagctctaaggtagtcccattcaacccggtcataggctttgctcatgtctagcttgatatccatataacctttttccctttcatcttccatttcaaatagtgcataacttcaaaagccaccatgaaattgtcagagattaagcacccaggaatgaaagcactttgcatatcagagataaccttgtcaataatacttctcatcctattagcaagaacttttgcggccactttatagagaacattacatagtgtaatagggcggagatcgcccatagaagagaaattttttttcttcgggatcaagacaatgttagtgttatagtgagaatttctcacctagaaactcgaaatcagactcttataaaaatgacacggggactcactctcctcgaggagagctgagatgtcagtgagagacctcttgagtgcaagcctcgcctgaaccagacttagcgggatgatgtgaccttgacagtgtctagtcgcattcgagtagctcacatggagtaggaccaaagatcaagttaagactcgcacataccaatatatgcgagaactataaaggtcttcctgtgaagaggaaaagatcatttctatattcagcgagccggcccggatgacccaacaatctcgataactcgataaggactcgcatgtcctaagttatcgacttattataggatgtatgtataagcgactcgaacaggacgcagacatcccaaactcgattggtcttttatgcatgttaagcttgcgagcttatgcaagagcatgaacagacaactcgtactatagaagtcgcatacgttgctgtatttagtgaattgggccgatactgttctttatttattgaatttaagtttttattgatttaattgttatattcaatgtacaaatggattgataatgaattcaatctctgtgtaatcaaaggacacttgctttgtatataaaggagtgatccaacgtgaaatagaggaaggtagaaaacccttgcaatagtggactaagcagaccgtgatctgattgaaccaatatattcccttgtgttctttatatttccaatacgtctgtgtgttcataacttgaatactcacaattctaggttgagtacttgcacattttctgcgtatatctttattatattatttaatttggtgttgtctaaattcgtccaacaacatttggcgccgtccgtgggaaaagatattctgttgatttcggaggaaaatcgtcatggatagaaactagaaaaatggagataacaacactggatcaatcaatgttggaacaatgaacgttccactccaaggtaatggaacgatagctgttgtgttggattatgttttaccaggatctagacttactaccatgtatgttatttaacnnnnnnnnnntgaatttctaaaacaatgtaattaaaacacatataaag

SEQ ID NO: 114987 - DNA, 1724 bp, Cannabis sativa
  modified_base (1666)..(1667): a, c, t, g, unknown or other
aaaaaaacatttttaagaatgtcaaaaactactataccaggtccactttcacaaatatcacatcggggaacatcactggggtcagctagtccaaccctcacatgcctactggcaagtttgttacacttgtgaacctgcaactcaagcaccagaaacaaagataaacgttcttgccataattgagtagaaaagataccaagcaaaaaagggtcttagaatctctgtgcaacaagataataagtgattctatacacaaacatccagaaagttggtaccccaatacactctttctaagcacttattccaaataagtacattttcccacttgcatctcacttccaccaaacattttcagtaccaaaatgggtcatatctggggtcactgtcagcttaaatcaacatacagagttcaccaattatgtagtaggccaatcttgctttcaaaaacatttcaaagtgtacaaaaaagattacaacaacagatttagtcacttaactatatcatatttttatacaaagcaagccataatgcccatcattctttaccatccatagtgtaaagcaacaaaatccccatacccaaaaagcaatccaaagagataagagttacacattctcaaagattccacccccaaaaataaaataaaataaaaatgtaacctttattgcaaattggaattaaaaacaaaaaagaaatcagcaataatgctaaacaaagtaaacattgaaaattccagcagataacaaaatacaaaacccaattcatataaataatatttgaattgaaataactttataccaatgatttgaagttagtaaattaaattaaaaattattaaaagcttaaattagtgaaagaccttgtcatcacaggaactgcatagagcagcctcgtcggcggcgcagaagaggatcgcggcagctttctcacaaacgtcacaaagggttcgcattcttctttgtttctaatcttaactctctcattcttcttctacttctgcaaccattttcacataacaaaaaacaaaggaagccccgattgattattgtgtagatatgaagaagtggaaaacgacccacgaaacaataaatgtttgtgacgaggttgaatatatgagacagaggagagagaatcgtggatagacacaaattcagatacagacagagagtcttgtttttttttttttctctctctcgagaagatgaagctgaatttgggaagaagaagaaaataaaaatggagtctttgggatttgatgtgaacgcgctttaaaacgtcgacacttgtctttatgtttctggttttgggttttgattggggcactcccttttttgtttggtttggattttggaggacgatttagcatttttgtccaccgaattatgtttatgcgataatttgagaaataattcttttttatttattaattaaaaatattcttatattatatcattaaaatatattattttttttttaatagatttctcaatataatctcactctccatttaagtctattatatattttacatcatcaataaaagtgagcatatcttaaaataaaacaagtatacaatacaattttatattattgtgattggtattctgttaagttttgtcacacgtgataaacaaaatgatgatataaagggtaaataccattttnnaccctgtgttttgcaaaagttacagattggaccatgtgttttattaaatgacaaaat

SEQ ID NO: 114988 - DNA, 1276 bp, Cannabis sativa
  modified_base (26)..(55): a, c, t, g, unknown or other
tccttaaacccttatgtgtttatttnnnnnnnnnnnnnnnnnnnnnnnnnnnnnnaatgaaacatacttgttagtaaacctagatcttgatacatatgtactcgctgaaataaaattaaagtttttagacaagcaaaaagagatttttgtgaagacgcaattcggatttttgtttaatatgcataaccttattgttttagaaagagcttatacatcttgtattactaacgcaaattaatacagagagggatcatatggagtgttggtataagattagatctaaggctgttagattcggtattgaggagtttattacaataattggtttcaaatgtgttggctagtacaatgttggaccttttaacaaaaagaaaatgggtgtcgttgtttttattcggagtgaggttgctttgctcggtggtcaaattgtggggattcctaaattgttattaatcacttgttcaatggatggatctttaaataggtttgtccttggcttggttggttttgttattcttctttaatttagtttgaacaattggggtgtctctacctaatttttaatggaaaactttaggctgattgtcattaataggtgtgatatgtcccatgtttatttgggatgaaaatctagtattatttgcattcttttgttcccttatagctagctcaagtgtcatttagttaaacatgttattagaatttttctttttactatttatggtaaattgcttgattagtctattattgtttattttgttcaatgaacaataatgaattattaatagatttccatttaacttctgaaaaaatactattttttattataataataaaaacattaaactagcgcgcaaaaagggctatattggctagtttaaaataatgaagataaattacgagataatgtgcgtaaacaaagtacatggtctttgagcagtgttaagacttgacattaatataatagagtaactttcgggcaagtcggcaaaacttcacacctccatcaactctcataatggtacagtggttttgatagttttgtaagttgttttttcactataattattgaattattattatctaaaggaaaaaaaagaagcaaaagtagttatttcttaccttcactaatcgtatacacgtgtttaacctccagagtccaccattttgtccagtaacatggcatttaatagtttttagcctaattaagatttttgccctctaaacttttaaagtcgttaaaaatgccccctaaattattgagattgtttgattt

SEQ ID NO: 114989 - DNA, 3799 bp, Cannabis sativa
atttcgatccttatattcatacagtgtatatgtttatttattccgcatgttatatacacatacatatattttatattatacatataaatgtctaacattaatttcattttattaattgaataaatattatatttagtgtaattttattaaaaaaaattctagtgaaaaaaattatttttgcatatgtttggaatctagatttatagaatgagataaatgagcttaatataatttgattttcttttattaccttcaaactataagaaaaaaagaggaaaataaagttacatttaatgaatttataatttttttttttaatttttaataattatattaaaaagaaaatattacaaaaatttacgcaagatgcatacggtgatttgattttttttttttctaaggggtggttgatctgagattaattagactaatgggtgtgtaattttttttaattaaaaattgatttatttaacaaaatcttaatcattgagttttctcttaatttatttagaaggattaaggagtattttaattatctaacttcgaaacagagatagatctaacaaactaaagtgaacgtttgtaaattatttctaaagtgaattgtccttacctatatgtatcactttaacctaattaggtgaaaaaacattaatttttaccttatttttattctttatttcatatacactaaactttagtacgtctagctgcatagtctatctcctaatagtagtaatagtaataggtgagccatattaaattcatagattggactataattatatattcaccacacaatgtaataatatatggggtttttatttttatttttatacttcataataattttttattttgtatttttatagaaatccacataataacaaacagagcaacctaaatcataatcaaaatccacataacaactcacatgaaaattactggagcaactattggagtaacctaaccgtaaatttaaaaaaagttaaaaaatagtatatgaagtaattctccataatataattagttatcacaagggcactagggctgtgttgcgcgaccatgaaggacgggcaacccttttcagctgtgtggcccttttcggccacttattctcttgatgtggcggaagtttttgctattctccaaagattgtatctttgtaaaaaaaaatgaggtatccaaatttgatgattgagtctgattgtttgtctattcttaatactttgccggttaaatgttgtgttgacttttatttatgtattattgttatagatattgtaaagattaaagaaaagagaaacagagagtttcaataaattatcttttgataatattgaatgaaagcttattcaatatcagaagatacttcttttatttatagacaaaagcaaagtacaaaattaatcaagaagaactaattataattaacagaaaataactaactaactaatctataacagaaagttagttactaataagaacacccccctcaaacgaaatgggcttttctcattttcaatttgaacttcaaataaagaaatatgtctgttgttaaagcctttgtcaaaatcattcactgaagcaggacatatctagctgaaaattacttctccatgatctggtcccttgtaaaatgaaggtcaatttcaatgtgttttgagcgcgcatgagaaactggattagctgttaatgtaacagcatcctggttatccacccaaatgacaggacaagtagacaaagcaatctgtaactatgaaagtaaagatttgagctacttaagcttagcagtagcatttgtaagagccccgaattcactttcaatacttgatttggctacaacatgttgttcttagcagaccaactaactaggttatcaccaaggaaaactagatatcccctatagaccttcgatcttcaatgtaccttgcctagtctatatcagagtaagctataagagttagaggaatagcaggtgattgtcaacctgggttctgggcctagcaccaagtcaacctaggcgctaggccccctttccaagggctcaggtttacagttttctccctgagttttcttgaatattcattatttctaatgataaaaagatgtccagaacactttttttttgaacttgattagaaacaaccaaagttgacaatattttagcctaggcactgggtctcagttttcgccctcttaaaattctgtttggttctcgaaaatagttgaatctcaatattttcaaaaaatagagaaaatgcttgaaataattcttgaaaaactccatttaaaatggcccaggttgacaaaatgtcaacctggatgaagggccagccccaagtgtcaacttgagcgctgggtccttttttgtactcaaaaagtgttgttttttctctgaaaggacttattttcctttatttgatgaagacaaagaagatgaaaagttggacctctgatctgatacttgaaaggcacctagattgacagattgtcaaccttggtgctaggtgcttagggccctgagtgttcaaaaatgaacttgctctgattttaattatgatacctcaaatatattcttggtatgtctagttgatgtcctaatgtaagttttgacccttttgcaccaagacagtctcgaaaactgaaatcctaattgagaatgtcaacctgggcactgggtaaaaccctaggtgcccaagttggctttcgggttacaggtacgtgtaatttcagcttccaggccttggattaagttttttcatgtcttcatggtacagaatactaaaatttattgagttggattcaagttattgaagtccgaacttccatcccagagatcccaaagtcaatctgtgcgcaaggctaagacccctcctaggtcgattgctatgactcgggtctactcaactccatgacatcatccttcattccatgtgtcaaacattgatgtccacatcaccaaagaaagtttgcaggttaacatttgcccccaagttaactttacacttatgtggagttgacttaatcatgtgaactgagcccgtttcgcttgaaactaccagataggcatcaattttgacattctcaggcacttgcatctgttcttcaagaattcctaaatgaattaggactttgaacacttttgcttagtccttgggaattaggggcgatggtatttcggcaagatagtgacgttttatgttcggctgctacccctatctcgggtttgcttgaacctcatgtggcaaaggctttttctcttctccatgggcttctcctttgtgtgcgattgggatatactcatgtcaatatattttctaaatgtttgcacctagtgaaatctctttcaaacaagaggaatgattgcaatgagtaaggtattgttcttactaatatccttcacgtttgtaagtctttttctcatgtctctatttctcattgtaaccgagctagtaatgctcttgcccattgtctagctaaattttctctttcattagaaacttcttgagtttggtggccaagttttctgcccaacttattttagatattttatgcttgtattgatctcaggttgttgagaacaagagtagagagaagctaaaaaccagaagtaaataaactagagtgatcttattgatgaagatgaataagtgacactgattatacatgacaacttttatatacaaagctaggagaagagaagttagttaaagtagggagttagttacaataagattcagacaactcacaataacagaaaaataactaactaaactatctgttgggttttatgccc

SEQ ID NO: 114990 - DNA, 1541 bp, Cannabis sativa
tcacttattaacaacagattgtagagagaaaaacaatcatcatcaaagactctctacaatgaatggggtgacacttagcctaggggaggtaaatggttgtgttatatagatgacattacaatttagttagttaggaaatttctaactgttgtaacagaaagtttaaggctaagtgtgagttgtcttgactcgggtttaggttgactttgagcttggaaagtatagaccactccaacaaattcacctttgtactataacttgacaagcttgcgtcttctgcaacccgaactaaaacttcaacttcactcaatgttgagtaacttcagatagtgtttgaacttctcacatgtaacactcttagtgaacatgtttgctaggttgtcatgagtgttgttcttcttcacagctacctccttctttgttatgacatctctaataaagtataacttaataaccatgtactttgatctcttatagaacatgggtttgttcattagatattgtgcaaactggttatcacagtacattattatctcacctgtttctaatccaagttcttttgccaatcccttcaaccataaggtctccttaactgcttttgttgctgccatatactctgcctcggttgaggacagagccgccactttttgtagaatagcctttcagctgacacaaccaccaaagaatgtaaaaacataacatgtgagagatcttctagtattaatgtcacctgcataatcaaaattcacataccttgcaacctctttttatttctggcatcacctttgaacactaaacccgtgttgatatggtgcccttcacatatctcatgacccatttgagggctgaccaatgctcttcccctagatctgcaaggtatctgctcaccatacttatagcatatgtcaagtctggtctagtaccgaccatgacatacataagaattctcacataatttgcatatggaactttgtccatgtaacttatttcttcttctattttaggtgattgagataggaagagtctgaaattttgagctaaggggactgaaattggtttttcttgatgcgtaccaaacctttcaattaccttctcaaggtaattcttttgtgctagcttgatatagtctagtcttcttttgatcacatcaattaataccaagtatcctatttgcttcttctagatttttcatctcaaatccattcttcaattcaaattttagattttgaatttgttctttgtctttttaccctataagaatgtcatccacatataataacagatttatgtgattgttgaaatagatacaagaatcatacttgcttttattacaaccaattttagtcatgaacacatcaatttgatgttccattgtcttagtgcttatttcaaaccatataataatttctgcagtaaccatatctggtttgaatttccattatcaattccctaaggttgcaccatgtatatcttctcttcctattggctattgaggaatgtagtcttcacatctattgtaacgtccccgcttcaagcctcca

SEQ ID NO: 114991 - DNA, 4365 bp, Cannabis sativa
aatgaggagtttccttagttacataaattatcttaaatccgattgagatggaatattcaatttaatgatttaatttaaagaaataaagaagaacgcgcacacgccaagtctccacgcgcacatcctcttctctgatctgacctctcttttcttctttttccatcaatacaacgatctcatcaaacccctcattccttttttcttctttatcactttctcacccttgattttctccactgccaaacacccaactcctcccgatggtgccaccggcgactcacggcggtccctccccgccgaaccctcagttaacccagcagttcttgagcaacgtactctcccagaggggcccttccgccctcccttactcggaagatacaaaatggttgattcgccagcatcttgtgtctctcacctcttcttacccttctctagagcccaagaccgccaccttcactcacaacgatggacgctccgttaatctccttcaggccgacggtactgtcccgatgtcgtttcagggtgttacatacaacatccctgttgtcatttggcttatggagacctaccctcgccatcctccatgtgtttacgtgaatcccactcgcgacatgatcatcaagcgccctcaccctcatgtcaatccttcaggtctggtttcgatcccttatttgcaaaattgggtttaccctagttccaatcttgttgatttgtctaggaatttgagtcttatgtttggaagagaccctcctctttactctcagcgtcgccctaatcccaattccagtcccaatccaaatcccaaccctaaccctagcccgagtccgagtcacgggtctagtttcggaccgagttcgagtggaaattcgttgaatttggggccggcagtgtcgtccgggtatacacggccagcaattccgccgagggcttatccgccatctccttacggtagtggaagtgggtcgtattctcggcctcagagcgatgatccgacggaggtgtacaagaggaatgcgatcaataagctggtggagatggtgcacggtgacgttacagggatgagaaaggcgagggaggcggagatggaagggatgtttaatgctcagggggttctgaggcagagagaggaacagttgaataccggggtgaaggagatgcaatctgagatggaagggttggagcagcaattgcagatggttttgatgaatgctgatattttggaggcatggttgagggagaatgaagggaagactaggagtttggagaatgttgatgtcgatgatgctttcgaatgcgtcgactcactctctaaacaaatgcttgattgtacggcaggagatttggctgtggaagatgccatatatgctttggataaagctgttcaggatggagctattccctttgatcagtacttgagaagtattagattgttgtctagggagcaattctttcacagagctatgggagcgaaagtgagagctacccaaatgcaggctcaggttgctaacatggcttcaaggatttcacagtatgtttcttgaaatttccactgtgagtgtgaattttgctgttatggaggtcacttgtaatcactcgcaagccccacttacgctgctgaatcaaaacggttgatattatgaaaaccattataatagttttgaggttagattcttgtgaaaattggtctatgtatttttgattatattataaaattgtatgaataggaaaaatagatatcttttgctgtaagaaatatgtcattctgaataatcatgaggcagggcgcgatttttttggtcttatatctgcacatcatatattgtatacattcattatgccatagatgtggtatttaggtatttattacaaggtctattgtttccttacatagtgcaaaaaaaatttatttcactgttttgcctatataatggttatagttggtatttgcatgtgaatctcttgaccagacctgcccaagtaatagtctaataaaatccactttcagaaaattttctagctgaattcgatattgatgaggcatgtgtttggttcatctggaggaaacatttttaggctctgctgattattttagaaaataattgcagctatccagttcactatcaacttatgtgtgtcatttttcatgtgtacatggttgtagtttgtgttaatttttatatatattttttattattctcatgttatacgcatgcttatttttcaacttggtgtgtactgttatatttgatcatttcaagtcctagattttttagtttaataaatatacaatggaaaatcacgtagtgcttgttattgtgatgttaggcaccagtcctttataacagaactttttcttttgtatggtctagcttataagctacagctatagactgccatgttgggtgtttctgtttttaggaatctgttaatgactgtttaagtcaaatgtgtttacgttaaagctttcattatcaagaacaaagtttttttcgttgaagtttttctcaacggataaattaactattcttagttaacgtagttttgaactctgatcatctcttgtaggaatgagagtactctgatcatctcatcgttatcataatgttattcaaacaggtagtactgaaatgaagtcaaagcctaacaagcttatatgtaattggtctggatgtggatgatacatgtttgatcggaaattgactacagttttcacttttcaatccttatgttttggcagaaatagtccattttgttaatattttgatgcattgtagtattttcgcccttagcccttaaaatgataattcagcttgttagttgagagagaatggaaaaacagtgaagcagagagaagaaaatatattgatttaagaggaattgtgtgcagattacaatatatatacaagttcaataagagcaatgagctaaacaaactatatactaactactctaactgatacttgtaactgatattgtactactctttgtgctgttgtcatatggctggttttaggagtaacaagaaactggcttagttagttttctgcataggacaaatctggtcgagtgatagttagatattggagtttgctaatgattttcttatacagttttggatttgctagagaatctttcttgctgtcctggctcaatttcagattagtctccataagtgtagtaacaggtttggatccaagatatccaatgtcttcaagcaattgaagagcataatgcctttgcgacacaaatattcccttgacagatcttgctatttccagtctaagaatatactttaagtcataaagatcctttaacttgaacctattattcaacctgtttttcaaatttctaactgatgtaaatcatttgatgctagaataacataaataagtagaaagatgaagctgttaccaaaaaacttcataaagagagagtggtcagtagcagaatggtgaaaaccttcttcaattaaagcattggaaaaattttcaaactattgcttaaaggcttgtttcaagccatataaagacttgttcaacttgcaaattgcattaggtgaaatctcccccttaggactatacccaagaggtagagtcataaaacattctcatgtaaatcaccatgtaaaaaagtattgtttacataaaattgatgtaatatccaaccattaatagctgctaaggctaaaaccaacttaactacaataagcttagtaattggtgcaaaggtctcaaaataatcaatattttcttgttgattatatctcttagtaactaattgagctttaaatctatccacactaccatatgcattaaatttgattttatagacccacttacatctattgcatgttgatgaggaggaagagaaaccactgtccaagtgtcattagcttcaagtgctacaatttcatggtccatggcattatcccattctggtatgccatgagcttgagtaaaggactcaggttaagtatagcttgaaatagataatatcagggctcaaaattgtggggaaagcccttaaagctcttaaagctctcatcctcccactcttcattaaaaaataccttttaaagctccaacaaaatctctcttcaagggtaacttctttgatctctctaattccattccttttgaggaaatgtctcttcttactgtcaatttagatcaaactttggctactattgttcacgagtttcttactactactgataataatgctagtccttcagtaggacgctctctttctactcctaaaactagagttactgattgtagaaaatagtgattcgaattgtgtgttgatttcatagaataatacatatttatatacaaagttaggagactaaatatctactaaata

SEQ ID NO: 114992 - DNA, 1860 bp, Cannabis sativa
  modified_base (34)..(47): a, c, t, g, unknown or other
aagttcatgtttaggatgttaataacatacttgnnnnnnnnnnnnnntcctggtaaaataattccaatagtattgagtgccaactgagaaggccttgatcagattgccaaagttatcccaccaggaatgtacaatttggcacacatggatgacacaatagtaccaagggcatggaacctatgtcacctcaagaagtattatcgttgtagactaaagacaaaactatcttttgtttacttgaattcataggaatcaagaaggcaacctgttgggtagcccaattactttcattcaatttctctttctcttatagaatataattgtagttactaaaatgacagctgcaaggcaattaaattcttaattaaaacaaatgagtgttgtattgaagttgtattatcatgattcttcacatattttgaaaataatattctttcacttgttataaagagaagagaaactcaagtgtacaatgttatgaataatgttatacacttgggtgggggggcaaggagaagaaaagagaaaaaaaattctaagtaaacaaggactagctacccttggctgacaaaagaaatacacttcccctcgtaaaagtcacttggccaaaggaggtcttgaaagacactcatggccttatgttaaaaggagagggatgcccctcaagagtaaacaaacattcacaagcatatacaatagtgaaaatataaattaagaggttgtagcacgttcaaggaacaataagctcccttacattcgaataaaaggataagtaaataaaaagaggttaagacctctcaaagagtcaatgctccctcaaacaaaaaacctacctaccttggtagagaccttatgaggtcttaaaataagagagagattagcaatcattcagccttgggtaacttaaagtaactaagccgtgagtgattgcgaaagcccatcgatcaaagagtaaccctaagtgttactcagccaaggtcaattccaaaggtcacttcgccaaaagtgacaaaagtcactcaacatttagtaatccaaagtcacttgaccatgagttatgacaaatgtcactcgactcaaaaataaaataaaaatgaaatgagagctagctgtcaagtgatgctggaaggagggaagtttcccacatatactaagtgtttttttaaagtacgtgaaaaagggaaaagttgacaattcaactaaaggatactaggttaactagtccacaagaacacttaaaagaattcttacagactatgggacaagtattaaccccaaaagtaagcgctgctaactctcgatgttcgattacagtgaattaagatattagcgaaggcttgctcaacaagatcaatttacatagactttaaggaagtcacgttatggggaactcaagcatgtcactcaacatgcaccatgccaaagccactcgacatgcacatttcctagtcactcgacacgcatctctcaaatgtcactcggctagcatgcatgcacctcactcaacatgcatcacactctccatgcaccttacttggctagcatgcatgcacctcactcgacatgcacctcagtcaccatgcatctcacttagcatgcacattgttgggtcactcgacatgcatctcactcagctagtatgcatgcatctcactcggcatgcatgcacctcattcttcatgtacttcattcgccatgcttctcacttgacatgcatctcattcagcatgcacattgccaagtcactcgacatgcatctctcaagggtcactccgcatgcacctcactcaactagcacgcatgcatctcactcaacaagcatgctgatgagaacactaaggctaaagatacaagtaaagt

SEQ ID NO: 114993 - DNA, 2453 bp, Cannabis sativa
aggagacatatattccgctgcaatcactctaagctttctcatactgtgtttatttcatatcattttagaagttcatatttaggatcttaaacaacatacttgttagtaaatctaagatcatggtaaaatatttccaacaccgatccaattcaaaaaatacaaggactaaaatattagatacatttgaaccattcaaataaatatacaagaaatacatccaatgaatagaatcgatccaatcccacatctaatcgatgttgggtcgatcaaattactaaaattaattagattagatcagatgataaactctaacatctaatatataattggattgaatctggataggcctataaatattagatgttgtccaataaatacccctagttacgagaaagtgactatgaatcctaaaaatttcattcgactttgcttatggatagattggtcgatctacttggacctagtgaatgagcccatgattcttaatgggattatttgattaaaataacacatgtagtaataaataataatcaagtaagttttcgtgactctcaatctattcatgaaatctctaaagacccaggttgttcacagcccagatgcaataacaaatccggatggcgattgcaagcctctttgactctctagcgccgaaggtggggggtaaattatctctatttctgggtaggtgacacatgtatatttaaataagcccattaagaatgacgacccattcactaggtccacgtagatcgaccagtctgcccataagcaaagctggatgaaatgttcggatttgatagtcactttctcgcaactaagccaaatatgtgattccgtaaggcaatcacatatttagttaaaaaagtttagctaattaaataattttaaatttctctaatacacaaaataaaaaaaaaaaataaaaaaaatgtgtattataacctcacaaaaaatgattcaaatacaaaaaataaaataaaacaaaacaaaactataaagtgaatgtctaaaggattgaactaaggacttaccaaatgtgctacaataacatggttatataaatagattcttataatttatattttattgtgtatgacatataaataccaattatgaaaaatcttaaaagaaaaaaagatttttaataaaaaattaattatgcgttgtcgaaatgtgatagtttatgacaagtttagatactgatgggactacatgtttcatcctgttgtagctcatttaggtatcttttttgtgcatttttggtacttcttgcaatatgtggacctccaaatatgggttctacgtggcagaaactccagatgaatagggattgcttggtctgagagcaacaacaggtcttgccactggggcttttcgtaccccttgaggggcctgtataactggagcttgtatttcatgagcttgcaaaaaacctactctttgaggaggatttacggctttgagatatttaggaataaaaagatgtccatgtgctactccttgttcgagatagataattagtatcgtcacccaattggataaatggttgttctgggctattccttcgattttatcctaaagtaactacattcatttattgtgtgcccaatatcatcgtggtatttacaccatttactctgattctttttgtgttttccacccttgtacattggtagaggctttctatagtggaccatatcacaagtagttttataaacagtctcacgagtatcgatcaagctagtatacttggagtatctggactcttcagttttccctttcttcgaggattcagtttgacttggagctttggatcctctcttgccccaagaataactcaggttcaattctgaaacttttacttgttgttttgtttgtccaggagcagcactgtatccagtttggccactccaaagctagagaaactgacttttgcaactagttgtctggacgtacctggtccacatactactaaagttgtaaatgtgcttgtcgaagaaagaataaatggagaagacaactgcagagtttgagttgttgtagtgttggtggttggtgatggaagtacaccataagcttgagcataagcatctcccaagttaatgaatccttgggctttggataagaagtcagatagagaatctactctattccactgaaatgatcctcatagtaaagacccagtggttattgctgatgttagagccaccatcttcatatcatcagtaacatttgtctttgtagcagcatccatcatacgctaaaagtacttcttaaggctttctcctgtttgttgcttaatatttgttagagaattaacttccaggtcaaaatcatttttcgttatgaattatatcttgaacattatctgcacatccttccagtcacaaacatatccaagagataatcttttgttgggaattattttaccaggaccttagatctactca

SEQ ID NO: 114994 - DNA, 2099 bp, Cannabis sativa
  modified_base (2051)..(2074): a, c, t, g, unknown or other
taatttaatgggccaatttatagtcatttgggtgcttccatgtgcctcaaatgcagataataaaactgaccatcccattatggtcctaatttcataatcgacattatacgatgcatatagttatccacatatattaatattgacactctatgagcaacacttatttatgtaagtccatataaaatattctaacactataaatgttcttggcagttcaaaatatgtcaccggtaacaattggattagttcctagcttgatttctattcatttttgacatgtcttcgtagtttagagtagtagctacataataatgaaataatatttcatttaactaattagtggtgtaccacaattcaagttacagttgtcaacgacagtgagtcagataataaaataattaagtaacgtaatcaaaaaagaacaaaacaaataaagtaaaatgaacactagattttaaaaaggttcggtcccgtgattgtggtaatagcctactctccttatattatattgacttaagagaaggaacgaagtgttcttttccttaaaagctcttacaactgatctctaagtgtgtttttctcttagatcactcttttctttctagattatctctctgaggcaattctttcgatccctttcatagtgacgtgaggtcactatttataggggattaatacatgagggatggtttttctttcgcttacaatgcacaaaataaaaaattacaattattctataattacaatatatgaaataagaaactagaacaggttgtcatttttctctgattcaatcccacaattataaggatcgccttcgtgtttggacacaacggtattattctctaaagtcactatttcttgtaagtttctcagcgcaaacacgctttcatctagtcaaattcttctccacaactttgctcggataacatactattatagatgttgactagtcatgtgcaggttgctagggatattttcctccgcctaggtatcaaaaatatgggacacgtgtcgtttgatcctatcaccacgtcaatgtgcaaaaagctgaataacattttccccccaagtctgtgcaggaccatcctggtcgaacgtggacttcactcaacctggagtcttatctagatgggtgacgcgtgtcctaggcatcgaatgccgaaccgatatgaccctgaccaggggtctcttcaattttggatcattaatgctgattgacagtcttgccccgaatcacacctcgatgtctggacgtgttgacagttactctgcctgtaatgagtacataacatatacttttggggggaattggaggagtttaaatttttgaaatgattatttccctttttcgaactgcttataaataggattgaaaaacctccaaagatccttttagccattttcgttcttgaaaaaccagagcgaaaaattcttaggcgaatttttctctcaaattctacgaaggattcccatgaaactcttgaaaacatcatccgagcagaacaaggagcttcaaaccagtgattaagttctttatttctttcttttacatatttgcatgcttaattttctgggtttttggccatggatcttgactgttcttaaactattctaggatgacctagaaatcttaggttcaaagtttagaaatcttgattgtgcttaaccacgatgtctgaatttaactatgctttgattttaaccttacaagatccattttcacttatccattaggggtatagtgaaaatcaaactccaattcgaagttttgaacttctaggttgaaaattctatttctgagtgaaatttctacttttgattcctcaatcgaacctggttggtacattcaacatattttttattcattgctctgaccaattctcattttcttctctcttaccttttgtagatggaacactggtgagttttggggaagcaaccaccgtatcgaccatgatctgcttcaacttttgtatgaggatcatcctcgtctctagctttgaagactgggaaataagcagtgaacacactgttgggttttatgcccnnnnnnnnnnnnnnnnnnnnnnnnatctagattattcaatatcaataaa

SEQ ID NO: 114995 - DNA, 1741 bp, Cannabis sativa
  modified_base (1664)..(1671): a, c, t, g, unknown or other
atttttaatttttttaattttagttttgccggcgactacactcgctggcaaaaataagacgccaaatttcaaatcctcgccggtaaaacgtcgtcagggacacatcagccggcggacgtattgccggtgagtcccatatatcggtaaacaaatgtgccggtgtaagtacttttgctggcgcaagtcaccatgtcgccaacaaaagatcatacgccgacgagccattgctgacagcttttgccgacgacaaatggcgccggcaaaactttgccgacgagttacacgtacttttgccgacgagcttaagtgctggcaaaagtacctttttttgtagtgattacaaaaccacataaaagttcttaactcaatttagttttcattataatctagatataatttattacatattaatttcaagcattaattatcaagcctcatttatattaaaaaaatttatttattaaatcaatatatgaatatttaatattggaatgcaccaatactaatatgatacctttataaatatttaagaatgaatatgaatatgataaatgaaggctgtcctttagagttgcacattaggcgggtttgttcgattgtgttcaggtttttgggtatcaggtgtagtaaatcacatctcgaacacacccgttataagattttgggttcgggttttaccgagcgaacttgaaaagtgtaaaataggttcacgtgtttaaagtggtttgtgcgtaaatggaccgatgaataacaattaattaatataaacataaaaactacaggggcttctacaatacactctattaaaatgggtgtagtgatacaacctctaattgtttcaatatctataagaatttttttagtctaaattttttcagtagtcgtgtacggtatagttatttaagacattctgtaaaattttgagaaattctaaataatttacaatatagaaatcaatgtttaaatcatctatttcacacgcgtataaaatttaaaaaaaaaaacaaaaaagtcacgctgcacaaactctttgaacactgtttttgacatattaattttttttgaatttctcaaaattttaccaaatatcttaaataattataatgcatacgaccatataaaaaaattaaactaagtatttttctatataccgaaatagatcaaagtgcaacgattttaaggggtatattaattgtaaaattttccaaaacaacattactttaaaaaatttacacaagatgtatgtaagtactcatacattcaaattaataagagacatcaagtacatttcaaattattccattagcaatgtgtatcaaaaattatttccttcttctcatgaaagattctgttatgctgagttgtggaaccggttggcaattccggaacaccgtcttattatttggctatgtacaccggctaaaaacgaaggattgggcttgctaattttggtatggacatttgtgggatttgtagactggaaaatgaggatcacaaccaccttttctttaattgtgtgttcttactaaatcattttaaattgtggttgcatatccaaacttcttttgttactcctgagggtcttttaagatcaatcaagaggtgtagattgaatttcatcttaaaattgttgccgggcttgtatataatatatatatatatannnnnnnntatatgggtgactattcaatggttgcatttttattgtaaccatatggttacatttttctttgacctgtaa

SEQ ID NO: 114996 - DNA, 2753 bp, Cannabis sativa
ttacataataattattaaattaaattatattatttataataagactttaaatgaaggtaaatactattggtgctaagccacctcaacttcatatatagtgactcctttatgtgtcagatatatagtgactcttcagtacttataatagtaaaagtgcaaacaatcaagagaaataaacaacaatataataataacaaatatatttataaaaggagatgcttttttgggggattcgttaaaataataatcatgaatataaataataatcatcatcagattccattattttattaagttgaaaattaagctcttaaacaaaaatatcataattaagagagcacacatataaatacataatataaatataaataatataaggtctcctcctagctagccagaccaagcttcaatttttattataattatggcttataaggtgtatcctagagttccttctctctctccctacttgactccagaaagagaaaaattcaccatatggatgaaatcactcgtcttccaaaccaatggttgcacagtttataactccaatggacaaattgttttcagagttgataattatgagaagaaatgcagtagtgaagtgtatctaatggatcttaaaggcaaagttctctttaccattagaaaaaaggtatgagtttttgttttgatcatatggtgtttgttaaaagttccattagaattatttgttgaactcaactgggccttcttgatttttgcagaaactacaagcttttggtggttgggttggctatagatgctgtagtaataataatattaatgatgatggtcagttagagtcatcagatatgatgaatattagtactgaagaaaaaccatggtttagagttacaagacaatattgtaaaatgcttatgggagatttggcttgccatataagtgttggttgtgatgataagtatagaattgtgagaatagcaggaaaagcagttggcttcagaatagtcaaccttgatggaaagattgttgcagaggtgagattttactgtcttttctgggtatgcatgtttcactttttttttttttttttcttttcatttgagttattattatacaatattaacaatttgatttgtaattaattacaggctaaacaaaagcagtcatcttctggggttgtgttaggagatgatgtattgtctctggaagttgcaccttgtgaagatcattctcttataatggctcttgtcatggtctatggattaatccgtagaaaaatgtagatatatatatataattgatttgatacagtatgagttttctaacccctgttcaagtttcggttgtacatatatatattaacagagagcagaaattagagcaattgtaagtacagatgataaattttttgtttgagatgaatgaatgaaaccaaattaaggctgattatgatcacatactgtatgtactcaaaattatttatcatcaaatgttaattaatttctttttgaggtttttttcactgttttgtgcatggaatattaatactctgtcaaaaatgacagcatgggaaaaaattgttgcaaaaataagggtcaaattatttgttccatttaaattgatttttatcaataaaatgataatgagtcatgactagcacttttcaacaaaaggtagtcagtcctatgatatgaacttttgtaattattttattgatagtgctagtcatctctaataaagtgaaacctgcaatatattattattaaattataactaataattaatctgtttttactgatgataagaggatatatatattagcccagccatatatatccatctacatagtactatccataaaattatacatgtatcaaaatcaataataattagtgcatcgatcccactacaaataatgatttctaactgttaagcatcattgagcttagagacgaattatttaaatttcttatttcttatttttttttaaggattatattaatttcttattcactattgagtaataattcatattcttacgagttattattattaggatgaggctaaaatattagtggatttttttagttgttattaatcatgatatcatgagtggacctgattttttttttttcttgttcttcttttatcttcttttatacatttttatacatattttttttttaaaaaaaaatatcatcacatgtattatacaatgtaattatcatatattttgtattaaccctcaaaaccatatatcaagactacatgtctttctttaattctcaccatgaaaattataagtaaatttctgaaaacatattgggagataatggattggactcattcgagtataagaggacattaaatatcgatttattatttttatttttctatgaaataaaaattttatttcaagaaataccctaaaaaattcctcacatgtcctacaaatattaataaataattttgaaggacaatgagttgttacactaaaatataatataattaaattttattttattattggtgtatattaagtaataagcatttcaatttttactgagtaattaaaagtgtttgaattaagtgtaatgattatataggttaataattaaaaataataattatataacatgtagatttagtacctacatatcaatttttattttattagagttagttccacattgctaatgtgtggaaataaattgtgatatataaaatgaatgggctactcctcccattgccaattggttttgagatgg

SEQ ID NO: 114997 - DNA, 1511 bp, Cannabis sativa
ctcgaagatcaatttctggctattgtgttttccttggacggtctcttatctcttggaaatcaaaaaagcaacccacagtctcaaggtcttctgctgaagctgaatacagagccatgacaaatgcaacatgtgaactcacttggctccacaacattatcaaagatttccacattcaggctcaacttccctccacactcttttgtgagaattctgtagcaatacacattgatgaaaatccagttcatcacgaaagaaccaaacatgtggaaatcgactgtcacattgttcgtgaaaaagtttcaaatggcaacatcaaaatgaaccatgtctcctccaaatcaaacctatctgatgtactaacgaaacccctatttccagcattattcaaggacattgtatccaagatgggtgtcaaaaatttctacactccatcttgaaggggcctattaaactgtttgttctgttattttgttagttatttcggttaggtcggttagttagttgagatcttgtttagttcattttgttgcctatataaaacagcagcttctcccttgtattcattcaacacaattcaataaagaaatactttcaatttctctgtttctctgttctaatagaacaagactctttcacataattatagttacaaatttcaaaaatcacgacactatcattggtcaaatatacaaactcactttcgtatattctacttctttattcttttatttctatcacattcatattctcttgattagtcttttaatattttaataatagttaatcatcaaatttttttaagattagaaattaatttctgatcaaccccaaacgtctattagtcacatataataatttattaattgcactaagaaataaattatttggatgagacttgttattggttggagactatctctccacctatttactctgttattgtaaatgactctcttctttaatttataataacaagtattttctctaaaaaaaaaattatttggataccatgactaatcatgataaatgtaatagataacaatttgttctacatctctcaactcgaaccacttattaggatacatgattctttttatttaagattatgaatttatttaattaataaaaatatttatttttaattaaacaaatgatactttaatacatattctgtatatgcattaaattatttaattttaaattctaataatttgttttaaataaaatgcacattgtcgttaaatggattattaatattctcttaagtatatttattactcacactcaaataaacaaatatctttttgtcttgtgcatgtacataagtttaagaattaagacctaatatttttcttatgtctaggaattttcacatattaaattacctttggaagtattccaaaagtttcacaattattaacaattattattatgggaataattacataagacacaattttttgtaaaatatttatatttttaagttcaaagaatgattttttttttttttt

SEQ ID NO: 114998 - DNA, 2821 bp, Cannabis sativa
gcactgatgaatcaagggacattaacttttgaagtatataatcacaattaccttccactgtgttgacatcactgtaattgtgaattactatatgttgtggacttaacaaaaattgtatacgttaaaccatatacatgaaaaatacaagtaaatataaatgacttctaatcttctattgataacaaatcagattagattgaaatagattttatttagggcataaaatcccaacatatctttcatgacacctatatgtattaaaaatcttatcaacattgtcaaaataaggaagtttaactatgagaaacatgatgtctttgaatcctattcttattgttaaaatatttgatgttgggacattaattttatggttccatttcctaactcttttggtaacttatatattcctgttgttgttgattatgtgtctctgtgagttggagctattgcatgccatgcaaatgaccacaaagttgtgcataagtttttttttttaaaaaaaaatattttctcatgattcggctcaccacatgctatcattagtgatattggtatacacttttataacaggccttttagcatttaataaaacaatatgacattacacataaagtcactacacattatcacccacaaactagtggccaagttaaaatatcaaatggggagattaatcacatcttagagaaaaccgtcaacccaactaggaaagatttgtccttaagactcatttatgtattgtgggcatattgaactgcttacaaaacgctcattggaatgtctccctatagacttatttatggaaaggcataccacttacctgttgagttagaacatagagtctattgggcaattaagtaactaaattttttcttagacaaagcaggtgagaaaagaaagcttcaattgaatgagttagaagagcttaggattgatgcatatgattattcaaaaaattataaggaccaaatgaagtttaccatgacaaaaatattttgagaaaagatttttctcccagtcaacaagtccttttatatcattcttgtttgcgtctctttccagaaaagctatgctatagttgggtaggtccatacattgttcgcactatttttttacatgaagccattgaaattaaaaatcctaataatgtcattgtattcaaagttaatggacaaaaattgaaaccatttttagaattgaaaaatattgaagtggatgaaatcctctttgaggatcctattttccatggtccttgatttctcccgttaattcttggtaatgtgtatttttttttttttttttatgttttagataaactttttattttaatttttgctacctttttgttgctcttgacatgctttatgatgaatgaccgttctaaactctcaaatttttgactttcaatttatatttatattttgatacattgaggacaatacataaattaagtttatggtggtgggttcctattgttattttcttcatttgctttaaaaatggtagagtatttctcatttttttttttaaaaaaattattgtttggatgctaaaatagttatattatatatttatatatattaaaaatatgtttaccattatttttctagtaaaaaaaatcaaaaatatatttatttgctttcttttatttatatattttcatcttccaaaaaaaaaaaaaaaagctcttttggtgatatctttttttcctatgataatactcatgattgagtttgattttagtttataaaaatttgaatctttcttaagctttgtgtttaattcttgagtcaactttgcttaaaaataaaatttagaaaaaattattcatcatgatataaatattttattacaaaaatttttctaaaatttacataataatttgatgaatagatatattaataaattattcaccattggaaaaaagctgagacagagaagcttctggacaatcggcctgagaatgcatgccctaggtttcgaaatgcctctttaaccgtcatcgttgccgtcgtcgttgccgtctatcggcgttcaagtccatccgtgggttcatccatcgtgtgacggttccgtctcgagcatagccttcttctcactgaagcttttggctgttaggagacagactctaccattcgagtcctttgtcttcttcctcacaagtaaacctctaatctgcaataacttttggatttgtgtcccatctgcgattaaatgtccactgtatcgatctcttcatctttttaatctcttctgtatagaaaatcccttttcagcttgtatattaattaaatcccatccccctgaaccaccttggcttatgattacctctaccttcgtagagaacgctagaaatcccgtaggagccactgtcaacattgcaggaacaatcattcgtttacctgacatgaagaggttttccctggatgttatgttgccctagtgatactaattttataccctaatcactataaaactgaatatcctctgctattcactgtaacgaatattttcctgcaaaatttccttattggtattccttatacagaaatatccctttccttttatagctttcgtccttcctgttgccactgcaaaatggatgacttgtccaacactttgaatgctaccctcaaccttactgatttagaaacccaaatccactccttctccgcaacccctgatcgccctaatgatgatgaatgcgtttaaccctcagctttccttgctgtgaagctgttgaccaacctgttgggttttatgcccttaataaaactccatttcaatgtaatccagtctattcaatatcaataaagtaaca

SEQ ID NO: 114999 - DNA, 1909 bp, Cannabis sativa
aaaatagttttaaaaaacttgtgcaaacaccattaaatttttaaatgacaaaaaactattttctattctcacttttaaaaatacaattttaaaaattgaaaactgaaaagacaactctaaatttacttatcattttaaaatagatcataccataatcattaccttatttaaaatgccataaataagatgtagattgagagtgaaataacactgagggtaaataaaatatataattttccactgattgattagtggcggggtgaggtaaaatgtaattgtttcactgaagatataataaataaattaatgaaaagatagatcaattgtggaaatattataagcatagaatatgagtattatttagggataagttgaggaataatttttttttttttttattcattaattaaaaataccctcatattatattttattaaaatttaccaacttgagtgggttgcttaatatatctttgccctacacttaagtgtagtacatgatttactagggacatcatctataaaagtgagtatatcttaaagaatattaaaatgaagataaaaataaaaaaaataaaaaaaataagtaagatgagtatacaatataatttcttttatttattatttattggacaaacaccattaaaatatgttttctattctataaaactaaaaaactgaaaactcaactaaacttactctaaattttatcatttatcattttaaaattgatcatatcagaatgattaccttatttaatgccataaataagatgttgattgagagtgaaataacacaccaagggtaaataaaatatataattttccactgattgattagtggtggactggtggggtgaggtaaaatgtaattcttttacatgtgaaattataataaataaactaatgaaaagataaatcgattgtggaaatattatatgcttagaatatgagtattatttattcgatcatatttattaatattttttttaggtatatatatttagatttgatccaattatatatttgatgttatatatattttatcatccgattgatccagttattttattggatgttgaattaaattggttctatccattattaaatatgtatttcatgtatatccaatatctaaatattacattgataataatgtattgcattaattagaatttacctaatattttagatcgagtactatttttagattgtgtcggaaccctttaatttttttagatatagtatttattggatttggataatcaaaaaaagtaaattttcaatattaattaattatccaatccaataaaataaaaaaagtaaatttttaatattaattatccaatccaataaaataaaaaaagtaatttttaatattaattttcatatatacatatatatttaaagtatatgtaacaatataaaatttaattacttatttaacttaagaaaatactaataagttcaattggatattgggtttttggataccccattcaacatccgatctgatccaattatgtattcaaaaataacatctaattcgatttgatcacaattagatatctaatatttgacggtcaattataattagagtggtcagttataattacattggatcaatttatgcacaccctacctaagtttatatattgctttacaatactatatatatatgataaattttgaatcatttattttacaaaagttactaatcaaattcactatgttattataatataataaatcggtccctatatttttttaaatggtacaaaatagtaccatatgcttaattttcatcaatttttttaatgtaattagtaggggtgttcatccgatccaatctgtacttttttggtcaaacaacattcaatccgcactaagtgcggatttcatattttggat

SEQ ID NO: 115000 - DNA, 2094 bp, Cannabis sativa
  modified_base (1352)..(1356): a, c, t, g, unknown or other
cttgagacatacattgttttggatttcccattctatctattattagtatatactttagtacttctgcaatgctttgtatgcttgctaagtttgcaaaaagttttaattaaataaactaatgatcacacaaaactcattagaataattaggataaatttatgatgtgattactatagggattagagtatattagttatggttactatagggattcgagaatattgggtatggttacaacaaacaatgttagatttagtttgcactcggctctctgtgaagtgcgtttttcctccttgctcttctgttgttcaatggaagtgagaactcataggcaataggatagagccagtgaaagtaaaattaatattagtggtaatgatactttctattcttttgttgttaacttatattggtagttttttctttttgcctgtaaaacctagttatgtcaaaaagatccatttgaagtaggtcggagttttgaaccgacgaatcatttttgatctgaaacatttggatacttattggattttggatcaaattcgcttagtctcgcctatttttttttttcggatcgctgatctgtctttaatatattattaaaaaaaacttagttcaagactcagaccctggacccgaacccatatccccttactcgagacccagactgagactagactcgcccaagatccaaacttaggactggacccgaacttggacccaaacttggaactcaggcctgggatccagaccttgacccgaactcaggatcagacttgaactcgagactggactcggacacccggacccaaccctagactcgaactcgggacccgggacccgatttggggccctgacccaagtcttggacctaggaccagacttgaattctgggacttggacctggactcgaacccgaacctgacactcggacccgagacttaagacccgaacttgagaccaaacccggacacatacccagaacttagacccaaatttgggacctaggacccgagacccgagactagggacccaggacctagacccggactcgaacccaaacccagacacagaattatggaccaggacccgttctcgagacccgtgacccaaacctaggactggacctagaccgaacccaggacctgaaactgaacccgaacccggacttgggactcagatttgggattgggacccaggatccacccggactcagacccgaacctagaatcagacctgacccgtagtggtgttggggtcgagtttattgaaaatatattatctttacgcaatttattaatataggtaaataccaaacatagtattatattaaataatactaatacaaaatnnnnntagatataaaattataagtttaaatataaaataaaaattcttaaaaaaaatgccgggtcggatcatatccgatctgaataaatcgggtcagatttgattcgatctgagtatctgatctagcagagcaaggcgaggcggattcttacagattttcaggtcggatcataacctgatcaaatccaactaacccatttacactccttgtatagtaataccataaaatacaattgagctatacataatgcattgctagaacaacactacttgatagagatacatttttcctaaatttatcattacagtgactactgattgctctaatttagcaacttctaactcctgctccctagattctagttttgaaatgaaaataaatgagcaggttttagtttgttaatttgttggtgaaatttgtgctttgtaattggaaatgtggtgagaactggggcatataccatacaagattgactagtatatcccattctaataagtcactgctggttttggttttaaggtgtgttgttgtgtattttttcttgttttagaattttacgtgggtaagattaaattttttaacattatgttaaaatataatattttatttttttctcttccacactatttttgacactctaatgatataacacttttcaaaaatgctataattataatctcacacattataatttaataagaaatactaaaaagcatcagtggtgcctagcaccattttatgtg

SEQ ID NO: 115001 - DNA, 3666 bp, Cannabis sativa
acatagcacccgtgagtcacaaggacccaaaaagaaaagtagtaatacaatatcataaatcattattcaggtatccacagttgaactcaataatcataatcaaatattcgtacattactcgtatacataagtcgaagtcaatgaaaacactcgatcaaaattaacatcagtataaatatttagtaatatacccatactcatttaataatacaaaccatgtctattagttaataaaataaccatttttattgtttgttgaacaaaataagcctgatgcctaactcgacatcatactgttcttgtcattgcctaataagataaccttgatactagtttctagtattcaaatgtcacaatcattgtctaataagacaaccatgatacctaaataataatgtcgccttcaaactagacaacttagatacctagccaccagtatccctgacatgagaaatctaacaacaattttgatttatagtcatgaattttgatacctaacctttcagtattcaaatatcattgtctaataagacaacctaatcatcattgcttaataagagaacattttcatcattgcttaataagaaaatatttttatcattgcctaataagataaccatttcatcattgtgtaacaagacaatattttcatcattatctaataagatgatattttcatcacatagcggtaataactctattttaatctcaatatcaatcaattcacaaacgataataattatatcctaacataacatgttatgtagtacaaatataccttttttttttaccttaaattctatattcatgtatgtcggccaacccaaatgaagaaacgcctgacgatcctagcccttagtcttcataacaactttgaatcagctcctacctgaaaattagatggagaatagaggagttgtagtcgaaaaaattggtgctcacccttggctcttcttggccaagctttagggagagaaaaagtaatgatgagtctgtgtttttttaagcttatcttcactaacttaacccttaagttatactaacttaagtgaaatgacaaaaatgccctcaaagctaacccttaaaaatttccaaccctaggagtatttcggtcataactaaatatcccaaaataactcaatacctcaaaatctactaaattttctagtaccaccaataccacacattaacgttgtgacatttctggccacctatcaggtctccatagttgctgaatctaaaaatattttatatttcataaatagcatgtatgttatccacatatgctaataaaatctccaaattaataaattacactttttaaatcatttatgataaaatttcctgaattatattagtaagattataatcttacccattataccttaattaatccataatttataaaatatgtcctaattaatcattattagatttctgagatattacattcatataatgattcattcctaatatccactttcaattaaactttaagcagttgtaaaactaatggaatctactatttgaacttatgtatctctccatcttatccttggagtttggtattttctcaaacctttgctcctaatttaacaaagcatatggtggatctatatttccaccagtaaagcttttacggtgacctctaccgcaaccactacttgaggggaacatctagtcgttctgaccacttcaagccttaactactataccatgattcctaccagattgcctaaattcacgatctaaaaatctaagcaagttaggggatagtcctaatcgtattcttataccgcataacatggaaacttaatcaaatacttattcaactattttactattaacatgcttcatatcatactttatacttatactatctcatttaaaactaccaaagcatataaaagcttactaaaaattgtgagtcgagcttgtctcagatgacgattgtacgtatctagcctatctttggagaacaaacctagtgactctgataccaaattgtaactccctactacctaaggtacgttacagtattttcttaggtattgtgctaacctttgctaatcaaagaattttgacataaagtgtgtttagtaaaaaaatttcaatataattcaaacgttaataaacataaacacttttataaaatatttataatctgggattccgaaatttattatttataaaatatacaaaatatccaaaagtgtcatctaatgacacaactcaaaaagatgtcagtggtgtcccaaagatcgatatccttcaggcttagatgaccagatatatacaatctttaccaagctcattacccaccatagttcagcatgatctttacctttacctacacataaaaatatatatgcgagttaatggactcaataagaaaaatgtaatatacacaatctatatctaacttgtaattgagcgcccatacactcaattaccataagtctactaaccgcgtccaatgtgtatgtctgatatctgaacgttcgtaactatagtataactaacaataataccaaaccgcactctattgtctagtcgttctagtgttggtagtgttaattaatactttaagcactactgatcatattagatattagtatcctggtgtaactctatggacaccatatcactatctctattatgttaactgcatagcaatataacatacatgtatactaaacatgtgtatgtgtgcatctgaatactattcgtacctcaattcctaatttaggtgcgttggtaaacttgagtggaaaattattcgatgatcgcaaaccctaagtcacattagtggtaaactggtaagtgtcttgctaaaatactttctagaacttaaattcacaattagaagttttcctatcgatacatagagtggcaataccataaataccatgaaaacacgaaaaatcaaggtacttaaaaaagtccccaaccgggaaaccggatctacaactgggtccccagtttttcgggcactgccaggacaaccggtaatttggttcccgaccaggcacccagattgttgtagagacagaaaactcgagctatttctaacactacccagcatgttccgagccattttaaactttccagaataatttaatatagcattttaaacataatacaatagcctgaagacaaaagtaaccatagaatcaaattataccattaaagcttcaagctttgagcttgaaacttagaatttttacactaactattatttcagctgcacacaactctaaataaagtttagaatctaatccaaaaccttattttaacatcaacaaagacctaacaaactactgcatacaatttctaactaaagaaaacccataataaaaatttttcttcttttctcttcaagttaaacaccaagtcgctaattcccaaatgttccttctttaattcccctttgattacttgaatttaagatgaatttgatgaagaatttcttaggtatttgttgggggtcaactgagagaaaaatggagagaaagaactgatatttttggtttttctttacttgggtttgactgaaggaggagagagagaaagtaagagcttgtttggttgtgttttcagttttcagtttttaaaattgtgtttttaaaagtgagaatagaaaacagttttttgtcattttaaaaa

SEQ ID NO: 115002 - DNA, 2943 bp, Cannabis sativa
  modified_base (2329)..(2336): a, c, t, g, unknown or other
aagtatatacctgccaaaaaaatttgtaaaactaaaggtatatttaacacttaaaatcattaacgttagttgtaatatatttttcaaattttcgtttctagatgtaattttctctttttaaaaatatcccttattctttcacaaggcccaatatattttttcccatagcccaaaactcaggaccaatgctatccttcttctagattgattttgtgtaaataatatacaatatcatcactaatgtaaaattatttcaatagtataataaattaacagacaatataaagactaaaagacttttttttttgcgttttttaaaaaaaaaaaaagacaaataattgttactattatagaaaatatcagaagttataagaatcttgaccaaatcatgaaaaggttaaaaaaaattaatatctctggtcatgaagtagagatattaaatatttagataacacctactactcattgatactatgacttgtatttattatgtatatttatatttattttccaaaaataacataaatagtgattcaatgtttgtgtatatttaacttctcttcttcaaatcaattacttttggtttgggcccaatatagaagatgtctccaagtattaacatataatttaatatgtggctaacaaagagtcctcaattacatgattattgaaatgaagattattaagatattataattgttaacctaactaatgttgaatttataatgaatattaggatatttgtttatgaaaattgctaagggcaccttaaggtgctaataggtctggtcctgagtataagtgagttaggtatgtacttagagcttacctatttaagagtcgaaaaaaaaaatattttaaaaatatatatttttcactgattttaaaaaatattacattttttttagataacggtctagtatttttgttatgacctattaaattttaaggccggtcttaagtactaagcaccacaaaatgtgtcaaattgctattgctgaaatttaatattagatttcatgtcttttaattttcatagtgtaacaatttactttaaacaaaatataagacaatataataaatatatgaaaagatttgtaagacaccgatattttgatagaccacttatatattgtcatctaaaaaaatttgtattcaattttttttcataatcgtgacgttgtcttctatttagaaatttttgaataatatactatgcagaatataatatttaaatagttatttaccatatttaagtcacatttataaaaaatatttaaattttattatggatattgtaaaatatatagaagtttttaaaaatttacaaaaaaaatatagagtattttttttaatattaaataaataagagatctaccgaggcaagtatggtaccatttacttactccaaaaatacactattcaattatataatgaataaaagaaagaacttttttccatgactagatcaatataatgtaatcctcttaaataattatattattattttataataattttcccattctagacagttctttacaatgatcacaattcacaagtccaaataggattataaaattataatttatctaattgtctcaactgcaattatgagtataaaaaaataataattattattattttgtaggttatatataatagtaaaatatagaaactaaaattaataatgaaaatgtgaaatagaattaagatggtaaaagacaaagaccacacactaaccaagataagagatagagaaaaaagtcccacttggtaggaggaaaagggtgtccaccatgtcgggtattatagttaatgtttgttttttgaaaatggctaaaagatagtgttggtgcttaatatactttttcattatattattagtataaataaatatcgggacatcaaataatttaataaaaataattttttttaaggtgctaactataaaaagtattgagtattattggtgtccaataataatactcattctcaaagagaaatgttaaaaggtatcagtggtacctagcacacttatacatgtcaatattgctattgatccaactaattatcaggtccatatagtttaatgtaataacttttaaagaatatcgctagccaattgcaatgcgatacatctagaaggtgctagacactactagtacccaatatcaatgctcattctcaaattatatgagattcaatacttaattacaccaatagtgatatcacaccaaggagaatgttagatactaatgtcttttagtatttctctaatgaattaagggctcgtttggtacgtttattatgtcgtattgtattgtannnnnnnntattatattgaattgaattatatattatatatttaggtactcataccatatatagttttacataaaaatattgtatgaaatacaattcaatataatactatacaatacaatgcaatgtaatacggcgtaccaaatgaaccctaaatgtatatatgaggagtattattgtcaacctcctattataacctattagtcaatctctatgcctaaaatcacatgttgaaatattttttttcatagcggtattcgttatagttacaacatccttcttgtaattttttgagaaattctaaataacttacagtgtcgaaaatatatttgaagctctttgaacacacatggtaagctagaatatcataaatcctgttttctatattataagctatttgaaattttttaaaaatttactaggataatattgtaactataacgaatatcattataaaaaatatatcttaacatataatttcaggtttgaaaattaactaaagattataattaacactgatagtcctaattactacaagttcaatttgatgattcttaacagataaattctatgttatgaactagaaattaaaaacaatgaacacagaatttacaagct

SEQ ID NO: 115003 - DNA, 3908 bp, Cannabis sativa
  modified_base (3684)..(3691): a, c, t, g, unknown or other
  modified_base (3880)..(3883): a, c, t, g, unknown or other
tctggtgtttctgtgttatatgcagataaaaattcagtgaatcttcaagaggttgaagaaggagttcgaatctgcattgtttgaggagagttcaaactgaactgctgaaggatcttcagcttgttggaagcaagaagagcttgttttcttagatctaagtgtgcttagatcagttattttgattgtgttcaagaattaggtaacatcgtgtaaagttatttcagattatgtagtttgatttgtaaaatcagaactgatgtatataattgaattgattttatagtggatgttactttacccgattcttgaggacccaagcactactcggttggaatgtgtttccaatgcagagtaagtttgtatttttggtgttcattgatgtagctttcttgtcttaattcttcgtaatatgcattaaagttcatttacttagctatcggaaatattaaaactttcatcttcaacaatagccacatggaaaaaatgtggactgtggaaggaggttaaaggctgcaggcttactaatgcttttgatatttttgtggtgatttcttagcacctgtggcacataaggaataaataggtgaatggaggattcttaaagctgatgctactatagaatggtttactaagtatattgtagattttcaaggctgatcttctaagaatacattcagctttactccttcgaaccaagattagaagtggactcccattgttgtgaatgtggtgaaaatcaatgtggatgttggtctttgctcatctagtcgatctttttgtactggtgtggtagctagaatagaaaccatgatggtcaggtactttgggcttaaacaaattttattcagccatccgttttgggatttgggattatgcttacggtgaaaaaaaagctgcagaattcgattatagcttttgaccaccttgttgcgattcaactcgtcaaatccatcgaaagaggttgtcgtgatgttgatagttttcttaaatacattgatttcctttgttgaatttcgagtaggattaatttttgttttgagcatagagacgtggtagtgcccgttgttgctagtccttttgttgataaggacttgccattccatttgtaactatttgttgattttatgaaatctttcctttaaaaaaaagacagtattataccacattatttttttatttgtttttgatgaaatatcaacttgattaaattaacattctgagtacaaaacatccagaatagcaactggagcattagacacagaaatactacgaccagataaggaccgtgacatcctagaaacaatatgtgctagacggtttgcggatcgtttaacaaaacgaagttttattaaaggcatagaaagcaaaagagaatgacagtcttgaaccagattcccaaagatggagcaaagggatgagtgattgcgaattgcttggatggagattaagctgtcagattctagttcaacatgttgccaactttgtcgtttaatccagcttaaggcctctttgatacccataatctcgacaacctctggtccaaaagtactataaaagcagtgagctttagcttcaatcagagaacctgagtcgtttttggcaatcataccatagccatattggttatcactagcaaagatcgcatcatcaacattaatcttgattgtatttgtttccggtttagtccagagctcagctctatcacaacaactactagagtagatataggatagagaagtgttatcctgagctttacgccaataatcaagagcaatgcgagccgaagttaggacatttgcaacagtgagtaccatatctttccaaaccattgagtttcttgctttccataaggaccacccaaccataacaagtgaacagactcggtcagcatcaagagagtggaaaaggccatccaaccagctagcaaaagagaagtctagagagatcccgactggtagacccatatggttccaacaagaagtagcaaaggaacaagagagaaggatatgtgatgttgtttcaggtgcagctcggcagacagggcaaggagagggaacatcaacatgctttgttttgagatttatacaagtcggcaaagtcccagaagcagcacaccataagaagtttctaacttttggtgggatctttaattgccataacttttgccaaaagcctgaattgttgctacctgttcttggatctttagaagcctgaaggatgcagtaagcacttttaacagagaattgtatttaaatatttgtcaaaacaagacattgtattaaatctttttttttaattaagggaatattgtattaaatgttaaatatcaaattatgtataacaattctaaactaataacaataatattacacaacactaaatttttaaaataacaaaaaattttccactaccatttttgacacacatttccatatattcataggcggctcatactcttacttgtcacaattaccagtaaataagtcttgtccacacacacctaccccttgattttgggccttgaccaaaggcctaattgagagaaagtccttctcacgatgggaaataacctaaagagacgacatttagggcaatttccaacaaaaggccttcaacaagaaagacatattcctatccttttctataaataagagcactattttcattgtaaatggattcaaggtttggacaaaaattaaaaatgctgtcaaactctccaatcaatcttgttcaacttttaacataatatacaagtgacttgtaaattaaaactcattaatatttgaattatgtaaaaatcattctctttaaccacacttcattatcccaaatcacataattaattaattgggaatttttttggtcaaagtactttgattgagagtcataaaaagctaatttcagcaaacttatttctcccccttggcatggcaacacgtaacaaccagagacatgtcaatatgtaaagtacaaaatagacaggacgtttagttaatgttatgctacagactacagtaaattgattaaaattcacctaattatattggtttatatatcaattaatccaaatgagtgtgtttagataagacatggagagagtattatatagtatacatataatggcatggcacatagtcctatacacattgctgaaactgcaatattgtacatacataatgacagaattccagttcctgggaagcataacattcatcgtcatcatataataatttatatatataggagtaatttgagctgcaaccattatttatttatttattttattctattttttgttagggttacatatattaccaagacaagacattttcgaacatagtcataaaaagagggggtaataaagtgatgataagtactgctcagttaaatttggtaaatagggttctaaatttatttcctcaactaccttgctcatgatataacaagcttattttctaccagcccccagaaaaaaaaaatggagcttatttcttgaagaggaaaagcagcctgcatgtaaattatatgcaaggaaatatatataattaaatataataaggtgcttctacaatgcacctctagaaagggtgcaccgaatttcggtattctgaataattttttagtttaattttttttcatagttatgtacgttttatataaagacatcttataaaattttgagannnnnnnnataatttacaatataaaaagtaatgttcaaacaatttatttgacacgtataaaataaaagagtcacattttaaaaaaatcttacttttagtcataaaatttgttactaaaagtaaaaaaattgtaaaaaaagtttatggctaaaagtataattagtcacaaaaatcataatttgttgtgactaaatgtnnnnttagtcataatacttgttgtgacta

SEQ ID NO: 115004 - DNA, 1671 bp, Cannabis sativa
tttatgccgcaatttatccttttttttatacattttaaattttattccattctattcttattctcatttctattcctattcctatatttttattcccctaaccaaacaccaccaaaagagtttgaaatttgaactgatacgtggaccatttacacatatagcacaatgtaatatatattatagggtccttttccttaccaactaaaaatatacaaccaaatatgcttttgaagacgatcatgaatcatcaattcattatcatgccttcaactaatttgaaatttgaagtttgaacacacggtaagtagagaaatgtttaagaacaccttaaggtactagctaagcaagagatagcatagttatgagtgtaatatataaagtacttatgacggttaaattctcccaattattattttacttgcagtgtttaatcttttaaatttaaattatggtagaaaaacttttttgctgaagcattagcaaactttaagatgtcatccatttacaataatttattgccaacatggacaacttatttatatactattatacacgtggtacatttatatcataaaatattattatttaaaaataatgaaacaatcattttaaaattattaatcattttataattaataataaaaaatcaaaaaacattattgtcttcttcatttcataggtgaaaaatatttttttctattcaaaattattaaaaatcataacccaaatgaaaaagcttcttcataactctctcaacaccatctctcagttcctggtgtgacatccttaatagctccagtggagctgcatcgcgtcatgacgagcttaacaaacgcacaaatcaacgaccacgtgcccaaaatcccgatccccctttctcattttatctcctccttgctcacaatttccctttctatctctcccatcttctcccttatcctcgccaccattaacgacgattgctaacacatcaacttttttcttttcttcttcttctctctcaagctccttatcttgatctatccaactctccctctccctctccctctctctctcttcatatttgacctgctctctctcttcctgatctgcccaactctctctcaatctcgatctacgtcgaaggagttgtgccgttcgtagatgaagtagagggaagaaaagggaggaagaatagaaaggtcattttggctcagtctcaatctcaatctgcgtcagatttgctcatttgttttttaatacttttttttgtgtttgaatatgagattgagattgattatggtttttattattattttgggtatttttgatttgaaatgtttagaaaattttatatctaagttgttgtttgagatctagtttttaaatttggtagatttttgttttaatttttttgggtgtaatttgaatatgaaaaacaggtttggatagtgatggtggtgtggtggcaggtttctagttatgatttttatgatttttttttgtatatgttaaagtaattaattaattttatttaattttaaaatgattaatgattttttttttttcacttttaaataataatattagggcccgtttggaacgcaagattggactggattggactgaaaaggattggactggactggacaagattggattatgctgaaagtaatcctgtgtttggtttaa

SEQ ID NO: 115005 - DNA, 1896 bp, Cannabis sativa
  modified_base (27)..(39): a, c, t, g, unknown or other
  modified_base (1835)..(1836): a, c, t, g, unknown or other
aggatgttaatgaaacatacatggtannnnnnnnnnnnnctggtaaaatatttccaacaatgcggacctggacgaaaaccgggaccgagacccatgacttagactaacacttggacttagaaccgaacctagacctggactgtgactcgaacatggattggacctgagaccctgacgcaaacccagaacaagactcagacccagataatgacccagacccgaacccaatttcaaacccaaatctggaccggacccataccctaactcagacccagataaagacttagactcggacctagaccaagactcggactctgacccgaacccaaacctagaaccgaaactagatggagaccgatagcaagacctggacctaaaactataactggacccaaacctggaccccgtctcagaatagaacccaaaccgagaccttgacccaaatttggacctagacccaaactaaaacacaaactcatacccaaatcggggtccaaacatagaccaagactatgaccgggacccgggacacagacctaggcccagacatagactaggaccaagactcaaactaagaccctaaactggacccgtactcggactcgaacccaaactcaaactcggacctatactaagaacgaaacctaagacccagacttagaccgggcacccagatcccgaagacggatccaaacctagactcaagaatcaaaccgaaattggaccaggactcgagatcatgggacaggaccaggatccaaacatagacccaaaaccagaactggaccaagaccaagacctgaactcgaaactggacacagattaggacttggacccaaacgaagacctggactgggactcaagactcgaccctaaacccaaaccaggactcaggcacagactgggacctaaaacctgaacctagattaaggacccaaaccggacgtggaattgggacctcgacccgggacccgggacccaaacttgatatcagactcaaattgggagttgggacctaacttcgaagcagactaggattcgagaccaagatccaaatcttgacaaaagattcgggaccatggacccgaggtttggacctgatccatagtcggtgtctagatctaggagtcggacccaaacccgaacctaaacccaaacccagaccaaaaccaagattcggacctagactcaaacccaaacctagactcgagactcaaaaccataactagaactgtaccgatccaaaactgagaccaggaccatgagccagacctagacccatagccagacccaatcctagacccaaattgggacgcgaaccctaacccagacctagaccaggaccgggacccaagactcgagacccaagacccaagacccaaactcagactcgagactcggaacccagactcaaattgggacccaaacctgaacccgaaaaaggaaccaaacctggacccaggacccgaacctagacctagacctatatttgggacctgaactcaaacacgtacccaaacatggacccagaccaggacccgaacctggacccatacctgaacacaaaccaaggttctaaaactgaaactaaaactataccggaacacaggaccttgaccagaacctggtccaaaacctaaacctagacctaagacctagacctggactagggactgggactcggaacataaactcgaatcgggactcaaactcgaatcgaagctaaattgtaacctcgaaccagaacccaaacctgaaccccaacccaaacccagaacgacaccaggacctgggtgttgggtttttgtgccataaataaaacccattacaatctnnttagttatcaatttaagaaatttgaagtgatttatttttgcatgaatttttcatgcttat

SEQ ID NO: 115006 - DNA, 1596 bp, Cannabis sativa
  modified_base (1546)..(1554): a, c, t, g, unknown or other
aaagaagaaaaacaactataaaatgtgacccgaaacttaggctaaaaatagcctaacaaatcccaagaaaaataagtttttagagtcgtttatctttgttttttttttatcattttttgtctataaaagaagcggacttcaatagttttcaacaagcaatcaaggagtacgaatttcagagagcaaaatcaatattgaaggctttctctccaggattttcaacattcttttattctctattttcttcttctaatataaattaatatgtgtgaaattgctacgatgaacatgagtagctaaacagttcattagggtttagatggatattgtttgacattgatttttgattttaatacgatttaattttccctcaatttctacgtattttattttattcgtttttaatttcttttaattgtctgaccatcaattaattgtttatgagtttgatacaaaatttgagaagtgagtgtcaattatgcaatagtaaattaaaactaaatttcgatataggacaagggtacctatatggtttggatgtgtttaatgcattttacatatttaatttatcacaagagtagaaaatttacatgtaattgaggtttatatatttaaaaagactataaattacataagtaaacatgttattgcatagaatttggtaatatgaatagaatcatgttaaaccataatcaatagatgcaattgaaatcgaaaaccctaacttttaatcatctttaatttccttattgatttacgtgcttcttattttcattatttctttatttgttttctacctttaattttctcttaataatagaaataaaaattaggttttaaagtacttaactacaatcattgtggaatcgacatcactctttgtgagtctataacttgttaacgatacgtacgtatatttgcgtgttaaaataccacaaataccacaacaatgggtgcgagtttttccactaaaaacatcaccgacgacaaagtcatcattaatggattgatacttcgtcagtgaatagatcatcaatgacaactttatcgtcagtgatgttagggcggaatgaattctaaagcctcactctcttcatcattttatccatttcatttaatttatttccatctttttctttgtaagaatcgatccccttcaccattttgtcaatttcatttcattttattttttttcaattccaatttggtagttactcaataatattacatgtgaaatgtaactaagagatcttgacacggggaaatcgaaaattgggttcctttggcccgttaatgattggtgaggccaaattgaagttagggaaacctcggctccggtaaaagtcaaacaaagaaagagaaagagatagagagagagagagagagagtttgcgagagagggatgaaatccttgggttcgggtttccagatgctgcgagcaccttggtgtggtttgattggaccactgtcactcgagaaataactatcgttgcttggcgatgccaccaagcaagcaacaacacacaaagagagagagagagagagnnnnnnnnngagagagagagagagaggaccatacgatcgagtacaaaccat

SEQ ID NO: 115007 - DNA, 2860 bp, Cannabis sativa
tggtaaaatatttccaacaaagtttggggtccgaaatccaagtccaagttggggggttgggtccaggtgcgagtgtgggttttgggtccaagtcaagggctaggtataggaccagagttcgagtttggatttgtgattcgattctcgattgtggtgcaaacccaaaattcaaagttggatttgagatacgggatctaaatcgatcagagtaaaaaatactcatagattataattttcttttacaaaataaaaaataaaaaaaaaaactttttaaataaattttaacaatgacctttttttcatttatttttaaaaaaattaattcttaatttttaaaaaataaaaagtgaaaacagttttgtttttgtaattatataagacttagaaaaattgttagtaatgggtcaaactttctaggcttctattatgctcagagtcacagctgatgaacacagctacaactacaagcacacatcagatcttcttctctcactaactcgttcaagatcactcccaaagggtcttcaactccatgcccaaatcatcaaattgggtcttcaaaccattccactcatatcccacaacctcatcaacttctactccaaaacccagttccccatttactcttgccatgttttcaatgaatccccatacaaatctgccaccacttggagctctgtcattgcctcacttgcccagaatgagcttccctcacatgccattcagttctttaggaaaatgcttgagaatggggtttgtcctgatgatcatataatccctagtgctactaagtcatgtgctattttgggtaggtgtgatattggggagagtgttcatggacttgttgtgaagactggttttgaatttgatgttttcgttggtagttctatggttgatatgtatgctaaatgtggtgagattaaatatgcaaggaaagtgtttgatgaaatgcctgagaagaatgttgtttcttggagtggaatgatatctgggtacgttttattgggtgatgatgaagaggctttgaggttgtttaaacaagctttagttgagaatttggatgttaatgatttcacattttcgagtgtggttcgggtttgtggaaattcgactttgttagagttgggaaggcagatacatggtttgtgcttcaaaactagctatgattcttcgagtttcgttgggagttcgttggtgtctctctattcgcggtgtggagttatcgaatgtgcttttcgggtttttaatgagacaactgctaagaatcttggtttatggaatgcaatgcttatagcctgtgctcaacatgctcagccagataaagcttttgaattgtttggtgaaatgagaagtgtgggaataaaaccgaatttcatttcctttttgtgcttgctctatgcttgtagtcattccgggttggttgagaaagggaagtattactttgagatgatgaaggagtatgggattgagccaggagctcaacactatgcttctatggttgatttgctcgggcgagcaggaaaactcgaagaagcagtttccatggtaaaagggatgccaataaaacctactgaatcaattttaggagctttactgactggatgtagaatccatggcaatgctgaattggcagcctttgtggatcataagatctctgaactcgggggcaatgtaggctcggggcttcttgtacttttgtctaatgcttatgctgctgctggaaaatgggatgaagcagccaaagcaaggaagatgttaagagatcaaggattgaagaaggaaactggattgagttggattgaagatggaaacaaagttcacacatttgcttcgggcgatagaactcattttaaaaccgaagagatttacaagaaacttgatgagttaggagatgaaatggagagagcagggtatgttgcagacactagttttgtgcttaaaagggttgatggtgaagagaagaacgagacaattcggtatcatagcgaaagattagccatagctttcgggctcattactttcccacatgaaaggcctataaggattatgaaaaacttgagagtttgtggtgattgtcatactgctataaagttcatgtccaagtgttcaggaagagttatcattgtgagagacaacaatagatttcatagatttgaaaatggagtttgtacttgtagagattattggtgattcatattcatttttttcaccattgaagaaaagtttttggaaatgaatgaaagagaacattgatttattatattgctgcgattcgatctcatgacctcactcggacactctaatactctctctgtatgttttataaaacaacaaaaaaattaataggaaaataatattcaaacatcatcaaaataaaaataaaaaataacataccaataacaaaaatttaataagagtgtaacataaaaatatatcagaagactgtatttttctgtaaataaaattataaaaatcgtaaaaatatttaaaatttcataaaatcgtatttttgtaattttttttttattttttgtgtatttatgaaatataagcataatcaggatcttattcctttctctttgcttaaattctcatttctcatttaaataaaaaaaagattaaattaaaacaaaaatagttgtagaaaacacttttattttttatttttaaaattaaaaaaaaaaatagtaaaatatatttttattcgtaaaaaaaaattggaaaataaaaattttacttttattccgtgattaaaaatggaaaatttgacaatatatgcttaaatatagcatatattgttttaatatactatgtaaaaaaaaattaaaaaaaatactctccaattaattataatcccaac

SEQ ID NO: 115008 - DNA, 2733 bp, Cannabis sativa
tatatataccttccaggcagtcaactgaacagaaggataatcctttctaaccttacttctcactaaaccccatgctcttcctgtatatattttaatgggaagatcagtcacaattattaactaattacatctatatactattttctataaattaataatgcacactttaaaccaaacttcaaaatataatttcatcattttctctgtttttgggttaattaaaattataattaagcttaattttgttttctaattcacatgaaatgagtggagtggtgtgcgtacgtagttattttaaatgttaagaatatatatattatattcagaaaaaagaagtaatttatttgagaataatattaaatgagacataattgattaattagatatatgcataaaatagttaatatgaaaagtagtaattgatgaaataataaatgaattacgtaccttcaacgaggaagccataatagatcatgaaaaataagttgttccagggagatgatgtgcattgttccaacaacacctaattaattaataattatatatattattaatattaatattaaaacaaccaaccatttaatatatgtataattattaattaattaccttcttcagaacagtatcatttcccttctttcccttgaatattttgtccattaatttgtgcagaaaatgcccaaatggtcctgagtatgcaaaaccatacaactgcatacatatattaatcttatacccaattatcaaaacattaaggcttattagttaatttatatatattattaattaattaaaagaaaaaaggaaatagttaatgacttaattattatacgtacgtaccatcataagaaataatcttcttagttgaagctttttgatcccagagatcttctgagctattacatcactgcatccaactaaaacccctgctgtgatggcctgaaattaatcaacttattaattaattaaattaaagaaaaaaatatatagtattatatatagtagctatatatacgtaccttggtcctgagaggatgaagatgaagttgattaagatacttttcccaaaattcattcactatctcagacatggctagctaggctactactttcaacattaattaatataacatccatatatatccagatcttatgtatatataataataattaataattgtattaaattatatattaattgtacagttttcagaataagtcaagagaattgatcaaattaagtctctataataattcaaacaaaatataaaaaaatatatatatttatttcattcatgatgaaaggataagtatcactgaatatcttttcctttactactttatagtttacactcatttagcctttactaattaatatatatatatgattttgttattatctattaattattttatcatgcatatgtggaaccagatcgatcaatataatctcagcagtcgatcaaattatatagccaaatggatattattataaataacttaattagctgtatatagtcacactcattcacatgcaattaatatattatatattttgcagaaaccaatttatatttatgaatcagtaattaattaatgaattatgagtgtatacatatatttttcttattgattatttgtattatatagttacaacaaaacttctacatccattacaattttttaattagaaaattcgtaatacaataatttagggtgacaaaagtatatatatatatgtaccaaagaaaaatagtgtgaaattaaattaacaatgccatgtaaataattaaactgggtcataacttatatgtatgtagttaatattacatgtgagtgtgtgaaacatgtgcaccatagtctaaataaataaataaatagacatttttattagtttattaaaaatagaaatattaaaaaggaaaagaaaaaaggtagttaaaagttggtgtgttagtggaaatgaagaaggggtactcagaaatttccaagtacttgtcacgttgaaattgaatgaaccaatccaattagtagttagtcttattagtctcccattcattataacatattaataacttttttaaccaccaaagatatatataatagagactccataatgtggaaaaacaccctcataatcactttcgtgtcactcactccaaatatttaaattttaaacaatttcagaagacataattaataagctagctagccatccaacaatatacgaaataattcaaatttggaaacaaagaccgaaatgtacaatagtaaagcccaaagcctagttaaataaaagaggtttatattgttctcttttatttttatcctcttttttaaagtttattatttttacctttttttttaaacactttaccaattttacccatgtcacttcaatatactatccatgtgactccttgagtattttaggtacaatgcataaaagaggtatgtttcaattaaatataaattagaggtagatttggttaattgataaataaaaaagttatttttcaatttaccccaaataaaagagcctctccctcggccctccactttgcatggcccaacagacatcaggcccaaactagcctttgacccaccactttatcatacatccttttaccaccactttatattaaagtgaaaattacatgaaatatgggatttcataacaaagttagaaaaatatggcatttttaagtttgccactcttctatggcatttttt

SEQ ID NO: 115009 - DNA, 1486 bp, Cannabis sativa
accgcgaccgcaacgcaaagaattacaaactgcatttttttttgcggtgtggtgcggtgcgggcaatttgagcaatttgatgaacacccctaatgctggtagagaatttcggttgcggttaggccgattgttgctgctaatttttgctgctggtttgatcaaattttgctaatgtacagtaagaaaaagtgtgaggaggctgttatgttgtgctgggggtttatgaaaggctcgaaatgatttgatttggaaccaaaagtatgctacggtggatggtgttcttatctcatctatgagttatcttgtgcaatggaagtcaacccagaatagaggttcaaaggcttctttttcaagttttgaagctggtgatggagctcaattttggattaaaccgcaggagaatacaataaaggtaactgttgattctgccattttcgtgatcaagttgcgtttggttatggcataatcgcttgagactctcaaggaaaattagtgatggctaactcaaccatggaggaaagtgaagttggggtcagattgcttggtagcattacacgttattcgaatttttttatctatactttcttcttttggggttattatagaagattttcgtaaacttcttacttcttcaaataatatttccttattttttattaattaaacaatctgctaacatgattgttcacagtcttgctagatcatcttattattttccaaatcaagtgttcaacaagggtgatgttcccattaaagtacaaccttatattttgactaatttagcaaattaataaaagttctatatttgctttcaataacaaaacaaaactacacatttacaaaataatgcaaatagttaaatcatgaaaaagaagctaattaacaaatgaaagaaaaaagaagaagaagaagatgtatatgtggtgttttggcacattataataaattatatgataaattacgttttattgtaaggtcatatttggaaaaaagtagaaataagtttttgaaaaattttaggggatttataatttacattcccataaaattaatgtaagaactttagctctagtacataagaattaacttctgtaatttcagcttcaagatcacacttaaacaaataaatgttaaatcaaaacaagtaaatcaagaacaaaaaactagcaacacatattaaaccaaaaatataatacatatgaatctagattgcttccaaacacaacaacacacgagaattatactgattccgatctcaagtttaatgtgaacttggtcatattccagtttgaaagcatgaccaccaatctttattgataatgaaaattagagatatcaatctcaggagctacaaggaaataatcacagttagccattcatggtgtaatccctcaacactcatcaactcactaactcgagccaacataatcgacgatgttgctcaatataattttccaatccctaccctctctctctctctctctct

SEQ ID NO: 115010 - DNA, 789 bp, Cannabis sativa
atgtaaggaatgacaattctactaaaaacgcgaagtcattgcaacaatagaatcactaatccaacgtgttaagaccaacaaaccaaagaaatgagaccattttcattccattcatttttccaacattcagtacttgcatgcatgcaattagaagcttctttcttaatagttaatccaaacttgtatttcagtggatgtgggtcccacacaatctgattggtaccaagacaaatactgcttacttttagcccataataggtatatttatatattgatttttgaaacgaaattgaagtggagttgtgatccacgttattccagttatcctggtttaaaattagctaatgctattttctgcactttgttttcttgctccttttaaggtagtatttctgttttctttatattttatttctccctaatttggcaaacagaaaatgtacaatacctgcattccccattcctggttttgactgcatcattccctgtccatacattgaaggatccattggcaaagatctctgagcattggccatgttaacttcaggtttgatgtcctattatacaacattacaaaaaatcgatgacaaattagattgagcaatgaaaggatgagaacccggtaaaattgaactgtgcaggtactcacagggttctgctgggtccgagcctgtatttgctgtaaggctgcattcacactactatggttccctgggaccagctgactgtatcaggaaaagccaagataaattatctacccactaagacatctatcaaaaatatagttat

SEQ ID NO: 115011 - DNA, 3075 bp, Cannabis sativa
tggttcgtagatcggaggctgggcagtcctcttgtgtgggcggtgagaacttaaacacactccaaatagggtttccaaaaaagaaaccctaaaatcaccccctaattgtttttaatagccaaaattttgaattttgaatttcgaccctaatctaaggtggctctgataccacatagaaaatggtggataaatagtattttattcaataaaatagcaagtatttatactcaagactacggtgactaaatatgaaactaggaagaaattggaaactaatgtatatattctaacaagtaggttgttacgtttctgtaagtagcagtagttagtggagcagaataaataagtgattagtagttgtgttaatgagttttagactcttgggagattaactatcttgaattagttactgttattctttctattcttgtattgtgttggacttggtctctaactgaggatagggtttgagaaataaatgtaagatttctggtgtatttgtgggaattcttgactgagattttgagagatgctatcattggtatcagagcatctcaaagatcctacaatggctggtaagaaagtggagtctttggagaaagaagtggagttcatgagggaagaactccaaaaaaattccaaatctggaaaaatctatcaaggatttgcaaatgcagtatagagaatcccaaagatctatgaaggaggttctcaaccagatctagcagagggtggcagcgcagacaacgacaacggtagcgggcagcggcaacgcagcagggagagcgacgatcggcgtcgcactaccagcgatgggtggagaacaccattgtgcaccaaatttaaacgctccagggttttttcgtgaggtacagtggtggctagggttctggcagatggtggcgcgacggtcgtaccggcagtcagagggctgggttttgtagagaagcggtggagaaggctagaaatgcacgggttcaacaattttgaccctgattcatggaatttgagggctgaaaggtatttttctctaaataacctcactagtaaagaaaaattagaggctgctgtcttgtgccttgagggagaagcccttttttggtttctttggctctatcatagagttattattcagagctggccggagttgaaagctttgcttttacagtggttttgtcctttaaaggagggaaatttacaacaaagattgtttgctcttatgcaaaggggccagtggctgaatatagacgacaatttgaggtatgtgcagcacctttgaacacaattttagacgatgctcttgttaatgtgtttgttaatggattgaaagaagaaattgaaggggaattacagttgtttaatccggtgggcttgctgaatattatggaagtagcacaaaagattgaagagaaaaatggtattgccttgtggaacaaaggaatgtcttcatccaagactttcaagatttcaagtcatggttcttttggggatttgaatgctgcgagtagtttgaataccaaggttgagcagtcattgaagttacaaacacaagccaaggtttgggggctaacccaaaggagggctacaaaaagttgacggctgttgaataccaagaaaagaaagataaagggctgtgttttaggtgtgatgagaagttccactattgtcatgtgtgcaaaaagaaggagctgaatgttatgatcgttcatgaggatgagttggagaacggagaggaagtgtcaatgggggaggtgacatgtagagagtgtgtaattgtccctcaactctttggaatgtttgtctaatcccaaccacattaaagtgaaaggattgattaaggaccagccggtaggagagctaatagttcagcccaacaaacttattggtgtaagatacgcaagcaaaaccaacaactcagcaaaggaagttgaagttttaatcaaatggcaaggattaccagattctgaagccacttgtgagtcttttgcagccataagggttcagtttccaaatttgaaccttgaagacaaggttcaaaattggggagaagtattgatagatctccaatgaggttcacttatatgagaagagggatgacgaactaaactaagttattttccttagttgttttagttttattgttagtagttgttggttttgttttgttaggagttttattagtaggttattatgtttctgttaatagcagtagttgctagttagtgaagcagtataaataagtgattagtagctgtaataatgagtttgggagattggctatctcgaattagctactgtttttctttgtattcttgtattatgttggacttggtctctaattgaggctagggtttgagaataaaagtaagatttctggtgtatatgtgggtgttcttgactcagattttgagagatccctatcagattatggattgcaaaatgataaaaagtcagaggccaggtctatttctaactgacaaatcctggaactaggaagaattgcatcttttcaggaccaaaactattttaagtagtgttgttagcttggaacggttcaattaatctaatatgacatttgatctcccatattataggaatcatttcaaaggctgttgcataaacaggatggaactagagctgagtgggaatatccctttgctgttgctggaattaacatatgttttatgttggtacagatgttagatcttcaatcaggtataaaagaaaaagcgattttctgttgaaagatatggatttttttttctttcaactacagtagtgtttcaacgggctcattggacttgccaatgtgctagggaatgagtctgactaacaaataacttctgggtggttttgttgtcataggaacaccaacttctgaagtgggaattcattttctggaactacttaaagaagatgaaatggcatttgatcaccttttttgtgtagccttccaaatgatggatgcgcaatggcttgcaaagcgagcttcatatatggaattcaatgtaagataatttgaatactttctagcaaaaaaaaaaaaaaaaagtaataaaattataaaataaaata

SEQ ID NO: 115012 - DNA, 2841 bp, Cannabis sativa
gtaaaataatttccaacagatgtttccttctgtctttattagattccctggtttctttcttgatatctactgattattttgttcatttgaggaatgatttccttccgaagggatactttgctttcagttacgggtaataaaatgatcctagcattaactctcgtcatgtatgtttctccgatgggagtgtgattttgttttatcttgctttaaatacccttgttctatggaatccgccttcctacccacagaaggctggttcatccgatggtgggttagatggaaggtgttccttgtttgcacttgatcctatctgacctatggctttgaccgtcagtttcaacttatctcggaccttgacttttgggcgtgctactgaatgcgccatcatcacttatttcttttttttgggtttgattccttcattagttatcactccgagcagcgaacccctattttgtcctttcttgagtctttcatactttgtcgttatgctccattttgtcttcttgtggccttgtgagttttttattattttatctatttgtaggccgctttgttttcctccattttgttgggccttattattgggagtatgtctaattgggccttggcgccttttccaatctctaattgggccttcatgccctttcccattttctccccccaaacaggcaccaagtaatagaatggctcggagaaggaggttggataaaggaagatctataatatggaagagagtgagaaacagagtcaatacattgcttcacattatccattttatgattatgcaccttatcattccggactctccatatcgtgtccacaacaacaaaagcatacagaaaaacctcgtccgggtttacacctttacgctgaagattctagatgaacttaacccaatcccaaactctaatcccgctgtcaaacataggaaagattccccatggggaaaagcgccacaggtgataagcaaaattgcgttgcagaaacatgggcttagatgattcctgatcagtttcacaaacagggcaacgagtgtcctcaatactgaaccgtttacaaacagtggacctggtcgagagcgcatcaaaaagaatgcaccaccataaaaccttgtgacgctcgagaatcttgctattccaaagcttgttctaaagagctggagctacattacagtaggggtttcttatgagggcttcgataagataggccgacttacaagagaatcggccattacctcctcagtccaaatccaataatcttttccttgccccgtaggactaccacctttcaagatgaccccaattatttcattcatacaggttatgcagtttctgaaggtcacagttcccctatctgtcaacatatcagccacttttccagacaaaggaatcagtgcccccgagctttaagaaaaagattcttaccgtgagagattcaagggtcatcccaaatattcgtatcttttccatcagtgataactttgcaagcgccttgtctcaagatatcattagctttaatcatatttttccaaaaccaggaatcagagggcttggccttgcgcttaagtatatcttttcctctcaaatatttaactctcaatatttggcagcatagagactggaatcatgagagcagtttccaaccctatttggccaagaaagctagattcatttcttttattttccgaaaaccaaggcccccacgagatttagggaggcacatcttatcccaagattccaagtgaatcccatggttgtccttatcaaatccctaccaaaagtcacaaaccataccatcaatctttgtagcgagctaactagaaagcttaatagtttgcataacataagttggcatagccagccccacaaatttaatgagggtagcacgtcctgcacgtcctactttagacaacgtttttgctttccaaccttgtaatttggaagtaagactcaacagaaggaaattcaagtctgcatccttatctcttgatcagaataaagggagacccctctatcctagaacagttaattggttgcccaatcatttgcaaagcaaactttatttgaaggaatgatattgagtgggccatcctcgtatcaaatctcttcaatgaggcagatgcttgatcaataaataatcattttttaaaaaataaataaataaagagcaacaggttggcaacataagaatttgccaatataagaaattatttacagaaaaaccatcccagaagagactacagatagaaagtgtgtaaactatttacattgcctcaatgatgaaacacttctattcttgtacatgctttgcatcaataggagcaaagaatggcagaaggacctgtacagcttaattgtgttgcataatgaatgaacaagttataagcagttcacgggaatctgttcttgaaattttcttttaccaatgcgctatcaagctagttggagttggagttggagttggactcaagactcaatcttttcatacaaatctccaagagcacggtataggacagcagcagctggtggcctaggtacagaccctagaagaacatctgctgcagttaaagactgattgccatagaatttggagttcacatgtcttcgagtagtcacaatactcccttcaagtgaacaacccacaaatgcccctgcccaaaagtcaacatagaacaggatgtagatgtatgttaatttatatttttatgcatgtaaactgaaatataaaagggaaatttgattttctaatacttaaaaaacttaaaaaaaaaaaaattaaaaccaatacattttacactataaaaaatatgatacttttttcaaaactccaaaaata

SEQ ID NO: 115013 - DNA, 3042 bp, Cannabis sativa
tgataggattatcctatccaattagtataaaccagtaaaataagagtaaaaggaagagaagttgagagaaaatcaaattgtattgatgaaaatccaggtattcgagagcctgtactctcctctttgctattacagaatacttgacaaaactcacaaatggaaactaattcttatttatagcttgactctaacaaaccccacataacagaatttacactgaggaattatcctctactgctgccccatccttaggtgttttaaacattttcctagcgtaaacaaaagtgagtggaggtctatcgataccgccggcctgaagtttcaccttgtcctcaaggtggaaatctagaaattgggactaaatgacaacaaagtcttcccatgttgattcgaaattagccaagtgcttccatttgataagagcttgagggctggccttgtgtgttcccgggcgaatggcgagcaaggattcaagttccaacaaccattctaagttggttgtgagtccagggggaagaggggaggcttgctagtgtggaccgagtgcagctcacagcagagaaacatggaagacggggtgaatggaagcctcggggggaagctgaaggcgataggcagcaggtccaatccgtgccaggatggaaaaaggaccaaagaatcggggagacagcttctcattgggacgtttggcaatggtgcgttggcggtaggggcgaagtttcacatacacctgatcccctacttggaactgaacatggcgacgcttgcggtcagcctgggccttcattttctgctgggcacgagcgaggttttgtttcagcaataccaaaacagaatcatggttttggagcacttcttcaacagctgaaatcttggtactagcaggttcaaaacgaaataaaggaggtggattgcgattatacaatgcgtggaaaggagtcatgccagccgaagagtggtgagacgtattataccaatactctgcccacggtaaccatttgacccattgattgggtttgaaactcacaaagcagcgcaagcatgtctcgaggcaccgattcaccacttcagtttggccatcagattgaggatggtaagcgttgctatgtttcaatgttgtgccctgcaagcgaagcaactctttccaaaacaggctgataaaaatcttatcccaatccgagacgatggagcgtggaacaccatgaagtttgacaatctccttgacaaaaatattggcgaccgtaggagcagtatacgggtgacggagagggatgaaatggtcatactttgtgagacgatcaaccaccaccataatggaattaaacccattagagttgggaagaccttcgatgaagtccatagaaatatcctcccaaacttgttccggtataggcaggggttgtagtaaaccagcaggtgattgagccaaatatttattttgttggcaaatagcacatcctgccacatattgttgcactgtcttcctcatgtcgtgccaatagaactcagaggccaaccgttgaaatgttttgaacaccccagagtgcccccaatatggctactgtgatattcatggaagagtaagggaatgaaaggagatgtcgttggtaacaccagccgacccttcaacttgagacacccttgcaccatagtaaatcccccaccatcttatcctcgagctaaatctttgatcacttgagatagactaggatccgctgcaatttgcacttgcaaatctggtataaatagcaaattagggacagaaatggcagcaagagaagcctccccattgactcatgaaagagcatcaacagcccgattctccagaccgggtttatattgaatgtcgaagtcataccccaggagctttgtaagccacttctgatgttccatggaaacccaacgctgttccagcaagtatttgagactccgttggtccgttctcatcacaaatttgcgacctaagagatagggtcgccatttttgaatcgccaaaacagtcgccatcaactcacgctcataaacggacttcatgcgcgcacgaggggataagaccttactgaaataagcaatggggcggctgtgttgcatgagagcagccccaaggccagtgccggaagcatctgtttccaccacaaaaggagccttaaaatcccaaagtgccaacacgggaactgaacacatagcttgcttgagttgatcaaaagcttcttgagtttcttgtgaccaagagaaagtatcttttttaagttgattggtgagaggcctagcaacacctccatacccttgaacaaattttcggtagtaccccgtaagtcccaagaagccacgcaattctttaatgttggtaggagtcggccaggataccatggctgaaattttactcgggtctgcagccactccttgtgatgagatggcatggcccaaatattcaacttgagattgagcaaaggagcatttcttcttattggcatacaactgatgttgctggagccttgccaacactaactcgaggtgaacaatgtgtgcttcaagagaggggttgtacacaagaatttcatcaaaaaatactaagacacaatctccacggaaatcacgaaatacctcattaatgagtgcttggaacgtggttagggcgtttgttaagccgaagggcatcactaaaagctcgtaatgtcctttgtgagtgcggaaagctatcttttccacatcttggggtgccattcgaatttggtggtatcctgacttcagatcaattttagaaaaaatagtggcgccatgtagttcgtctaaaagttcatcaatgactgggatagggaacttatctgctactgtctcccggttcaacactcggtagtccacacagaatcgccaactaccgtccttcttcttcactagtaacactaggctagaaaatgggcttgtgctaggctgaacaatccccacctgatacatttctgttgggttttgtgccctaaataaaaccatttacaatctgattagttatcaatataagaagtttgaagtgatttatgtttgcat

SEQ ID NO: 115014 - DNA, 2292 bp, Cannabis sativa
tgttaaaccaagaaatgcctttagataggcacttttaatatataaagatatatttaaaaaacaacattaattattattaagtatttattaagtattagtggtggtcattcctattactttctataagagacgttttttaattgattagtattatttttttaaaattatataaaactcaatattaaattacactaacaataatataaaaaatagtaaaaaatagtaagtaccaataatatgttttttaaaaataaaaatagattagtacgtaatatccaaaaaaccaaattgaattgcatagtaatgattcgtgaagcacgagaactagttgtatctcaaatctcaattctcaatcctttatgttttctcttgttttttagccacaaaccaaagtaaattaaaaaataaaattattacaacaaggaaaaaagtgataagcccatgttgcggttgagattttcaactcacatgggcacatgaaaagtcgagtcaaaggaatagaataggtcgtcaaagggtggggaagtggcttaaagagagaagacaaagcaaattaagccaatgagctaaaacgtagagagagagagagaaagagaaggaaaataatccaataaaggaaaaagagagtagtatagtattgcatcagaaattgtggagtattatgtcgtactatccacatgaaggctgcaaaggcagggaggcagctaggcaaagcgcagcgcagcagcatgcacccgtcagaaccaaagcacatgcctcttgccagtgctttccattatcagtcccacacaccactccaactacacttaccatttttaccatctctctctctctctctcacccacttttatatatatatataccaacttctccacctcatcacccttcattctctctctctctctctctttcccaacccattttcgctaacttttcggtcctagccagctatagacaagctcccactttatcaaccatccttcgccctttgatctcacaattcacaaatccaatggtgcacctgccaccatgcataaatattatatatacattgattaaaactgtcgacgtatatatactagcctattgttaattattaataagtatagttaatttctctttatcacggtaatcatatcacaaatatttgccatgcttgtttgtgtgtaataactaataagtacctttaacattggtgtaagtgttggtatattagtactgttatttttgggtggtcggctctcccacgtgatcagtcaatagggactattgactttttttttttaaggtcatgtaaacagctgtcaggtatacatataatctgtcgtaactgggctttattacatcagagtgcccaaatctaggtttggacagttaattactatgttcacttacatacctgttctatattttggcaaactaatttgaaaaagaaataacatatatgctttaatctttgttaataaaataaattggccctttaattatgctttaatctggctctatcattgtttgcatgcatatatatatacatatctggttatgtgactgtaggaaaaacaacaaggaaaccagcatgaaagtaactatacttaaaaaaaataacgaaaataacaaggattattgctaataaaattattgtttaaaatcgttgttatagtaaagtattcttgataattttagtcattgggaatccctagccgttaaatatattcacaaaaaattaagccatacatttttaaaaaggggtatcccttaatggtttaaaattttagccgacagtttaaaatttagttttgcgagggttgaataggcgatgtttatagaacccaagaacaatacattagtcaattgtttaaaactttccagaaaatccaatttttttaccagtgacactttttttgtgatattttgagaaagaaaatttaaggataaaaacactttgaaaacattaagtacatcattcaccattataatattgagaaatttacataaattattatttttagtaaaaataaaaattacactttcacattcaaatttattttttttatatttttacgacatcctatgataactacacgaaaacaacaagtaaaccatcataaaaagtaaaaaaaaaaaaaaataacataaaaataatatatacaaataacaataaactaaaaacaatacatgacaagagtataacataaaaatataaaaaaattgtattttttgaaaataaaattttaaaaactgtaaaaatatttaaaatttaatacaatcctgtttttgtaatttttttttttt

SEQ ID NO: 115015 - DNA, 2983 bp, Cannabis sativa
actcaatttaattggattggatcggatgaaaaaaatccaatatccaataaataattggattggatcggatgggtccaaattcattggatgtgatccaatgaacacccctagactgtgtatatataaagaatttatcagatttgcctctctcatggaaacattttttttttattactgtaccaatttataatatcccaatttcttgtatataaagttgaaggatgtttgcatatatatcatatatatgtctacaattaattaaaatgataactatttagtaaactaaaataattgcttttttataatttgtttttgtataataaattaagagagtaattaattgaaagagggcagtttaaaatatgtctaaaataaaggggtaattttgcaaaatggtataaaatatgatgtagtaatagagccgaccatctgaggagttgacattaaaagaggttgatacttgattgtactgttgaaacttctaaaatagatagttgagatcttaagttgcgcaacgcagtttatcccatttattattagttaataaatttcaactaattattataaataacatataattcatattttatatattcaaccataaaaaccattcacactacgcacggcgtagacttcgagctagcttagttttaataataagctctttacatgttctccatacataaataaactagaaattaaatacttaattaatttaatatatatctaaatatatatatatataaatatatatatatctagctagcttattctgcgatctgttgagcggctttttcctgactagatctatatctcaggtgagtattaatttttgattaattcagcgataatgacagtattatatgtctgactaataataataataataataattatttaacttattctttgttcaaaccaaatttaattaactatatattgaccaaggaccacatactcattcttatggtaagtactaccgcacacaatgcaagaatgtgacaaactacaacttaagtatcgtaatataattaatatatttttttgaataccaagcatatattttttcaaaatattctacaactacacatatatttacacatatatctctcttatatcatcgtataaatgtcttctccctcacaaattatatttatattaataaatatataaagcaagactatagcgtatatatataacaatatatatagtaattatatatattgttattattggtatacaagtaaggtcttgctttcaaataaattgagaaactgagttgcaaaatttgacctacattttttcttctcattgcctaaaagcgtaatgcattcatacacactaacatttgtgtgtatatatatatatatatatattatatatacatgcatactcagccatatatatgtgtattaattatattattgtgttctattatttgttttataattaatattatattattacaccagtcacagtcagatggaatcgccccattaacagcaattaaccaatcaactactgtaataatttgtaggggatcagtaactgtaaaattaaataatactatactatatatttatatatatatgaattgagatcagttatgcgtccttatcgaaactttgtaaaaacatatatataaatgtaaagtatataatatatacaaatgaggcatagtaggaaaaatgatatatagtattttagttgatgaatgacgtttaggacatatggatgattggtagtaattaatcatgataataataaaaaaggaattagttagaaatgtgctgatgagaaaattcattggctcgcaaattgagaactagacaaaaagaaaatgtatgtaggttttcgttgatcatttcattattaagtaaatagtatgtatgccatcatgataatcaggataaagttaattaattagtttaattgcatcgaaatcaaatatatagtaaatggtcatcaaaatgatagtttatccatttatctaattcgaaatctagattagtgtagtgtaataatatttgtattaattaataaaggagtaattcatcatccatgtgagagaaaagagcaaggtcaaatatagaaggaaatagaatatacatatacatatagtatatatagcgatatatagttaatttggattggtgtgatgaattatttaagtaacaaaaagatatctatatacattgattttttcatccataaacgtatatatatgctgcctatttttatcaaaaagcatccctttgaatatttatttgatcgtgcattaattttatttgtctttcttgtttgtttatggattatagcatgatttgatcatgttatttaatttagctattatacatatacattgttttgcttttgtgatagagaaagaaatgtttgccatcataattaacctgtggctcccatattccttcatgcagccaactactactcataagagttagacataaacttgttatcatatgtcttggaatatatcaaaaaggtaaaataaaattctaataatgatttaaatttcatcatccataatagtgtcattgatgtaattaatttgactaaattattttaagggttcagtagagagatgttccatcattctttaagtatagtcaactctttcatactttatatgttgtcttgttcttcatttaattgaagcttttttttcttttaatttgactctggaaaatgagttctatgttaatatataaataataaaaatattattggatgagttcctaattataggttagacggaggtgaagttataaagagtaggtggcctttcacatgggttgtttgagttgtgagttgtgactacaaattatattggttaccaataacatgcaacaaaagtaaaactaaattcctacttaataaaaagggaaaaaaacagaaaaatataaaaaagaaaaaaaaattacaaaaatactatgggtcggcccattaaacatttatacagtcc

SEQ ID NO: 115016 - DNA, 4037 bp, Cannabis sativa
  modified_base (2844)..(2845): a, c, t, g, unknown or other
aatgcaaaaaaaaaaaaaaactattttgaagtataaaaatagaaaaaccccaaatataaatgtaaaaattactttattaaagtataattaatatgaaatttaaaaaaataatattttatgtaaatatctcaatttaatattcacatgattaaagactgtttatccaaatttgactcaaaagtatcaaaatatatacaaaattaatttaaaaacaaaaaaaaaaatcaaattatgatatataattgtacctgataaattactttattaaaatacaaaatacctaatctttattataatgtgagattgttcgagaaatcaataataaatgttatccattgtattgttttgattttttgttttataaaaaaaaaaaaaaatcagtagataagtgaaagatgatggtgaggtgacgtggagaaatttgtgggtgagattattagcaaggcaatctcttgttatcctcatctttctttcgtttcaccaattgttatgttaatgttattggcatatattttttaataatttcaatattaacgtgaattaggcgagtgagctctacaatgaccactctaaatctcattgcctatgccaatcatcccttactctctaatcattctcaaaccccttatttcctactcaagaccacctcatatcaccggcgccggcgccgactaacaccagttttggctacaggaggattttcgctcaactccgtacgtatttacgtactaccataattacgcttggagatcatttatttgatttatatatatacacatatatttcaatggattaatctttatattagttatagatttgaaaattattaccttaaaacatttgctttataaatgataataatagtcataatatgatcatattaattattgctcacatattcaacctaacttaccacaaattgattgctgccccggcttatatatatatatatatataaatatatataaatgtatgtacacatgacatgcagatactgaagcgatgtgatacgtgtagtggcaaaggtgccattgagtgtcctggatgcaaggtgctgtccttagtaattactttttcgattttgtattattatttgtatacaattgttttagaaaaaatatggatagaccaaaggttattaatacgtacttattatttgtatataaataattaccagaccttcggacagtgttattaattaaccatattaaattaaaataaccatcttgctcagggaacggggaaaaataaaaagaatgggaacatattcgagcgctggaagtaagttttatattttgttacatatatatttcgcttatatatataaataaatatttttgttctaattgctacatttctttatatgaatcaaataatatatatatacatatatatatatatggtgcttttagatgtttcgattgtcaaggatttggattgaagagctgtcccaaatgcggcaaaggagggctaacaccagaacaaagaggagaaagatgatgagatatattattcagtttgatcatatatatgattttaaatacttatactagtactaataaaaaggttataatttgtacttttttctttctataatacacatttcatattaaaaaccatactatttttgttactttcttgtttacttccgtatttttaattttctattcttttacttaaaaccaaaaatctaccatgtgtttgagtatgatcataacaccacatgagataattttattaattaaccctttttagaaacaaaaattaattatatcacttctctaagtatcaatattatggaattgtgaactaatttaaaacattaagatttttcatttctaaatttatagctacacaggagattgttttttttcttcagtcaagcccgctagtctttcctgggcattggtgcagtttggccagggttgtgttttgctattgcgattgaattttcttactgcgactagtcttatctctgtgatatacttttcagtgttttagtcttgtctttgtgacatgattttaagtgttttagtcttgtctctgtgatatggttttaagtgttttagtcttgtctgtgtaacatgattgttttgttttattttttttgttggttcttctttattctttgatgactcgccatcaaatcgatgttagtggttggaaattataacaagttttgcgactgaaggagctgttagtagtgcagttacgtaccttgcacaataattgagtgcttaagctacgaggttgaatgaacttgctacaatagtttttactattgtgtcttttaagtggtggatgaaactgaatataggtgttcttaaggttaaatgtgatgttgcaactttttttctgattttatttttagtttttttttttgtcaaaagatctgaaaattagatagctgattatttagctcgttttttaattctaatcgatcatgacatgtctccaatggaagaggtgtcccaattagattgagaatattattttagcattactattaataaaattgcataatttattcaataaaattatataacaccacatgagatgtaatactgatatttgagcaattcaatattaagtttcatatattttaatggatagttagtagtgaaacccctttatatatgttttaatttttatacacttaatcttgtagagtaaaatccagagtggtcattgaagagctcactctcctaatactataaggtggcatttggtttgaggtaatgaaatggaatagaatagaaatgaaacaattttcatttcattcatttgtttggttgcatatttaagtattagaatgtcattcctttccaccattttggtggaatnnctattccattttgaaatggaaagaaaagtcatgctaatgcataattagaaaaaattaattaaataattttttttattaatttttttatgcattttaaattttattcaattctattcctactcctattttcattctcatttttatttttatatttttattcttcccaaccaaatgccacctagctaatagattattcagcccacttcagtgagtgggagaatgggagaatgagctctacaatgaccactctaaatttatttatcattaccattaatgttatctcattttgttcacaacaaattatggttaaaatttggatttaattctttcccttcaatattgttactctattagagttttttaaaagatgttatgaaaactcacattatgaacaaattgtgtgcggaaacctaaaaatggctttaacttccaaataatatttaatataaaattatttataatctaaatacatttttcttttaaaagaaaagtaaatatttttagttagaacattgtcgtcattgattaaagctatcagttacgacatatgtactaccactaatatttatttttcagtgatgactttcgtcactaatactaacttttagcgataaaatatcagtgatgactatttagtgacaatgtatcgccgctaatactcattagtgacgaaaaaaagaccattcagtgacgatttttgtccttactaatggcttctcaaatttacaaacagaaataatttttttctttgaataagaagtgaattcaacttaaataattataaattaaaattttattaaaatatatttattaatttgatcaccaacacatcataagtaataaattagtctaatttctctttttttctctaatttacacaccatagaaaaaaaattcaaaattgttctagtcaattttgtaaattctaattaataataaagtcaattaattgagattttttagattatattatctcaagtattgccgggttataaattatttattgttccaatcataattatcaattggtcatctataaaaggtttacaatgagttgtgactaatattactattttatccctaattatatattatccggtgtgtttggaagtaattatgtaattactaggtagggtaattactagggtagtaattacacagtttagttattacactatattttaaaatacaa

SEQ ID NO: 115017 - DNA, 3187 bp, Cannabis sativa
  modified_base (3155)..(3161): a, c, t, g, unknown or other
cttccattgtgttgacaccactgtaattgtgaataactatgtgttctggatttaacagaaattgtatattaaaccataaaaatgaaaactacatgctaacacaaatgatttctaatcttctattaataacaaatacaattgtattggaatgagttttatttagggcataaaatctcaatagattcatcaccagtcttcttcctgagttctcgtttcattttctccgacatgggtgcacagaagaaaacacttgttaaaaatctgaacaagtaagaataaacaaaaatagggaaagaaatagctaccctaaacttcagggggagcaccctcccaaacaagcaaagatagggcgtcatcattagaagaatcctcatcatcttccattactacgaccttcctttttcctgtcacctgaacggtgggacagacaacttcttcagggtcattcttaatcctgataggtcgttcaatcgacacatgattccccttggaagttttcctcttgtttggagcctcctgctcagtaataatcccctcagttgcctatttgaatccttaaaccccgtcagacgagtaaagcccgtactttagaaaatctgtagtggctaggagggagatattctgagccaactccgacagttgaagaatcacttgagctctagaccttagacccaaggtgaaaggaggatgacagtaggagggaatacactggaaagaaaggtgatcaacatccatgtctttgaccatgtagtaatcttcaataaaaccactgatcttggacacctccttatccatagtatcgcttagccaatagtattaattttgggaaaagtaaaaatatcgcgacatgttttacttcgaacttgaattcatgttgaaaatccagttggtgtcgtgagcggaaggctggccccatccctatgtggtgtacagtacgaacaacgaagttaaatacttaataccctttggagtgaactgagtcgggtagatcttgtaataattggacatttccttaaagtacgggtgcaaaggcaagattgctccttgattagcatagggcctggaccaggcacaaaacccttctcctaggtcagttgccaactgtctaggatggggcaagaatgcctctactcctctgaggagaccttcgtccaaaagatttgttaatcttttgaaggtaagtatggatggaggtgggaccactgaggacccttcttttcttcggtacttaagggccaagccttcttgcattcctccttgacataatcttggccctccaccaatacatcactcagctcagagataggttctctagactcattatatacgccaaaaggaagaacttgaattccatcttcctcttattcttcttcggcatcagaaggaccagcaagacggaccttgtcctggtccttaatttcttggactttgacgtccctagcaacaacttcagtatcctcactcggaggcctagcttgctctaccctaaccatcgcgaatatctgagcaaagtgagggtcggactctaaagccttcctcaaggtctattttgtctttgtcatccttctacatttgcatggtgaattcaggctagaagtgtgcctcgcaatagtaacaataacatccgctatggaagtgtacttggccgatggagctggtcggccctttggcaatgtatcaatagtaccaggtcgaaccctctatgtccacaaagcagggagatagcatttccaaccttttttcaattcctagatgaattagatgtagccttctccacttatccggtcaaggtactaatgatgttgcaccgtaggctccgaagacttgaaataatcactactaacttccctgtcattaaaattagaagttgaagagatttcctcggacaaagatgagtttgcattgaaccgaggatgattttcgtaaagaagttgaagaagatcctggtcgatgtgatgtttacctccctagaactcaccagggttcatctacaaaagaagggagacaaagggtgagaactggacattggtatagaaggcaaaacatatttgatatgacaatcaggcgtatttaaagaaacaagaaggaatttcattctgataatgaaatccccaaacttaaaagtttaaaagaatactgatattcagaagcctaggaatgagtaattttagatcatttctggctaaaatagtgagaaattgaaaacctaaaagatcagtgcatatttcagtcagaagttaaaagccctagtagtgtcttctaagtctcaaattagtcgagagtaaatttaagaacccaaaatttatagcaaaaagttcaaagaataatgcatgtattttaaggaaattgcataaaagagaagaggagataactcactcattattcgcagattcctgagtgtgcttgaatggtttcagcgattaattttcagtgaagtattcttcgaaggttttgagagaaaaagagagatttttcactggttatatgcatatataaaaatggctaaaagagtggaaagctaatttttatcttttatataggtgattaaaagggctgaaaataattgaaaattcaaatttttgggttttcttcccaaaaaagaaacgttagtactcattaaaaaaggcagatgtcatgcgcccaatatcatttaattatcattgcatatatcgaggtacatctttcaaagcaaggtattaaatgctcgagatagcaaagagacgttcaatcaaatacgttaggtcaagggtaaaagttggacacgcatcacccatccgatcagtttcatcactgagtaagtccacgtgcgactaggaagccccgcgcatacttggagagaaatgttatctaaatttttatacaggatgatgtggcatccatttgggtgacacgtggaatagattttgtgacttggacagaagactccacctgcaacaaattgtgtagagagatctgatgataaaagtatgtatgaacttaacatccgagcagggtgtacgagaacacccgaccaactccatcgtgtaggcagctcgcataagccaaccagagggtgcgagttggacatttcagagatatatcctgtaaagaccgcttagtttaatttagaaattagtagttaattatgtttgattatgaaaattatttatagatannnnnnnaattatttatgctgttattattgaat

SEQ ID NO: 115018 - DNA, 3834 bp, Cannabis sativa
ttaattattgagcgcttcgccttaattacatacattagggagattagaataattgactgcttcagctttatctgcgggattaatagtttgattgaaaactgaaattatatttattaataggaattaggaatgattgttgagggtggcaaataacctttaattagtttctcatatcatatagtctctctttaaacttgttttctttttattttcattattgttattttattctaatcatcaaaaccccttctctaattatagttactaatttgtgaataattgaataaatatagtcctcgtggaatcgacctttacttataattatactaaaataattggaggtattagaattaaaatattagtaaatttattgtggcttacgacacgcatcagaaggctttaagtaccaccattgatgtaagcctctttgacttactcatctttgctttgcagatgatcttcttatgtcttgtaatggagatgtccaatcaatcatggtactgctacgaagcttcaagagattctctccaacatctggcttccaagcaaatgctaataaaacaataattttctatacaagtatggagagtcaagatgtgcaacaaattcttgatgcctctggttttgtacaatcaacgctgccatttaaatacctagggttcccaatatgttttaggaagatctctagtgtggaatgtgaagtgttgatagagaagatggttgcaaggattcgaatatggagctctatacatctttcatatgctagaagggccattttagtcaactgcgttcttgttgcctttcactcgtattgggctcaagtaatggtttgcctaaaaaagtcttacaagccattaaaaggatctttagagattatctttggcatggttcagtgggatacaaagctccaggattagtggcgtggaaagaagtgtgtaaaccaaaaaatcttgggatttgggatttagatggttggaagagtggaatattacagccatgcgtaagtacgtgtgggctttggctcaaaaacaaaacaacctgtgggtcaaatgggttcacaaagtttatataaaaggtttgatttgtgggagtataaaatccaccaagatagtagttggtattggacaaaaataataaaagtgaaagatcaaatattgacctgcgatatagaaagccagattaagaccataaaatattcgatttgaaaagcttgtgacatgttgttttcaaaggcagggacacccacttgttatgcaaacaatatttgggagaggtacaatattcctaaacatagaatgatgacatggttagctcattgaaaaaggctcaaaacaaaattgtataatgtccaaatgccattgttatgttatatttgtggaagagaacaagaaactcatgaacacatattttttcagtacacatttagtaagaattgtcttgatcagctgatgcaatggattggtattggatcaaatcaataccaaattaaaagaatacttaattggatatggagatgcatacaaagcaaggtgaggaaaggcatttatatgttggtatttaatgtttgtgtatatatgatttggaggtctaggaacaatattttttgagatgaagaggtccctacttgtaaagagatttatgcaaaatgataaacatgttgtttgtactattagaattaaattgttttagacataaagaaaatagaagacactcacaaagtgtggtttcaacatttagttgaaacttgatttgttcaatgttgtatacagggagtctatgtttaagtcaaaatctttgtacatattgttgaggatgaaatatatatgcacttattcatccaaaaaaaaaaacttaaagtattaaactttattttgtataaacacatattttataatatcaaaccaaaattattaaaaatttaataaactaaaattttgtgaatataaaatcaatcttatttatatttataaatttatatcttaaaaaataagaaaaataattagaaatttaataaaatataaatttattttttttaaaaaaatattatgtttatttactaaaaaaattgaatttttctcatttttattttgatagttgtcaaagtttagaagttaaagttgctaatttataaagacatgtcaacatttaaacaaaataataaaataacacctaacagaaggattaaacttctgtaaatataaaagttcaagagaaattttaacaaacatgtatattttaagggactattaaaagaatcaagtaattttgaaagttttggaaacaaaattattaattattcttcttataattgataaatgatttttttttaatttttcataaactttggaatttttttatttattatttttttttttttggatgaaaaaaagtagaaatcaagttacttcataagaaagtaatcatgaattcttccaataatgaatattcaatatttactttaatcatacattaaagtttcacatatatttattttattttaaaatagcgtataaacattctgtacagcgtaatttgtgtgtttatggtaaaataacataatataactaacaaaaatctatccacatatttcaatacaaaatcaaactcattttttaaaaaaatgtcatatttctgtgtttgttttctattttatttttcaataatggaaaatccatgtattttactaaaattagtaagaaaaaaaaaaggcatttaatgcatccataaacatcttagagttttattattcattaaattaatattaattatggataagaatagatagaataagacaactcactcattaaatagacccctaaaatgtaaatgcgaaagtattcttaattatggcaattaatttgttattaattttgtatgagcattattattgaatattagtggtttttagcatattctaaatatgttattttacgattagctagtagtactctctaaaaattattatattaaattatatgggactcaatatttaattgaactaatagcaatattgatacttaagagagtgctagacaccactggtactttttaacatttttcgttttatatatataataagagaagtgctacggttaacttcttattacaactttttagttaatttttgtgcccaaaaacacatattggaatattattgtttaaatattttttatggcggcgttcgttatacttacaacatcatccccgtacatttttaaatttttttaaataatttacagtgccaaaaatacgtttaaagttttttaaatacacgtggtaaacaagaatattaggaactttattttcggtattgtaaactatttagaattgttcaaaaatttacaagaataatactgtaactataacgaatacttctatgaaaaaaaaataaaaaataaatattccaacatgtaactttagatgtataaattaattaaaaaattataatatgagattataattaactcgcataataaaaaggaacaaacttgacttattgttttactttcaataaaaattaaaaaatttgacttgtttttctttttcaattaaaaaaaatattaaatttggaagttttgggaccattatatgtgaaccttacaaatgtgtaaagtactaataattataaaacttaaacgcctgacatatgctataaatgtcattaaatgttttatctttaaagatataataataattagaaattttgcctcatattatgaaactaaatgagagttatgtagcgagccacgtaaatattagttttatataagttttagtggtttttgttattaaattcagtaactaagcaatgacaacaacaatggtagatagatc

SEQ ID NO: 115019 - DNA, 5956 bp, Cannabis sativa
  modified_base (72)..(79): a, c, t, g, unknown or other
tcttaatatttatatatcaaaattactactgagatggaattatttattttatacttgtgagtagatctaagnnnnnnnnaaaataatttccaacacttcctccatactgcattaaatgctagttgaaagtacatctccggtaccctaaatctagaagagttgaacgctatcaacctcacgaaggcaaattcaggacggatccctctggacctagtcatggctcctgaagtagctgttgggttgtcctgagggaattttacctatgtaatgacttttctttaattatctcccagtcctcgagcttaatctgccacatgtcacatcgcaggattgccacgtatattgggagaaaaccagggcaacactcaaatttcgtattgaaatcataaaatatttaattggtgatcaagcaataaaataattaagtacgaatgaaatagatgcacatagaaaattaggggaaaactatatcatattgaaaccaaaataaagtgccaaataatctccattaacaccctaataaaaattctagctactcatattcattgtaaataactgacaaaaattaattaaggatataaaaaaagagtagaagaaaagtactcataaaaaaatattaataaaagtctccagagctgctttctacttctgttttcgtcccaaatgattgtctggtgaaaagtgttgaaaaatggcatttatatagctaaaaaagattaaaaaaaaacctaatttttgacagtttaaaatttgcgggctgtgacactaaaagaaagtgtcatggcgtttgaagcttgatttttggcagcaagttttttggtgcgatgactaataatattttgaccataactcgttcaatattgctcagaattggacgattcaatatttttttagaaacatgaaagagggatctagcagttttatttacaacatttttcctcaaacaaaatgtatcatactcaaaaatccacctgaagctttagacttgattttcaatcacaaaggaagcgtgttaagaatccaagaatttttcaccaattatatactacaactccaaattcaatgataattaatcatattcatctcatttaaatcaattgaaacatacctctaaaacactttataaaatgcgcctaaaactagcctatcacactcccccaaacttaacatttactcgccctcgagtaaaaatcaacgctaaactaaacacaaatgaacaaaaagcaagccttacttcatttcacactacaccactgttgctcacaagattcaactattataaaataagattttcaatctaatggctcccaataatcaactttagcattcaaactaaaaaaggaaaatataactcgcaaatggccaaaaccattggaatttaatatacatgctcaaaatcaatccaacatattcacaatccaattatcaataagcttgcaataattaatcttatccactaatgttaataacatgtgctctaaagtcaaaaggacttgattgggttatgacgttaggcttatgtaatggtagatgaaaaatgtcatttaggctcacttataccataagcttctctaattaatcactccacaatttttacaaatgatcccaatatctctatttctttttactaattacatgagagaaccttttatttgataaccttgcaacaagtctcttttttctctttcaatatgacactatattttcattttttttcttttcaagttgttgaaaatatttttttgtcttgaaattctctcaatattactcttatttcccacataacatgcataaactttccccattataatatcccaaacttaagattcacttatggtatagttagggacaaagataattaataatgcaattattttctagctcaaaatatgtgtagaaataaagaataacaagtcaaagctgaaaagggtaaactaggataaaggctacaagggtggcttgaaagacacaaacattccgaaaaaaattgcctaaatcttttttcaaagaactcaacattaaggattttgcctcaaaagctaagtaattcaacttctacccaatccaacttatcaattctctaaccaatcaaatatgtatagcaaaatccaactagtcacatttacaaattatattcaacttttcccacaaagagccaaagttaagcacaaaaaataatcaaatcaagcacatggtactaacaagttaaatcaaataagaaacgacagatggtgtttcaattcactaaagcttacttaatcaagaaaaaaaataacataaaactattaaagaaaaaaaaatactaagcaagaaaaagttcaattcaccccccaaacttaaatatcatattgtccctaatgtgacacaaaaaaataagagaagaaaacttacctggggtgccacattagtatgattgtggggggaggtggtggttgatacggagaccattgtggtgggaccgaaaaatggtcaagcacctcaggattcattatccacatcaacaagtggttgattcccataataagcatcatacaggacaacttgaaagttgtcattgtaaataccctcaagcttggcatgacatgagtttattccaacagtagcacaaacaatactagactttggatgatatccttggggagaaaccttcggcagctcgtagagaatgtaatatggtgaaggtggcattaaaggaaaataaggatccattggcggttgataatataatagcgttgacaaactcaaatcaacaactacaagtgattcaacctccaataacacccttttccaaattttctcatgagaatccacaaccttgactgtgatttgatctttaataacttcatcactgaggattggtgctgcttcaatcaccaaatcaaaatcatcacttgtcgagcaagcatccaatgtacccaaatttttagttaaaataacatcaataggatcttgctctttaactataggctcaatttcttctatgtattcaactaattgtgcttctatattattcaaataactctcataactttctttatttgagttattgtccttagaacactccgaattatacactcttaaattatcacacaacgatctaaccatgtctaccaagtgataaatttcttctgcaagtgatagtgtattcacctcttcctcaaatggttggggtgaattcgggcaataaggaaggtatcattgactccaatcctgaagtgatggatcccaatgccagtcgtaatcaaaatctgccatatcattcaacagatttattacatcattgcttctccttaacaaaggctctccagttagcgctactccataattgacccactttcttgttttatcatcaagtctgttataaaagaacagagtaaaacaccaacttgagaaagtgggataacatctctcttcaagctccttaaatctctcccaagcagaatagaatgactcattgtgttgttggaaaaacttcacaatgtactgatcttaatatagcatattgatttaccttagaggtcaaacacattcagttcattagtaaaataaaaaaaaaaaccaaattagaatcaaattcaactatattgatattaactaaaataatccctaacaacggcaccaaaaatttgttttggattttccaacacataagtatacgtatcgtttacaagtactcaaaagagtgaggtcgttcccacaaggactatagttaattaccaaacaattaaattcctaattctatttgttgacaataaaaataagaacagatgtttaatttccactaaaaaagaaaataaataattaaggtgaaattaacattgaatagaacttagggtgattaattttaattgcatctactttatatggtttaatataatttaattctcaatttcaattttcatgtgaaagaaaatctactaaagaaacttgtattcgagttaggacatatttagttggggatcaagcaaataaaagtaattaagtacgaatgaaataaatttacatagaaaattgggagaagaacgaaatcatattaaaaccaaaataaagtgtcaaacaatctccatgaacaccctaatgaaaagtctagctactcatattcattataaataactgacaacaattaattaagaaaataaaaaaaatagtagaagaaaaaaactcgctacaaaatattgataaaagtctccagagccgctttttgcttcaatttttgtcccaaataattttcttgtgaaacgtgttgaaaaatagtttttttatagctaaaaagagataaaaatcttacttttgcagtttagaatatgcgggcctcgacactaatttgtagtgtcacagagtgtgaagcttaatttttgacagcaagctccttagtaagaggactgatgataatttttccataaatgtttcaatattattcggaagttaacgattaaagatgttttgcaaagacgtaaaagagatctagaacttttattcacaatatttttcctcaaagtgaacgcatcaaagtcaaatatttgcttgaagcttcagactttatttttgatcacaaacgaagcgtgttgaacatccaaaacatagaattttttaccaattatattctagaactctaaattccatgataattaatcatattcatctcatttaacatattttttcttattttcaattcacattatgaattttaccatttacacctaaaacaaataaaaaacaattgtaattttgcacaaaatgaatataatcaattgaaacatacttctaagatactttataaaattcacctaaaactagcctatcattaggatgctcttaatataataccattaattgtttaatttctcttctactttatcattctattttaattattaaatttattactactaataaaaataagaaaaaatattacgaaaagcttatattttaaaagtaaaaaaataatattcaatattatgttatactagagattcattaaaaaatatatattttcatagtttaaattttttaagtttttaactcaatagacataaaaatttagaatggttcttggaaatgccccaggttgaaaatatgttaacctgggcgttgggtgcacactagggttgacttgggtgctagatgcctaggtgcctcaaacgcgaaatgtttcaattttgattcagatgcctcagcatgcttataacagatcttattcatgtctaagtacaaagtttaagccatttgtactaagaaagatccaaaaattgaaaccctagcctgtgatgtcaaccaggcctcgggtaaaatcgtaggctcccaggttgacttctaggaggttgctttgacactttttagttcataggctttagacttggattcttcttgaatttttggttcgtaatactaaaggatggtgagttggaaataactttggaggatccaaaaacccattcagaaggttacaaagtcaacttgggcacaatgctaggaaccatttcgcagagttgttgtctatcacttagggcaatttaatttgtgagtgtttttcttcttgccatcactattagaaaaatgggtttcagtgacccatgttgagtgactctaatacaataatatataaattacttttttttcggaattaaaattactaatacaataatctgaattacatgttcaaatgaatcaacaaacacaatataaaaaaattaaactgaaatgtatattacacaaacataatactcaggacaatttgaaacacataaaaaatgtatacaaaacctaaaaatgaatagaacacattttgaaaaataaaacctaaataaaaaaaaatcagattcttgtactacgaacttcaagcccatcgaaccacgaacttcacgccccaaaaataaaacctaaacaaaaaaaatcatattcttgaagcgatagagatcctctggtcctggagcatgtttaagtttggtgccagtaa

SEQ ID NO: 115020 - DNA, 1920 bp, Cannabis sativa
ttgaatctcaacgttcattaaggtataaatatgatttctattcattttattaatgtatattggtattatttcgtttttgtaaattttttaactaacacaaaggctattctttaccaatacatagtattatcaagtagacttaccttattttttgcacaaatatataaatgactagattaactaaatctcattaaaatgtgtttatatataataattcgttcaaatcgttcaaatatatatatatatatacataataatgctatagtgatatatatattttatgcacgcattttaaaatagcaatcaaaacgagtattgagttgattgaattggaatacaaaagcagagacaatgtcaaagctgctgcaatggttgactctcatcaaagtgaattagttctgacgccaagtattttcagtaacattagcagtgacaatatccttatgatggagtaggaatgaggctctttggacgtgcaaatttatacaattgatgtaattgtaaaaaaaaattaaatatgatgttaagagtagagtcaaaagtaataaaacatgatttagaatggctttcatatttgtaaatagaggatgttggcaaaatgatgatgttaagatgtaaaatttattttgtggaatacatttatttaattgactaaaaaaagaagtattgagaagtaattaaaaatatctgaccaaaaaaaaaagaaattgctaaaagaaagtccatatataatagttccttacaaaaatgaaaagaaagtcataatagttgaagaaataggaatattaatattgtggtggggttttgggaatgttgttgtgagtaataacaaataataagtgcatattgcttgctattaaatatcagtataagtatgccttgcaataatggttagaaattatataaaatctaatatttaattataccaataacaatataatactataaatgtcctacctagcttttaaaatttatctagtaataataataccgatcaaggtctatacatctatgtagacagtggaggtttcgaaaagatcaatttctatatgtactccaggcaataatacgaatttcaggctctttatgagataaactctagcaaggtaatattatatatttatccatcagtctatttaacttctttatcagattcccactggcatgaaagtgatacatctttatgattcccttccatgcattttggattcactaaagagtatacaataatagaaaacgttaaatgaaaaaaagaaaaaaaaaaaaaggaagaaaaaaagcaaagctggctatttatgttgagactggacactgtcaaagctggatgttcatgcggttctcactgtgagaatctcactgcttgttcccttttaattatttggacaaatatcgattatattcacatatacacatctaaatagatatatgtttatatcatgaactcattattactactagtatattgtattattagaacaataattggtacagattattctaataaatataataataatcattaaaaccttattgttatttccctttgttaattattatatagggttctatgattaattatttagttataattttgtcgtaacatgggttatgggattgcatactgcccagtaattaattaattgaaagactataaactaggtttgatttgcaagctagcacctcgatacaatttatttcaaattattttctttgctatatgttataattagaatataattaatcacattaataagcttaatatatagctgcttcctttttcacataccacagatctgcatacaaccttttctcagacattcacagagagagagaaagaaaagatggaaaaagaaatgaaagaattataaaaaaaatgtgctttaagatacccttttcaaaaacgccaacccttcttctttt

SEQ ID NO: 115021 - DNA, 3231 bp, Cannabis sativa
atttattattattttttaagttgggagacagaatgaaatgatatgtagcaactagtaactataactaataactaataacaactaatttactcattctaaaataaaaaaaaatattaattttaatgaaagaaacaatacaaagaggagcaattatatgagcagcttgaaaaatcaatcaagacagcagcttctgtgcaaaaattaaaattagtaaaacttgctctatttatatcagtagtctaaatttgcccatatttcaagctcttcctttaactaatggctaatgccacctaaggttactaacctcaactttatataatgtctatgaacacataattttttagtacataaccattagctaaagaggaaaattaggttcaagcttgaaacgactttacacagaaaaatagaaaaggaaactttaaactactaaggcactcacactcctacagtaagaatttagcatcataatactaccagacctaatttcatcactttctctttggttttttacaagttctttcgatgttaggactcactgaagaagcaccactcatcttcctaggagagcaacgattctttcgccacaagtcctctctttcggttgctgctgcatgtacctcctcaaatcctctcttcatagtctgatagacttgttgtaccatagttgtggcttgagcagcagctgaagcaccagtttttgtgaatgtaccccaatcaaacttgttttggttttgtgtattgggaccattaagccctcctgttcctgcattttgaggggcggtacttttctttctcggattagatgcctttttggtagctttgcgtttatttgagttcttttgttgcttcaaagattttggtgatgctggtgacttcaagccattaggaggagttgtttctactgcaagaaattgctcatgacaatcagagcattggagcttatgatcaagataaattctgagaaatttgtattgcttcttgcaccgatggcatgctgtccaaaaaaagtagttggattttggcatctgacttgaaggtttaaagtgaactggttgaacagtacttctcaaaggctttgtgctaaattcggtacttattgtggaatgaccagccgaaagggtacttttcgggagacttgccccagattctgtactttttgtagaattcacccctggttcacaagttgaagcgggatttgagtgaccagctgaagtggtacttttgggaggacttgctttagattccatatttgttgtagaatttaaccctgactcagttgaagcaggagttggggaaaagtcaccttctgcagtggcagtttttggaggctttgccctagagcttcttctagttgctgaagtggtacacgtcggaggacttgcactagattctttttttgtggaatttaccccagccttttgagttgaagcaggaactgagtgaccttctggaggggcagttttagcgggctttgccctagagtttctaggttttgcggaataaacctctgccttgtgagttgaggaacctgcacgagtagtacttttcggttttggaggcttcgctttagatgttgtagtttttgtgagattcacccctgaagctgttgctgatgcattcccatttgtattagaaattttttgattcattattgcattcctcttttggtcaaaagctactctcttggccttatcagacaacaaagcccatgcttgtgaaataagcttaaaagcatcatcagctccaatggaactgttcttatcagggtgaagcataagagcaagcttcctatactgtttcctaacagtctcatcatctgctttttgatccacaccaagtatgctataccaatcaacttctccacttatcttgttctcagcagaaatatgtacatcgagcgttgataacattttggcgataccatcaagcccaggaaataaagtttgagccttcaaagcaaacctctttgcacccataatgtccttcgccaagaacttcttttctgcaatctcttttgccctagcagcctcatctttattacactccattttcccagtcaatcttctcgaatgcttattacagatttgttgctacagccagcaagcagcttcttgatctaaataaatacagccattccagagtgcaactccagaaattccatgttctatcatatttctattgatttaattgtcagcaaaacctattaaaaagaaatagattaaaaaaaatgaaaaaacaaacaaacattttgaatcaaactgacaagacaaagcataataaacaaacacattacagtttgaaaacagatcagctctttgatattataatttcctccacacaaccatgggataaacaacaaatgtttggagaaaactgtgtcatctaaggcaaacatttagtaaggaagaaactcttgctgctggtggccagggaagatttagagcttctcggctctataacagtaagttgcagcaaactcaggttcactaccagcatgctgtttggtgtaggttgagtgttcctaaacacagatttgtgttttggcaggctgttaacattcaacttctaactagagatctcctctctcggatttgtatcccaattgagtctctgttatgcccagttggtaggtttacaacaagagtcatgctcatctctttgttgagtgtccgctctctaaaagggaagggtgatctctctagtgttcagttggttgggtcacaaagcttggctgactgagtttattggctggataatttggcttaaatattaaaaggaaagggctgaaggggacgatagttaatgccacactgcagcagccatggtctatagcctttggattaatcgaaacagatgtatttttgatggagtttcttatactgatttgcacatagtcaaggataccaagagtgttattcaatacaggttatacaatttaaaaatttgtaattctaatatacaggaacaacaattgtatagaaaagtgatgagtgtataggtttaaagttttgtctcgaggtggctggttgtagcttccattgggaggtgtgtgatgtgttttgtaagtttggtggttgattaatgaagttcattttcttctcgatcaagataaataaataaaaaaaaaaatgttaggaattcacttggaatataatgaccaaaaaaatgcaatttacaacatagtttttaggggccgtttggtatgtaggtttcatttcatgggaatag

SEQ ID NO: 115022 - DNA, 5932 bp, Cannabis sativa
aaagctcgttacccttcgcgtctcagtctacacggggcgcatcgcacgtgtggggtgaccaacgcgaagcttcttggtcgggttaatgtgagtgtggacctgagtggggccgagttccgacctggggttttccagagtgggtggctgaagctcgggagtgagaaggacgagaataagtcatcctcctccgccagacttcatgcggtggtccggtctgaaccggacccccgttacgtgtttcagttcggaggcgaaccggaatgtagccctgtcgtttttcagattcaggggaatatacgacagcccgtttttagttgcaagttcagcgctgaccggaatgcaagatcccggtgagtacttatttcttttttgtttatctggttgcttaagttacggagcactttagtggttaattgttaaatgttgctaacgtgagccttggttggtggattttgtgatttttttttctttttttagaaaataatataaaatatatgaaatttttaactgttgattgatgatgggggcggtagaatcgattgtgtgtgaatcaagtaattgtgttgtcaattttcttagctggtgtctagtaatcacatgtgtcaagttggggctgtgcaaatcttgatccattctacgtttcttatttcatgcaaacaatctgcaaaaagcgcaattgcatatttattcatgtgttccttacaattttcaagaccagttaaaagcattcattttttttgtttcgcttttttcattataatcatgaaataaaaactaggaatcaacatttaaggaaataacttaaatttcatttatcattgtattaaaaaaaaaattgtgatgagctgtctttcgcttagttcatcagtctcttttcattactcttttttaattacaaattgataaccttttactgttgaaaagtattttcggagtatctgatattacattatttgtatatgttaatataaaaaaacatttccatttgcctttgccgacttttcataattatcaaatgtcgttcacgaaaaaatacacactctgtattatcaccaataatcacaactaactcaattatgtcttttattatattgtataattataattaaattaaaaaaaaaaaaaaccaaacaaacaaatgatcctttcccatgtgcaaaaatcttatgttctgttgcatatcttcataaattctattgttgacatatgtatagtataaacattattatttgttacttaattctttgtttctccatttatataatatataaaccaaaagaaaaattcaagattctgatgttggactttttgtttttttaacatgaaaaatacagatcactaccctcagatttcaccataaacaacaacaccagaaacagaggatggatgagaacattttccggcgaaagagagaggcccggaagagaaagaaaaggttggatggtgacaattcacgatctatccggatcaccggttgcggcggcttcaatgatcactcccttcgttccttcccccggctcggaccgagtttggcggtccaacccgggggcatggctcattctcagaccgcacggggtctccgtcagcagctggaagccttggggccgcctcgaggcgtggcgggagagaggccccgtagatggtctgggctacaaattcgagcttttagctgaaaatgctaacggccccaccaccggaattcctatcgccgaagccacgatgaacgtgaaaaagggtggggaattctgcatcgacagtaggctgagtgtggcggcgttgacttcgaggtcgccagtcaaaggctttgtgatgggttcaactgtggaaggagagggaaaagtgagcaaacccgtcgtacaagtgggagctcagcacgtgacttgcatggcggacgctgctctgttcattgctctctcagccgccattgatctcagcatggacgcttgccgtttattctcgcataagctgaggaaagagttttcccatgatgaacaagatatcttctcttgatatattcacaaggtctcttcatggtggctgtgataatcaagtttttttttctttgctcgagaaaattgtttggtttgagcttcaaaatatatataaaatacatatagtttttattttttttccttcttttcaattaattagagtattattctttaaattcttttgatcgaccatttttttttctcacaaatttttccctttttttcttttgttccctgtatttttcggggtgtctatcaagttcgacagttcaagttctggtggcgtttgttctggtttatttttttggggtcttggcattgaagactgaacatccatacgtgcacggtttcggtattcgagagtgtgagtgggtttcctcgtcttgttaattctgaaatgattagattagaattttattatacactttatacttttattggggatttctcttataattctaagttgatctgtacatatatgcaatgtacatttcaaaacgtttcacaaattccaagtgtaaattcgtaacaattactattattgttaccattcttttgtcactctttggcctcctatacctttttccataatctttttggctggtttaagtagtattataagtatgtttaaattttgcagcaacatgacatctcaattgttcagcacatgtacgtacgactcttttgcagtgtaacatttgagttttagtatgataaccaattacttaggcggtaaggttggttagtttggcttaagtgtcattacacatttatgttatgtgtactcattctgttataacaaaattgattcttgatttgtattgaacttttagtctataaataaagagttttgtactatgtagaattctaagtttaaaagcattcctccataatttgttttgcaattctctctcctccattctaattcttcatgttattagagctattagctgccttcttctggtgacaacttgtctctagcaagcataactgatgccagtatcgttcatggtgctccaacaactcaaccgtggaattatttttcccattcccttacctcatcctttgtgatcaagctaaatcgcatagagttcctcgcctggaaatcgtcataccaacgctgattggttatggtctggatgaaattttgcttattgatatcgcaccacctcaaagactcatcaatgtccatcttaatcctgtattcactcaatggagcaagaataattaacttcttctttctcaactttgagcctccatgactgaaagcatccttggcatagtagcaagctatactagttagaacaaagtctccaaagccttggaacaagtcagctgagctctttccagtattcataaaggtatgctgataagatgaaatcctctatgattcattggctatagcttgtcatccaaatttggattttgatttgatattgcatcattttactagccttgaaccagaatttgaccctgttgtatctggtattacgtcttggagcgataatctttctcttgaggaagttcaggcattattgatgtctcatgaaactcgtcttgaaagatacaccaccatgttggatctttcaactaagatgtctgtgaacctaacttttggatcaagaattggtcaattttgaccttccaacaatgttgacagaggcaatatgtatgaatcttcatcaagattttctccacgagggtttgctcttccaaattttcctcgatcatctaatccaaatgtccattatgtctagtgtgtatgcgctatggccatccttcacgcatctgtcactacaagtttgatgaagattggaccactcccaaatcagtttttagacaatctcaagctcaagccaatttgattgagcattattttgagtatgagccttatgcctacgttgcttaatctattccaaattttattgatgatcaagggtggtatgcagaaattggagccactaatcacatttctttcaatgttaatcatcttaagaatgttatgccttactctggccaagacaatgtggttgttggtgatggtaagaagctagtcatttctcacattggtaaagctagcatctcttccaaatcatctttcccattgcacttaaataatgtattgaaagttccatctataaataaaaatctcgtaagtgtttccaagcttactaagtatttcaaaaatcttgttgttttgtcaaggacaaacaaacgggagtaatcctaatcaaagggaagattaaagatggtctctacctcctaggggatgatgattcaagtctgtcaaatacttcagtgcagtgtcatcttgtcactttgttcatgctgaaaagtggccaataccaactctctagattggtgagatgaataataagtttaagcaaataatttagagagacacataaaatttattgtagttcactccccatgtcgtcatggtaatggagtttcgtctacttcaagtttttatttctcacaagatagtattacagaaaaaggctaagtgtttaagctctagtttctagagagagtaactagagagagatgctatgacattgtgagaaattttctaaatgtgaaaaataagctaagggagctttccttttatagttgaaggagcccacaataataggagaaaatacaaattagatattttatattgtagatgatgatctaacggtgcaaatttgaattcgatggctttagaattgcgattgaagcgtgagacatgacttgatagatcatcgaattatcttcaaaacataagatgagtagcatcaatcagatcaataatgagcgagttatggtcattttactaaaagcatttcacaacccattggccaagctgacatccagcgcccaggttgacatatgacatcaacctagacactcggtaagtgagagaacgtcctgtggatataatttttgatgcctaagtaatattttgatatcacttagttatttctgtgttctggcgaagctggtcactagttctcgaagatgttactattctacatgagagattcgaaactcttcatttctgagtaattttcccatgttggaaatgaaaaatgcgacgttttgaatttgacttcatggatctttatcattgtgaaaaactaaatagacggttgagtcggaatcagaattagaatcgaataagcagaacccaccgcactaggtcatttgtcaacctgggtgttaggtactttatttctgagctccagggttgtcgttttgatacttctgaagttcttgaacttgaggatgaggtctctcaccccattttggaccattctgaattcaatgatcgaatcagatttggcatttgattgatcgaaaccagcgaaccaggttgattgtcaacctggggactcggcccaacactaggttaacctggacgttgggccctatttccaagggctcgagtttgtggttttctccccgagtttgcttgaatctttattatttctaatgacaaaaaaaatgcccagaacactttttcgagaacttaattggaaatagcccaggttgacaatatgttaacttaggggctgggcctagtgctaggtgtcaacttgggtgcttggtaccagttatgaccctttgaaagtttcgtttggtccccaaaaatagttaaatctatcttttctcggccctggaccttgcttctggcacctagaaagtgttgtttcttccctgaaagtacctatattccccattttttatgatgatgaagatgaagatgatgaaaaagccagatcattgatatgatacttggaaggtgcctagattgacaaattttcaacatgggcgctaggtgcccgagcaccaagtgctcaaaaatgaacttgctccgaatctaattctgatgccttaaatatgttcatgttaggctatttttagcctaggtatcagatctattttatgtgcgtttt

SEQ ID NO: 115023 - DNA, 3478 bp, Cannabis sativa
  modified_base (38)..(56): a, c, t, g, unknown or other
aagttcatatttagggttttaatcaacatacttgtgannnnnnnnnnnnnnnnnnnaaaataatttccaacactaacattctgaaaaaggtaatggaaggaagagttcttaagcctaccaacacactgagggacccttaagtatttacttatgaactctttattgaacagactgagatgatttaggaagatatttttattagcgaggctagtgtttggtgaaaaaaggatggaggatttggagaaattaactgcttggtcagtggccttattataagtattaaggatattcctaatagcttggcagttctcaactgtgacagtggcaaaaagcaaactatcatttgcgaaaagtaagtgggagatcacaagggcaattctgcatatggggaaactcttaaaggttggctttcatactagcatagatggcagtagagagtccttcagagatcaggaagaaaaggtagggggagagggggtccccttatcttatgccactagaagaatgaaaactttgagagtgacaacccttgatcagaattttaaagaagacaatggaaagacagcaaagaacaagggagacaaaccttttagggaaaccaaaatggagcagaatggctttgatgaaattccattcaactctattgaaatccttctccatattgagtttgagggcagcccaccccagtttgccacttctttagttattaatagcattgaccacttcattagtaataagggtattttcaaaaataagtttattagaaagaaaatcactttgattgtttgaaattaaagagcccaagacaaccctgattttgttggataagactttggcaacaattttatacatagtggagcacaagctaatggtcccataatctcgaacatgggatgcattctttttctttgggatcaggacaatagtggtttgactgactaaagagatatcagaatttctattcaaaatatcaagaacaacaacacacaaatctttccctaaaacaaaccaatgcttctgatagaaaaaggcattaaggccatctggcccaggagccttgtgacatgagagttggaacagagcaggcttaatttcatcaggtacaaaggaattgtcaaggatatgatattgagagagactgagatggttgtggacctctttgagaattttggcgatggcatcctcattggagcctttagaagagaaaagcttaacataaaagttgacaaaacaatttctaataacatcatcattatcagtaattgttccatcattaaaggttatgcttctgatggttttgtttcttctcctagaggtggcttttcttatcacccgcccttaaccaatcaactctagccctttgttccaataaacttcatccttgtacaacagagtatcaagggaagattggagggtctgggctttgagaagttggtcctgagttggtgaggttgatgataaaattatttccaactcagtttgtgtgatcaaaattctttgcttaagactactattttttttttgttccaattaacaatggcatggacactagtttgttgcttggagaggaagtgtagaggttatcacgagggggattaggggggttgagagaccagaaattcttcaccaaatggtaaaaatttggattagaaagccagtggttctcaaagtggaatcttttcttccttgttgttcgagctagtttatctttaagagtgacttttagagcacagtggtcagaaacataaaagggaagatgggaaagagaaataagggggaagagattggatcagtgatcatttataatacaccagtccaactgttcgagcaacctaccatgcttccaggtaaatttgttaccaatgcaagggagggggaataattatgttgcgagaggaaggaattgaatttgaccatagcatagtgagggggaatagaagagctattcctatcatttggggatagataattattaaagtcccccatgaccagccagaggaagcaaggggtgttatcccattttttgcactataatgtggcagcatatacgagtgacacgtgtccaatatcctttgcacctaggtagagattaatatcgtgaaaaacttcaagtagcatatatgcacgcacaacgtctacttacccaagcagggtaaagggcagactacccgagcagagagcatgtttggttttttgagctatttgttaagacttgactacttcaggattgatatcgtggagtccaagcacgtaggcaatccctacaatcatgggattgaattagagggatatgacaagctgtctcaatcccccatttcatgtattctatttatgtaatgaatgttccttcctattatagacattataagcaaaagggaaaccttccctcgtgcattaaggccctataaatagtgatctagcttcactgtagagggggattgagagaattgctttagagagagatctaagagaattacttagagatctcattgtaagagctttgagagaaaaaacattgtgttctttgttctcaagttaatacaatctaaggggagtaggctattactctactaaaggggcgaacctcttcaaaatctggtgttctttactacttattggttttcgctctattttaattacatttctaatcacttaataattgactcattgtcattgactaaaagcatggtcaacattttggtactttcattgagagcaaaaacccaagtttgttctttgtcttaaatcttcacaggcatacagaatggtggtgcaaactcgcagaggcctggtcgatcagagtgccccaatggtgacgaaacctattgtacaaccccctaggaatacaagggttccaccagagaccaatcctgagcagcccaacacacaaccacctattgtgggccacagtgtgactccccctctggttgggatcacaccaagtgtgcaagagattggaaataccagttctacagccgaccaaaccactcccagcaccgaagtcccgtactccaccaatgctcagaggttagtggggcatgataccgagatccaaaacctccgtgctgcccttggactcatgcaaggccataataacaccttgcaccatgatcaggagatcttcgtgctgcaataaaccttgcgtttgatgagtagcaagactagttcattgagtggagggacagggagatggaaacattaaaggctcaacaagcagccatcgatgaccacacaagacaggctaccataatgatacaaagagcctatcagattactaatcagcaaccagctaccgcgtctagtatcccactgggcggtatagaaaaaattgctactgggcataccgcccaaactcataatggtcagtcgtccaatccctggtcataggtccaacctatgggccaagcggtagacggccagatcctacctgactgttctttaggtggagttatacctaataactgttgggttttatgcc

SEQ ID NO: 115024 - DNA, 2815 bp, Cannabis sativa
  modified_base (99)..(99): a, c, t, g, unknown or other
  modified_base (711)..(711): a, c, t, g, unknown or other
  modified_base (2632)..(2637): a, c, t, g, unknown or other
caaacaataaagagtcaggcacaaaatcttagttaacttctcttttacattaattctcactcttcctatgaatgttattacatatagaaaacttatgtntttctacttaatttccttacctcaaatgtggagtcctcgaaattaacttaccaaagaataactcggggtactatttctgcatgcccgtctccaactctcatgtcacttctctatcaaaactatcactccacaggattttgactaagagcatagtctaatttcgtagaacttttgttctcttttctatcaggcacacagctatatgactcatgtcctgctgcaagttcaagttcttgtatttaagtacatgtgtcaaattaggaacatactttcataacatggaaatgtgaaaaatattatgtatttttactaatgttggcggtagggccaaacagtaagttaccaggccaactctgtccagtatctcaaaaggacctattaattttgggcttaactttctcctttttctaaaacgcataatccccttcattggtgatacctacaagaacactaaataaacaaagataccatagtcagtgtaccttgctttttgcccttcttggaacccgaagtggataggagattttcaaagtccatgtctgcaagacaaaagacaaagtgtcagcactagtacaaaataaataaagaaaatgtggagagataatctcccanttaagaaaattaccatagtcatcagacgaagatgaagaattaaaataattactaaactccctagaaccggtaatcatgtaaagctcaaaggggtttagtggagacatgcatgtcccaatctggatggcttgccttatcgaagttagtgccatattgtttggaaattctgaagtaagaactattatagcttaattgaacatgatgctcggagtaccaactatcaaatttatgggcaattcgatctacaccattccaaatgtaaaagttgtactaactttccttaaatttaactaaggaagtatgctcggccctaagtacagtcgaggaccatctacaagcgctaagtttattacctcgggaggcatcattttcagcttcctgagggtttatgttcttcaaatagtgggtgcgagccacataatccctgtcttcctcattagcaagaactggaacctattgccagtctgaatactttgggactttgaagtcaccagtggattgtttgctgccgagaagagcgcatgtcttcaagttatcctcatgtaataagaagtcagccgctcacaatctaaagggaagaccaagaaggatcttgtgtcttttttcaatttttggagtcggaatgggcctcctcgtaaccgctgtcaatacaacacaaacaaaattagtaaaagcctacatttattaaaattaaaactcaaaatcaagtttttgagaaaaagtcaatacttacgtatgatccaaaatacaattgtgttgatagaggcaagacctgatgtccaaaagaattcatcctcgaattcattcttattgggcaacctcacaataatcttttgatcatttgtgttggtcccgaggtagtaaaaaccacttgctccttactttctggcgggacaagccttcactaagtaaaaataaggaatttcaagtgggggttgggcactcccacttcagaatatgatacaaaacttttaaactagaaaatattctacatgaatttcgtaccagttggaaaggggggatggcgaggtagttgcaaaagtccttgaagtagtctttaagagggagtattgctccaactcttatctattcgagaccccaaccacctatcctagacgactcgctagtgctatagccttcttctcaaatcactcgtttaggaggaaaacaactgaagtctccctggcaatggacctaagtcgaaatccttgtttgtatttgatgtcgcaccactactacaaatatttgaatttgcgacggcttgaaaatagttttttttttggagactctcgctaaaaaaattaagcaactgtataaaaccgtggggaaaaatgagtattcccgacggttttgaacaatagctacaacaatagaagacagttattattaaaacataaaaattatatataaaacaattaaaccctatacctgatggttgaaaaccgtcaggtacaccaatttatatatattttttaatttattaattatatatacatattatagtaaccatcttccattttattacacacacatcccaccactctgaaaaacccaccaaatccacgacgcattgtgactgacggcgacaaaactcacggcgaactcctctctagtggctgacggtgacaaaatccctcactagtgggtgtcggcgacgaaacccaccaaacccacgagctccgttcaccaccacccttcaaaatcgacgaccgacttttgaaagccacgagctccgttcaccagtcccctctatctccatcggccatccaccaccggtgtcggccctcctctaggtaatatatatttatatgggtgactattcaatagttacatttttattgtaaccatatggttacttttttttttgacctataatagcaggttactaataggtaggcattctttttttagaattaattannnnnnattaactattttcttaaaataatttattaaatatttaacaagacctcttttaacaattaatatttatatttacaaccttactctaattattttaataattaagccattgaattataatatttacaataaaatttattttttacaaaaattaaacttctttttacataaattaaaattc

SEQ ID NO: 115025 - DNA, 3312 bp, Cannabis sativa
tacactaacttttaaaataacaaaattataattaaacaatctaatataaaattaagataaactaaattaaaaataactcattaaataacataattaataaatattataatataattaaaaagtactaattaaaataatttttaaatttagaccatatgtgctccactaagtctgcctgaagattgcgatgaatatttctatcgcgaatttgagcatttatttgaagcatcgccgaaaaattagaaatgggtccatgtgatacttcaactattggagtgtcggcggggccttcatcataattaaaatctgaaatacccttatatgtatctctttcatcctcgacaataatattgtgtaatatgatgcaagcatacataatatctttgagaacatctctttgccagaaacgcccaggaccacgtacaatggcaaagcgagattgaagtaccccaaatgctcgctcaacatctttgcgcacagcttcttgacatcgtgcaaataattttcttttctccccttgaggtaatgggatagtcttaacaaatgtagcccactctggatagataccatctgctaaataataacccttgttatattgtgtaccatttaccataaactcaaaagtgggagcttccccttgcaagatgttagttaataaggaggattgatttaacacgttgaaatcattattggaacctggaacaccaaaaaatgcatgccaaatccagagatcttgtgatgcaactgcctcaagcatgattgttagggtaccatgatcaccacgtgtaaattggcctttccatgaaactgggcaatttttctattcccagtgcatacagtcaatgcttcctaacatacctcgaaaacctcgaacctctcccatttgaagtaagcgacgaatatcatcaacattgggtcttctcaaatattcggtcccaaaaatctcattcactccccgaacaaaattcactaggcaatcaatagcagtagtttcaccaattcgaacatactcatcaacgtaatcggcaggcgctccgtacgccaacattcgcatagcagcagtgcacttctgtagtggagacaaccctcttttaccggttgcgtcaaacctcatttggaaataacttgaatgactttctagagcttgcactatgcataggaaaacgtgcttacacattctaaatcttcttcgaaattgatattctgtatagaccggatgatcagaaaagtagtcatcaaacaaaagttggtgtccttcttcacgactcctgtctatgtgatttctctttcgtccttgccttgtagagctacttctagctaagaattcattgtaatatttttcatcggaatcgtcaattaattctgaaattaagatatcatccaaactcatattttcgtacggatttggagaatttagtgaatccatgataaaacttaaagtagattaaatttgataaatataataagtaggttatatttgggcacaactttactacttccaatctcctaactaagggccttaccaccaacatcgcttcttccttcaacgcaacggtgaattcaatacataagtataaggttgataaatataagtagattatagtgaaaaattgattaaaatggggactaaaatctgatatttatagatgttaaaatgttaaattgctcaactaatttagaagtaattaaaattgtaagtgctcaactaacctaattaaatttacaagtacccaactaacttaataattaaaagttaggtgtctacttcctaactaactactacaatcctatataaaataaaatgtatgaaaaaacatcaaaaaaaaagtgattaccaataattttttttggctctctttaattaccaatgcctctaccattggataattagaacttttttctatgccttcacattgatattgatgatattatcaaaagaattcaatctcataaaacaacaaattttcatatcattaaaaagagaaatcaattaagaccaaaacttaatcacatctatttatattacattatttatctattacctattataaaggagtgaagtttggtgttgaaatttgggtcaaataattttgtcttttgttaattaaactttttgtctttttgtttggtttcttaatttatttcaagttttttagagagtatgtttctttttcttttttaattatatttggcatgcatgccatatttgttataaattttaaattaaacttctaaatatgaatgtatagataggtcttttataaatgatattattggcattgagtaatgataaataataatagatattgttggcaaccattagaaatttttaaatatagaaaatttaagttacactagtttaaaataaaattaaaaatattaactaaataaaataataaatattaataaaaatagtacaaatacataacattacaactttaaaatattagtcttaatatgactacatagattttcatgatcttttttttattccgccgtcatgtgtgatgtgtccatgacgagataatccatatattttatcatcatattatgttccgtctctttttcttttatcgccaccaatttttctaaagcaactgttttccgtgcattaacatctataaatgcagtatgtgtttcttttttttttttcctttcccttccgcttagccgccttttggccagtagggcacacttcatgaacttcatgctcactcatttccgcattggacgatgaagtatatgcccctaattcggagagctttgttctcttaccaccttcttgtggttgaaaaggttgtattccatttcagctcatcctttagcaatctccagcagggtacatacaaaaaattagaattgttattttcatatttatacatttcatgcgcaatttcagtaatttgctcttcagactaaccactatgatgtgcttgttgtactcgtttataacacccattgaaacgcgtcaccttttgattcatcttgccccaatgatctttgcattgttttccagttcttcgttcttcacctttgtggttggtattgaagtattctgcgattcgatcccaaaatttagcagaagtttggtcatttcctaccacaacatccttagatgtattaagccgtccacttattaaaagtatatttgcttctttgctccgcttgagtttacttctctggcttggtagattttcattgtctacagtggcggaactacatacatctatggagtggccatggccccccctaactttttagaaaaagaataaaataaacataataatgtataaattaaattaggataattag

SEQ ID NO: 115026 - DNA, 2738 bp, Cannabis sativa
  modified_base (28)..(35): a, c, t, g, unknown or other
  modified_base (135)..(144): a, c, t, g, unknown or other
  modified_base (192)..(202): a, c, t, g, unknown or other
  modified_base (2700)..(2703): a, c, t, g, unknown or other
cttccgatctttattattattattattnnnnnnnntgttgttgttgttgttgttattaatattattattattattatttctattatcttcattgacagggataaaaattattttttatttttattattattattnnnnnnnnnnttattattgttgttgttgttattgttattgttattgttattattattnnnnnnnnnnntattattatcattattattatttggattagcttcattgagagagataaaaattatttgtgctgttgaaaacgtagagatcaatatagtagagtatagaccgtcaatcatagcagcgggagcaacattggttgcattgaaccacaaaatgaccaagtcagaagtggagttgaagatgaattccattcctcatcataaatctctgaatattgtgagtagtttttctttgtgctattttattcttcgttttttttcatctgaatattttattcttgtattagtcatataagacaattcatgtcgtgttagatatttatttatgttggaatatttttttcttgttcatataggaagacgtgttttcatgctacaatctaattcaggagttaaagattgatgaaaagacgtccattttgtcctcgccgattgcttcatcatttacaaatgaattacacaatgaaagggaaaggcctcgcagtgacgaacaccatgatgagagagtgaatataactatgccctctaattctaaggagtaagtttgtttcttaaaagatcaatgaaagaaagaaagaaagcatttgggctacttataaaagctgatgatttacagatagcaaaagaggagtgatggcggaaatgtgatcgaagaagaggattttctatttatttttattttaagaacttgctaaagtttgtgtaacagtcgtctgctacttgatactttttatcctatataatttgctttggttttttgtgatttgaaaagattagcaaaccctaccttttgatgcattgcttttgtggaagtttatttatatatctatttgtgggaaattttatggtttacctattaaaaatataggagtacggatgttttctcttattcttttccatattcatattcttttaatatttttatttatatatagtgtatatcttacttattattttttttatacgcatgattattgtttcaaaatttacactgtcttaaataatacaataatgagactaattattcatatatcaaaatatatcgaaagaatacggaagaaagaaatgcatgggcacacttatttttagagtacacataaaatcaacttatatttatttatttattgtgcctgtgttcggtgttggccatcaaatcaatttatatttttttcttgaaaagataaactattattgtgtgtgtgagagagaagggtttgtaaagttaaaatgtgacttgtcatttacttcagtgtttggggggaatatacctgtgtaaagcgataccttcccttctacaatttcaaaagcactagctttgtagtgtgtgttgtgggtccaattcaggcccaagcaaatataatttgtccatccaaaatcaatcatgtaataatgatcacgtttttataaaagttttttttttttggtggtttagctctaaccatattttggacaaaaatttaaaaattatagtatgttacgttgtatgtttttgcggtccacaccccctaacacgtgtgaaatggtatatttttgtattataacaaacaaacaaaacaaaatgtcgcaaattaagccatctttttctgtttgaaaaaaaacaagaaaaagtttttttttgtaaaaattagtttatgacttgttttggttagcatatgaaaaacttgcacagctgcaaacattatttggacatgccattatatgtctatttaggtaagaaaattggacaaatttgtataaataaaatttgagtttctatgcatttaagggtgcctgtaataaaaacccatctactttttgttaagagttcaaagctatattattattttacaacaacacaagtactcctcccgtaaccctatgctcctcttctcttggcttttccatcctagttgaggacaagaaaattcaccataattttgaactccgttaacatcgttatagcgttacctcctctcactcccttctgttcattatcaatactaatcttgaaacacaccatgattattttggatgtccaacactatgaagatcaccagcaataacatctctttacacccgagaaagacttctatgccaactattattctcgagttagaaacaaccattatcaatttttttttttctctttttaacaagtcaatatgtaaaaccataaagtttcattaagacacttctatgcatatcttttggttttgtgcactattttctatcaaatctgaaactctataaaaattatgaaaacatttcaatggtttcaaaaagaaaaagacttggtaattgaagaaatttccatgccaattcaatatggcgccactactagaaaattggactttagaggcagtttttaagggcctttagcgtcaattttaataaaattcgctactgacgttgttccaacaacgctataggggagaagtattgaccgatggtgtaaggtaaccctatgctgtcgattattataaaataaccaacaacatagggagagaatgttgggttttgtgccctnnnnaaaactcatttcaatataatcaagatcggaagagc

SEQ ID NO: 115027 - DNA, 2091 bp, Cannabis sativa
aacacccctaattctatttataataattataaatagaatggtaaattttttgaaaaatgagcttcctcatatttttcaaaaattgaccccttcaaatatttatatttaatttgaaaaatatttctgcccccgctgcagactaagcgtttttttaagctaaacatctttaatatcatttttactatggaaaaatattataaaaaatttaaggggtttttttatttttacatttcaaaatattttttttttttgcaaaatttcacacaaaaaccttatagcaactaacagagcaatttaaatcgtaaccaaaatctatataacaacccacatagaaatcactggagaaaccatcggaacaacccaatccgtaaatttagaaaaaaaaaaagttaaaaaataatatatgaggtaatttcccaaaatttaaaagcattattaatttttttttcttttgaattagtactaattaatgactatatatatatacctgaatttgatcagccaagttgacaataaaagcatttggagcaggcttaacagtgatccaactcttgtccttacgtatttggagcccggcaacattttcatcgggcaagagaagtgtcatgccgccggggtcagagtgcgacgacagccctagggttaggtcaggttgtggacattttgggtagaagttaacccttaagcaagctccaatgtttttttctccaccaaagcaatttaaaaggtggtcctcttttaggccaaggttcatagataaaaccttcatcaatctttcacctaaactcaccacttccttttcatactcttcaatcacatttctacaaaaaattatgaaaattattttttaaaaaattaaataataatatattaattaatggggacaccaatgggttattattttttttttttaaaaaaaataagtcataaactatagctagaaagtagtaaagcattattatataaataggtgttatgcataagaggaccaccgacaactagctatgggagcaaaaataataagtgcttctctcgtacaaaattgtgtggtaccctattctctcgtcaagatattggtgctcatgaacaagcactttggcctttataataactaagaaattttcaaagagacaaaaaatttactaaatttatataggtgtgtttacaaaaatattgaattttggataaaaatttacaattttaccatcacgcgaactttttttacaaaaatactgtctttttataaaacaaccgtaaaacaattaaaataatatgtggaacaactaaaaaacaaacgtggtacaacagtgaaaatttaacataatacacatggtataaaatttacacattattttttaaaagatgcctcactacaaaaaagtaaaacaattaaaaattttaatatgtagtgtaaaaattcatttatatataattaaaaactgaacgttttaatcataaattataaataagcattaattttaagcttactattagacactaataatactcatcaccttctataaattacactccacaattaattagtaatattctcaaaacaattctcattatcaatagattcaattttgtttagctctttatggaaagatatattgaatgagtcaacaactagtcccttagaaatagactatgcaataatattatatgataaaagtatatgtttgttttgtgtatgtattgtgtagatataacaaacatctcatcaaatttttacaaaattacaaatattaattaaataagttgtaatatcaaaaatgcattaattaaaataattatttttttaatatcataatttcttcaaaattttcttaaaactagtgaaacatatactataaattcataacacttaaaaaaaaaagttaaaattataatttttttttaaaagaaaaagcatcaagaattgtatgagctaaaattatatatatagaatcttataacatttattttagcatttcacgtgtagcctaaagggtaagaataaatatacaatgaagtgatagctagtacttggtcttcgttgactcatacaattatatatatataaatatatttgcatataataataataat

SEQ ID NO: 115028 - DNA, 3673 bp, Cannabis sativa
  modified_base (1260)..(1260): a, c, t, g, unknown or other
  modified_base (3644)..(3648): a, c, t, g, unknown or other
ttgtcatttaacaaaacacagggtcaaattagtaacttttgtaaaatagagggtccaaaatgatatttaccgattttatttatttaaatcgggttaacccgaccaaatagatcaaactatcaatcgggttactaattttttctaaaacaattgagcggattgtacttagaatttcgcgactcgatgtttacattggatttaaaatatgtaatataaaccgatcaaaccgaccgatatacaactttattaatatagtttttactaacaatttttaaaaaataaaataacaattccataatttttttttaaaaaaaatgggaaaatccaagtctaaaattccacatttatataaacttaaaaaatatgtattttttgctgaatattaaaagaaaaattacacaaagtaccaaaaatatttttggtacaattttaacatattacggttttcaatttttacgttttttattatttgttttaattacaaatttacagtatactataaaattaatagggaaacaataagaaataacaaaatcaaaacaaaaaaatcaacaaaatatgcaaacaacaagaaattagtatgaaaataacataaaaatacaataatatgaaacaatagtttgtatttttgtaaaaaaaaaaaaattataaaaagtaaaaatatttaaaaatcggtacaaccgtatttttataattttttaaaatatttttaattaattatgaaataatcccaaaaaaaaaatgcaattttctgctagagaccaatgagccaattgggcgtactaattctacaatcttccaacaaaattaaagggataagttgataactatctatttttattatatattaactaaatataacaacaaaataattttaattgataaataatctcttttataattaaagtaccgaatataacctcacagaacttatcaaaattagaatttctaatacacataatagggatatgacctataaaactgggcataaatttaaaaatagtaaaataaaagtaaaatttaaaataaaaaataaaaaatagatataaaatataatttcctcaaaattaaaagaccaaacccaaaaccatttgagaaaaccaagagcaggcccaagtgttttgggccttgggaaaaaatctaacatgatatatttcttgaaaaaaaaaactaagtttatattaagaatagtctaactaaaattaaaatgaaatcaaaataaattaaacaaaaacaataaatatacatatatatatatanatatatatactaggtagatgttacatgtcaaagctacgtattgttagttttatttgaagttttagattattttttatatttttctatttttattgcttaggcgttttttatttgaaagaaaaatatttatactcaaatgtataaataggcaaaattaataaatataaactggcaaaatgtattaaacgaataatattaatgttttgaaaattaattaaaataagaaattgtaacttttgaaaatttaaaaaaaaaagtttaaagtttaaaaaatttgagaacatactccaacaatattaatacaaaaaaacagtgaatatataattgattatatagaaattattctgtacataattaaaccaatttatcaatacttgtgtataaagtaaaacaaatagaatatataagacaatgctctttggaaacgaatgcacatacagtatctactgtttttatataatgtggcaagtattgagtcatcttttttaatatttatttttctttattaatttttttaaataatatgtttctaaagaaattttccgtaattatcttattatttgttaaaaatcaaagagaataaccataaccatgacccattattacaccatccctttctctgtgaaatgtagtctcattttcatatcatcatccccacaaaaggaaaaaaaaaatagaatgccttattatttcgccataggaagtggtcgaacgaatcccaagcaagactgaaaaaatcataaacctgctccactgtcaattatgtattgtgctccaccaaaatatattcacctacctttaagcctcaaaaaatgtcaaaaagcatattaatgatggcgaaaaatcataaaaaatgtaaatgtacaaacaaaagatggtaaaattcttcaaaggcattctcaagaaacaaattagatcaaaatagcacaaaatcaatatttataataactgtaggataatttcaatgaggtatggtgtactaatattggtggtcgtaatcacacatatgtaacaatctttttttaaatgatagaactgatcacatatatatttgcactaaaaaaaataggcttcaataaagataaatatgattgatacgtgcagtcatatattgattttcaatggaataaaaattaaaaaataaacaatacattaaagagtgcatatcaaattatcgctcacaacaatcaataaacaatatctatttaaaaaaaaaaatgctaaaactatatatgaagaacttactattgcgatagcaaaacctaacacatgtttgattaagtgctgagccagaaatctcacatcaccctgcaataaaaaagttttaacaattataaaagttcaaaatgcagctattctcaaccaccaacaaattaatatatgttaaatacatccaaaaagcttatgcagaaattactattgttataacaaagcctaaaacatgtttgattaaataccaaggaagaaatcttacacccacatgcaatacaaaagttgtagcaattataaaagttcaaaacacaactactcttaaacaccaacaaatcatattaaatacattaaaaaaaacttaattatatgtaatatggctcacacatagatatacacaaatacaaaaaaaaaattatcaaccaagcctacttagctgatgaaaattgcctcagagaagagataaatttattagtaccacatggagacaaatgagagacagaaaaagacaaagggagaaaccaacgtgcatgctctttaacttgattacgcatctcgagactgcaatattaggagagaaaaagattttagagacatgcaaaaaatgagaatcaatttaccttgatgaaaaattcctcgatgtttgaagcggtccttcttgcgacactaaggccattttctgtgctcctggcaatatcatattctcgttgttgggcttgacttagaaaatttcttcaaaacttaaaaatagattattcaagactctttgaaaggttgattgagagtggtgacccagcgatttgatcctcattaatttaggggagttggtttacaatttcatcaacagaattacgatttcagtggagttaggtttatgattgtgtagagaagttagggttacgataaaaacaatttactaatatttagagaataatcaattgaagagaataatcgcacttcaccaggattttaacaataatattaataatataagatattaatgatgtagttttatttttcaaacacggagagttcgagacttattttgttaaaattctaaatatgtgttattattaatattattaatatctgttaaatttgggaatataccgtttgttagagagatatgtggttaaatgattttttttaattaaaaaagattgtttaattttttnnnnntaattattgggtttatttgttaacg

SEQ ID NO: 115029 - DNA, 2619 bp, Cannabis sativa
  modified_base (46)..(52): a, c, t, g, unknown or other
  modified_base (2552)..(2592): a, c, t, g, unknown or other
tctttattgatattgaataatacggattacattgaaatggagtttnnnnnnnggcataaaacccaacaacatcatcaacttgaaacaagttatgaaccagtgactcattccacctgccatcctcatctattagataatttgcctttgtatttggagggacatttacccgaacccgaagggagaagggaaagcttctaggaagccatctatcttcattgattctggtattagaccccgaacaaagtctccaacagagccccttaatcaacaaatcacaaccccagatgaaactacgtcacatataggaagtgtgagctattaattgcacctctaacaacccctagtttgggcagtaagtctctttaagaacccacgccagcaaagattgagattttgtaagaattttccaacataatttggcaagcattacttgattgaaatgtcccatgttctgtaatcccaaacctccacgacatttagggtgacaaagcttatcccaagacccccaatggatctttcgatcggttgtagcaccaccctaccataacctcgcttctattgcatggatttcatctataattttctttgtgagccgaaaacagctcattatgtagcaagaaatagcctggacaacaaatttgatcaatacttcacgaccagcttgagaaaagagacctcgcttccatccttgcaacttgttttggattttttgttggaccgtttcaaaaacttctctctttcgctgccccacataagccgataaaccttaataccgagcctggcaatggactagtttgagtcgaatagagctagcaatcaagtcacccatttcttctttaacccccttacccatgtaaatttcagatttttccaaatttatactttgaccagaaagatccagatactcattcagaatacgcataaaagtgtttccttctgttgtggatgcattcataaagactagagtatcatctgcgaagaatagatgggacaagtggagccccttggtgccgaaccgaatatcgtggatagcatcctctctctttacttcgtgaatcaaacaagaaaatgcttcagaacatatcaaaataagtaaggagatagggggtctccttaccaaatccccctttgaggaatgaactcatgacagatgtggccattaagaataatcgcgaaagaaaccgaggtgatacagttcataatctttttagtccaccgatcatcaaaccccaaacacttcatcattgctaccaaaaatttccattcgactcggtcatatgcttttggcatatccaattgcaaagccatcttttgtccatttcggaaacgacccttcttcaaacaatgtaggctttcaaacccaaggatcgcattatcctaaattagctgaccttcaataaaagcactttggttttccgatataactaatgggagacatgtctccatgcggttagccaaacacttagcaataatcttgtaactggcgttgcaaaggctaatggggcggaattcggttaccttggtcggatggtcaactttagggagtaaacatattaatgtcttgtttatagcatggcagtccaaatcatcattgagtatggcaagacaatgtttggttatggctttacccaccacatcccaatgatcacggtaaaataatccaggaaattcgtccacgcctggggccttgaggggatcaatttgagctaaatttgcctgaatattagtctcagtaaaaggcaacaacatttgttcattatctaggaaagacaaccgacaaggaacaaaatggtggagctatccaaaatccattgtcgactgttgttgtgttgtaaagagctgctggaaataatttgtgaatatttcctcaacttttattgaggatgtttgccaaattagattttcatcaaggataccatggctatggttcttgttttgtcgtttacatgcaagctgatgaaaaaacttttgtgttttggtcaccatttttgcaccatagagactgactacgttgacgccaaaaggcttcctccttggcaagatgacaattcaattccctttccaccctcgataaaagcttccaattttggggttcggtggatgaagaaagggattccacttgagctttaagattcttcactttctgttttgcaagcttctgctttgtttgattccagctagcaagtttttgtccacatctatcaaaactcccaaccaaatgggcaagcgactgatttggccttccaactgtccaacaatctttaaccatggatttgcacccttcatcatcatcccatgtttgttcataatggaatctagaatgccacagcttggaggaaggtggagattagtggagaacgctatgctgtaacagcaaaggacaatgattcgagttccatcgaggcaaatgtttcactatggccgcctagaacatattatgccattccataataccaaaaacacgatctagtctataaaaaacaagagctttgatctaccattacaccacgtgtaaagattgttgggtattatttaccaggatctagatttannnnnnnnnnnnnnnnnnnnnnnnnnnnnnnnnnnnnnnnnaaacaatggaatttaaacacatataaa

SEQ ID NO: 115030 - DNA, 2320 bp, Cannabis sativa
  modified_base (48)..(48): a, c, t, g, unknown or other
aaggccaaacatgccaaattgttttcaaaaaacaattttctgtttttnaaaataaaaaataattttttagttatgatgccaaatatgcacttactttctaatttcaaagacaaaaacttgattaaaaaatattaagtacttaaaattatttaacggtaaaaagaataatagttgagtgtaacaaaatcgactacttttattctcgaaattgttacacaggtaaaactaaaataattgttcaaagtaatacctgggaaaggaaacctccaagagtaggaccaatcactaatccgatcccccatgctgtgcttgtctgaaaaattactctttctcttatatattatatcattctattttggtatttcaaataaacaagaaagggcatgcttgttcttactatacacattcccaaggcttcatattttgtatgacaaatttctgaaacatatgcctgaaaaatatgatcatagcttaataatattattatgctcttaaattatatgttaatgttaatgtattccatttgtttgacacaatctgttttcaataatgctcattttgtgctatgctagcttactagttagctaaaaatggtggcaaacttaaataataatgttcaaatccacaataaaacagaatgagtattaccctcattggtccaagtattccacacaaacttccaagaagaaaccttgttgaaactgccatccaaaagtttgtactaagtccaaacaatgtgttgaaaattatcctgtcacaaaaaaaattgttaaaacaatattggagagaaaagaatgagaccttgacagaaatgataaagcttaattaagctattaattaagtaattaattagaaagtacttacactgcaattgtgccaaaaatcataactggttttcgaccatattcatcagctatcattccccaaataatggaagtaagaaatcttccaaacatgaatgcagatcctttaattaaggaatatatattaaaagacatcataaaaaccaaaatcttgtattgatataatcataggtaatgaaaaataggctcacccacaacaccaacatagtaacctatatcctcttctctttttgcaatattaaaatcttttatctgaaaagatcaatttagaatgagtaatgattacgacacactaatttaagtatgcatttggcattagtctttacaaaaattgagataaattaatctcttcatgtatttcagtgataagaaagatactataattttgcatccaacttgtttttcataatttactaaatattttacatatatttttaattcaatccaatctaatcttatttttcaaatatgatctacactttaccttataaattaatatgtaagttatattatactatagaacaagtttcaccaacaaacatagtaagtaattaccatgaaatataggaaagggaacaaagatgacattggcaaagctgcaaaattttaacaacaaaattaagaaaaagcatattaactttaaaaaaatgaagcaaatgtttattgctttaaatgtagtaatagatataggaaatcatcccatatattacattttatttagaaaatacaggacaagattttattttcttaaacagagaaattacctgtaataagggcaagaagaaaaacatagaagaaatgtttgaaaggaatgccagaattggattgtttgagattgttaattatgcaacctgggcaactttctctttcatctaaatagtgaatcatctctctctctcctcactcatcaatggtagcactactaaattactatattctcaaccaatttatttaattactatattactattactcttcttgtccttcaacacgttttatacaagtgtcacattacattcatatgtgtcactgtcatatatagccacgtcatatatatgtatatgtgtgtaaatgaaatgagtttttacatgattcaaaatgacactatctctttctgctttcatgacacctttgtttatgtgttaattttatgccatttgtttagttttaggtagtgcatcatctccatacccagtgacagtaatgtaaacataggtcgagttttttttgacacggctcgaaattaagacgagtttggaggacacgaatatgatcaaacacaaaaaaaaatatgaatttagacagaatacgatataatattataaattggtacaacagaaaacaaaaaatatgtgattaagcatgacacggtatgagaagcacaaataacacgacacgtaagcacaaatagattagcccgaaaaacacgacacacaaaaaacttaaaaagcacgaca

SEQ ID NO: 115031 - DNA, 2076 bp, Cannabis sativa
aataaatttttcttaaaataaataaaaaagagctgtgttgtaatgtgaaaaataaataaggttggaacttatgttgtatttatgtatccaaaatattaaaattacttatagatagaaaattatgtacctgtaaaatcggtggttaactttccattagaaaatcgaccagtgggcctacgacctatgaaatccctaccataaggagggaaatttgccctaataatggtcggaatttggttgttattaccgacatcaaccactgaatctccgaatataaacagagctggaactaagggttgcccttcaaccaaacacaaaataacaaaaacaattgtaccaaaaatggccaaacagtaactttcagaacccattttatataacattataataatattattgtgcttttataatatatatatatatattttctgagctaaaaaaatttaattttggcaatgcaaaaatttatataggcctaaatgatatatatatagctctttgaaagagaattagagttgcaagaaatctataacatttttttaagtttcttgattaattgtgtcatggtctttccattctttctattagaaaattataattgccagaaactttagattaatacagttcaactagcaaactttttcttttactaaatagttccccaagctcatgaatatattttgtacaacataatataagttaattaaatatactgatttttgtgaagaaaaaaaaaacatttaatgtaatatttcatcaatttctataccacatgtcaatacaattaatttaatatattctcttatgcaaaattatagcttaggttaatctttgaatctttaatattacatctgaatatttatgattatatatatagatataaaatatatcaaaatcatagtattattaatgatggtcaatttttttattatccaataaataaaattaattaatcttgagtaaaaccaattggaaatgatcatttagatttgatgggtcgccagcaacaatgtatattttcattaaatatggtcatagttttcttgtggactctaattttggtttggcttatctctaaagaaaatgatatattaatttatctatattagatttgtttataattgcaaaaagaaaccacttctgctccaataactactactagttgtttttattattttatttttaaagaaaaaccacaattttaacaagtgtaaatatatgtagtagaaaataaaaaataccaaaaagaaaaagatagttggtttgtgtcttgattatatatatcatttgagctgttctagcttcttggacacattaaaaattataagacctaatttgaagctttaacaagaagttgccatttgatctaattatcaaacaaaactcgtaggttaagtcatatattttgaaagaaatcttttttatatatgatctttgatcagatcatcatgcaaagatatacatgcatataccaaagtactttaaaataaaagagttgtccctttaaaatctagtagatgatcttcaatctttgactttgcatatcttcaatcaagaagccataatatgaaaattcttctctagagctgcactacaaaaaataactactttgagtgacaattttttagtcacaacataaatgttttgtgactaaatgtgattttcagttacaacaaaatgttacttgtgactaaaatatagcatttagctataagttatcactaatttagttttattcacaacaaatattgtgactaaaaacacatttagtcacaataaattgtaatttttatgactaatacttttaactacggatattttagtcacaacataagaatgattttttataattagtcacaatttttttacttttaatcacaaattttatattgtgactaaaagtaagatttttttgtagtgctgtcctaatatatattttagtagatttgttatcaatagcccattaataacaataagctaagggaaatttgattttctatacttacatatacctaatattttatttctaaactaatacatatcatcattgaaaatatatgatcactttatctaaaa

SEQ ID NO: 115032 - DNA, 1141 bp, Cannabis sativa
  modified_base (1079)..(1116): a, c, t, g, unknown or other
ttttaacgaccaaaaaagttcagtgggcataatttgatacatgttaaagttcgagaaaaaaaattactaattagcctaacttaaataaaagtcacaatattttaggcttcttcttgttaaattacatacatacccttttcaaaaatacatataacaatacaaacaaattacaaaatatgttggttttttctttctttcaatgaactattagtatattaaaaatagcatcatgttattaatgtggtggtgtagaaagataataataataacatcatagcaatttaaagatgtacaattgtaatttttttctttaatatttggcttttctcggcagtttttcgaaaaaaactgtaacatatttttttcttttttgtattgtgagtgggttgtgttacttgtgtaaagttatcataataatcttttcctattaatatattttgcaaattcatgcgccactaattaaaaaaaataacataagaaaagaaaaagcgcattgagtattaaatgggtgcattgatcagtatcagttccatatatacatgagtgaaacaaaaaatcttgtgtttgagatgttgacgttatattatcctcctgtcccctaggatcaatttttttattttttttcttgatagtcttcaatttatttacctatatatatatatattaataactttaagaagcaatggtagccacacaaaattaataataaatgcataaattgatataattaaatagaagaaatgattggaggtggggacaagagtgggaaacgtggaagtgagttaagggaagagaaaagaggtagccatgtgcgtgcaaagacatgcatatatagagatagtgtttgtgtgaattttagaccaaaaaataaaagcatccatttaaagcactctctatatctgccaaaggtgtttgtttttggtttttttagcaatgtgcactactgctgctgctccatcatccaaaataatcaaaccaacccctccaccactcaatgtataatttatatatatatatttggaaaattctttgatgcaccccttaaatgcactcatatttgttttagcatccgaaataannnnnnnnnnnnnnnnnnnnnnnnnnnnnnnnnnnnnntagttatttaagacattttgcaaaa

SEQ ID NO: 115033 - DNA, 6430 bp, Cannabis sativa
tcatctacccatctcccttttgcaacatccaacttcttcttgatagtatcttttaaagttttattaacaacttctacttgtccattcgcttgggggtcttgaaactgacgagaaactcttaatgattttattcctttcacagaactcagtgaataattcaccatcaaactgagttccataatcagatactattttaatgggtattctaaatctgcaaattatgttcttgacgacaaaatcgagaaccttcttgcaagttatggaaactagaggttcggcctgtccactttgtgaagaagttgactgtcactattgcgtactttgctcctcctcgccctatgggtgacgccccaatcaagtcaattccccatatagcaaatgggtacgatgaggtcatcattctcagttctgttggtggtacacgaggtatatgtgaaaatctctgtcatttatcgcacctcttgacaaattcatgtgtgtctttatttattattggccaatagtatcattgtcggattatcttatttgacaagctttgtcaacctgcatgatccccataaaaaaccttcgtgaatttctttcattatctcgcttgcttctgtggggagtacgcaccgtaaaagaggcatgtaataaccccttctatatcatttgccttctactatcatgtagcgaggtattgaatacaagagtttttatgctttgtttttgtctgtaggaagttgctcgttgagtagatggttaattatgggtgtcatccatgtaggtgatgcatcaatcatctcaacttcttccttttcacatatacttggttcgcttaacatttccaccagtgcctaatttaagttatcaagttcattttgcgaggctaatttggccagtgcatcaacatttgagttgtgttctcttggaatttgttcaattttaaaataatcgaacctctccaagatttttcaaactttctccaaatattttttccatctttaaacctattgcctagtattcgcctagaacttgattcacaatcaattacgagtcactatagcatataaattttttgacttttaacgttttggccatccttaaaccacccaataaagcttcgtattcagcctcgttgtgagaattatcaaattggaatcttaatgcatagtgaaatttaaagttttctggcgagatcagtatcattcctgcacctgagccattttcatttgatgctccatccacgtataatttccaagtttccgtatctcgatggacaagtggattttcatctggaactatcccttctattaggaaataggccaaagtcctggcccttgatggatgttctcgggtgataggttatatcgaatttccccagttcgatagaccattttatcaaccttccaaaagaatctggttttaacaaaactttccttaatggttgatcggttaacacctttatgggatgtgcttggaaataaggccttagtttgtgagatgcatggattaggcataagacaattttttttaagagggggatatctcgattctgcccccagtaaccttttactaacatagtaaacaggttgctggtgctttccctcttctcataccaatgctgcagtgattgcactttctgagacaaccaagtagaggtataaagtctctctagttgttggtttggccaagactggaggtgttgataaatgtttctttatgcccctaaaggcttcctcgcactcatctgtccattcgaacctcttgttacctcgcaacacattgaagaagggtaggcatttatcagttgattttgagatgaatctgtttagtgctaccattctccctgttaaggcttggacttcctttggctttgtgggtgatggcatctctattaaagccttaatttttttaggatttgcttcaatgccccttgcattaactgtgaaccctagaaacttccccgaggagactccaaaagaacacttctttgggttgagtttcatattgtacttttggaagcactccgcgaggtcttttgtgtgatcttcacactttaccgactttaccaacatatcatcgacatagacttccatgatcctccctatttattttttgaacattctatgtactagtcggtgatatgttgccccagcattcttcagaccaaaaggcatgactttataacaaaaagttcgatgttggttacaaaacttgtatgctcgtgattagggacatgcattttgatttggttatatccagaatatgcatccatgaatgtcattagctcgtgtgcagcagttgcatccaccaactggccgatccttcgtagtggaaagcaatcatatggacaagctttgtttaaatctgaaaagtcaatacaagttctccaagtaccgtttggctttgggataagaacgggattcaatatccacgaggggtagaacgcatcgcgtatgaaatctttggttaataacttgtccaattcttctttaaatgccctttgtctttcagaatccaagggttttcttttttgtcttttagttgggtaattacggtcaatattcaaatggtggcaaatcactttagggtcagtccctaccatatttgaatggctcttgacaaatcgatcttggtttgccttcagaaaatttgttaattgctattttagtttttcattcagatttttcccaataaacacacatctagtgggattgtctaaatctaaaataatttcttccagttcttcaattggctttaactggtttttctcgtcttggattcgaggatccagatcctcttctttcttttcgctttcctctgttatgaccaccattaattgatggttagctcttctactctgaagttctacacgatagcattcacgagccaatagttggacatctcgcactacacctactcttgacggtgtttggaacttcaaagataggtgtttgattgaactgactgcccctagtctaatcaacgcagggtgacccatcaatatattatacaccaatggtagatccacaattagaaaattttgcattaatgttgtggataatggtggcttgcctacagttaatgggagttcaataatgccttgactggaaacactatctccggtaaatccacataagtttaccatacaaggttttaactttgtattttgtagtcccatcttctttaatgtatccttgtaaaggatgtttaccaagattccattatccaccaacactctttttattcttttgttggcgagttgtaatgtaatcaccaaaaggatcgacgtggggatatctcacgtgttttgtatcttcctccgaaaatacaattagaggttcttttgttttggttttctttgatggttctagagcaaacactgattgctcgtttttaatttcattgacatatctcttctgggcactactactctctccagtgagatgcggccctccctagattaccaaaatgtgttccccttcaataggaggatgttgcaatccttagtttcttgggttattgggcggatttggctggttttgctcattacgatgtcatttgacatactgtcgaaaataattgtgcgagataaggctctctattccgtctttcaactgacgatattcttcttttgtatgccctatgttcttatgaaatcgacagattttcgttgaatctcttttgtttctcgcatgtttcattggttcacgcttgcggaatgcaaccatgtgctcatttgcgagaaagatgttttccctagtttcatcaagctcagtataaacagtgtaaattggcacatacttatcgtgctttttccgattcttcttatttttagatgattctctggagtcatcttttcttttggtgttagaacctcctgggttgtcagcctttgtcaagacggtacttgctgttgcagtgttgggtttatttcctgagctagtctttagcaacttcatctcttttcttgcttcctctttgtgcataaacacttgcgctctctcgttgaattcattaaaatttctcaccgggcgaccttgcaagtcatcccacaactcacccctagctgttcagaggtcagtcatgattcccgcttgaagagcagtaagttggataatgtcattcaagtttctaactttagcagcggcagtactgaagcgacttaggtaagccttgagtgactcgcctggctgctgctttatgttaattagggaggatgcttcatgttgcctgcctcttactgcctaaaattgtttcttgaaatccttggacaactgtttccaagaatttattgaatgatgggcaaacttattaaaccagctactcgctgctccagtcagcgaggtgggtaataaaatacaacgtaaattattcgagacgttgctagctcgcattatagtattaaaatttctaaggtgagcgactgggtccgaagtcccatcatactgcgtgacgtgagggtttttgaacccctgggggaatttagagttcataatgtctggatggaaaggctcgggctccttgtctgagtcataactaggtaacttcccatattccccatcttagtatctcttgaatttatcttccaactcaatgatttgtaattggattggatcctcttactgtccgttagcattgagttgttgtcgtaaataaggtgcattctgatttaagcgctcgcataaatcgagttgtctacgattcaaatgttcacgaagatctggatgtcttcgttcatagttgctcacaaacctcgtaagtaactctcaaattgatagctcctcatattgctcatactctcttgataagcataacaacgaagtttatctcctcctcgcatatgcctttctgatcgactgtgcccttaggatcttgaatgcccttagctagaacttgcctcatcttggataggccttctccttcgaaaaaggttagatacacgccctctatttaagtacgtgtatgcctcctccttgtcagttcgagaaggacgctaggggtgtctcggtggtaacccacttgtcctaggttgagtcccaagatttctctcgttattacgaaggattttccgtttcctagttctgggttgccttatgttcttgtttctacaagaagactctgatacatcattatttttattctcttgattcgtaaattcctgggatctttgaggtacttcttgacgaggtgcttgattattctgttttattttttttatatatatatatattttaattaaattttaaaaatgtgccgaatagaaatgtaattaaaaactaatccaactctagtttgtattagatttgattgaattttataacctacttggattaaattagatcataattttctatgttcaatcaattaagagtgctaccgttaactacctataacaatcttttaatcaatcttcgtgctcaaaaataaatgtcagaatatttttttttaatttttttttcttgacggtgttcattataattataatactattttttgtaaatttttaaaaattttgaataatttagagtacgtaaaatatgtttgaaattttttgaacacgcgtggtagattagaatataaaaaactctattttcagtattgtaaattattcaatttttttaaaaaatttacagagatgatattgtactataacgaatatctctataaaataaaatttgaaaataatattttaatatgtgatttcaaacgtaaaaattaataaaaaaaatttataataaaaagttgtaactagaactttaatcagaaaaatgttaaaattggatggaatgtcgtatatgtactaatgtaatttatataatattttggtgaataaatggtacctttgctcttttattaggtataagtttaaaatctgaaaatattggttaactaggtaggggagccctacatattattattattattattattattattatgaaaagacaattactttgtcgtactgtgagggactgaccccttgttgtaccactaacctaattatactgttttctcattcctctttaatatgtatctaatgcattccacgtggctaaggattatatgatttcatcttcaaacattcatttacacaaagctactaattaatcatacttgtttccaaacatggagtccccacattcacacatgcatgatctaacacattactcatataattttgtttgtgtataacatcttagaaatgttgcaagtcctttaagcttaacatcaaagtttaatcttccctttatatgcacattatacatatataaataaagtaaataaatgtttaatatagtcttatattgtttgttgtctttctatgaaaaaaaagtcccagctagcatgagagaatgttgagaatcatgaaattctatcttaaaattaattgacaatgagtggagtagcccatgttcttatatttggctcaattctctaccattta

SEQ ID NO: 115034 - DNA, 1535 bp, Cannabis sativa
aaaccctcttaacatttacaattgctacacatatgaccttaataaaaaaaaaatagcggtaaaagtactttatcttacgattttgttacaatcgtacctttttttgatctttaagtatcaactcagaaacacgtggtgacatattattggactatgtattaaataagctaaagaaatatgtagccacgtgtttctgagctggtatttaatgggcttaatcggcacttaacagccaaaaaaagtacgactgcaataaaatcgtaaaataaaatacttttggcaccacatttttttattaagatctaatgtgtaacaattacaaaggttaaaagggttcaccgtaaatatctctatttatagctataagcaaaaatgaaaggttacctaataaattattttaaatttttcaaaattttacagaatattttaaataactataacgtacacaactataaaaaaaaatacttaaaaaattcttgtaaataccaaaacaatttgaaattgcatctatgcttatattttatggagatgcttttagaagcaccctaaataataaaactaaaaagaaatatttgaaggaacaaacaaatgggatcccaaatccaatgacaaatcatataacataacggctagttggactcggaatagagtaccgttgtgattgtgagcgagtgagagagaaagtaaaagaaaacccttttgtctcagctacctctcaattcaatctcactcagattttcccctactaccaattccagaggaatcgaatagacgacgccatgaacgccatcaacttcttcaagaagaagacttcacccaaaggtccatttctctcttctcttctcttctctttctactgtttagggttttctttcttatgtctttttctctttttcattggaaatcttcttcggtggaacaaaagtatgtaatgggttttcattttatggttaaaagttttgattttgatcccttctattgaaattaacagaagctcttcggacaagcaagagagaaatgggcgttgccaccagaggtaatgtatcttcatcttatgctgttctttgctctttttgctataaacaattcattttgttaaatgggcaaatccagattcagatttccaagtgtcaatgcttagtgttgcttctttgttatgtgatcataaaacttcatattcagctctaattacgaaaacacttaaacatgtttcacacacagaatactactttactcatgttagttttgtccaattaccatattgtgtaatcattagtgtgctgtaatcattagtgttttgttaggatcacacttcagttcagctgtagtaatcttaacacttcttcttatagtactaatgtgctaggccttagggtagtaaataaagagagtaattgggtaattgtaatgggagggattggtgctatatgtatataagtgagtagggaaggtaagaggaggagagaattattttgttaaagtgagcattagctcttgggagagagttggatctctcgaatacccagcaacttgtt

SEQ ID NO: 115035 - DNA, 3533 bp, Cannabis sativa
  modified_base (3121)..(3124): a, c, t, g, unknown or other
ggctcctgaaggatcgggtggtagcggcggcggcggcggcggcggaggtggtggggtttcggggaatagtaataataacccttttccagacccatcttcagggcttcctttctttaatttaccgttgaatatgcaaaatgttcagttgccggtggatggttggggtggaaactcaggtggtcgtacgacgccgttttgagatgagctaataataataataattattattatgtagaaaaaatgggattatcatcgatttgaggaaattaattaaggattatatatgtaatgacgaaaatgggtctctttggtgctataatattatgaagaggaagaagaagaagaaaaaaggtcagaaaattaatattattatccagtgttatatatatatataaaatatttatatatttcttcctcttatttaatttcttctccttttttaatttttctgatattattgtttgttgatgttgtagtagtttcctttttttttaattagattcttgatgaaatacatatatgttcatggtggaaattaatcaaactactctagcttatttcttgatttttttttcctttaattactttcttggtttaattactatagtagagtttcgattatgagatcaacaaatgaaactatatattatttgtatatatattgtttttgttttattctgtaacgagattctatttttagaccaactgtttatatatatataaatatatattatcttgatcatgaccaaactttgtggtattttcattattttatcatcattattatatataataggcatatattaatcaacaaaaacttatatagttatatacaaataatgttaaaatttattgaaatctttttcttggatgtgtaaaatgggatataatttgttgtgttcttttggtttttcgtacggtatagagtgttaaatctaagcataaaagcaagggttttttcttaagagtggaataattaatatttttattaattattaggtatttgggtgaatgtgctgcattggtcctcaacacatatatacttaattacattatgtttttattagcatattacttattttttttttagaaaaaacaaataaatttatgatatatttcaggaaaaaaaaaaaacgagcagatcatcatcactaaatggtatatattaaatgatcttgaaatgaatgaattggtgcttgtttaatttatatgaagatgatatgataatattgtaggaatcgttttgctgctgtttaaatacatacattaatttataaatatataaatataggttgaattatatgccaagatcaagagtacttgacaaatcactatgttattataaaacatacataattatatatatatagaagcattttttgaaactaaccctagcaaaatgagttgtcttttctcttatgtatgttgtcattttattatagttttaattcttcataaaactgatcatcatcatatgatcaatgagttgatcatagtaattaatacagaaatcgataatttttgctggttgaatctgctgctatatatctttacatacatttatatatgggcataatatatagtatatatactatattatgcacacatatattcatggtgcagatatatgaatatattgggttatacatgattatttctgtagttacattatcacaatatatatatatatatatatatatatacatttctgttatcacttgattaattaagaaaactcaacttgtttaatttgagaacaatctcaggctgtaaaaatgttcaatcacatgctattaatatatatatatatatatgttcaacgttcaattaattattttaataattaatgctgggaagttaattatgtttgaaatatattatatttatatattctgatcgatcagtatagtaattatataaaaatgtccatccaagatggtatgctagtgatcatgaaaaagaatccaatgaaaccttaattaattaattaattaattaattattgtactttgagtttgagctagctaaggaagcaatttataatatatattatgctcaattaggagatggagaaattaattaatttacttaaagcactgctttaattttcgaatatgcttagtctcaccatttcatgctgtgtttcatcaatcaatatataatgttgtatatatataaatgtgcacaaactaactaataattaaatgcttagtctcccaaaagttcaattttatttcaggatttatgatcattaagttgatcattcgactggattaattgttcaacaaaatttggaagcttaatttaattattgtgtctttctacttccatgagtatatatatatttacataaatatatatgtgttggtagggtttttattttagtgttttaatgagctagctattaccattgatcatttgatatatagatgtataaaacattgtctctcttctccaaagcaataaaatatgatagaatcttaaaaaatcattttttgttatttttttttttttcatttctggataggcactttaccgagtaattattaatttatatatttctacttgaaattaatttcatgatataccttatgatatattatttcatatatatatagagagagagagttattatagaaaaattatttggtgagagcatgaataacttcttcggtagggatattttttgtttttaattggtatattaaaaaattataaattaatttattttagtagaggaattatttcatatactatttttttaatttttttatttcaaatttacggtttgggttttcaaagtagttgcagcgctagttgcaataggagtttctatacaattttttgttgtaatttaaattgcaacgctagttgcaataggggttctgtgtagaatttcgaaatgcaaaaaaaaaaaaaaactgttttaaagtataaaaatgaaaaaatctcattttagtattattatctcatatattatttttttaactttttttttttaaatttacggtttaggttgctgcaattgtttctatgtggattttgattgcaatttagtttggtctgttagttgttatgtgggtttgttatgtagtttttcataaaaatgtaaaaaaaaaannnnaattgttttgaagtgtaaaaatgaaagaaaaaataaactccattattttatataattgtttactttatagttagactagtttggttcctgaaaattttgaataattacggtaataagattcaaacattcagctacacgcatgtctgttttattttccatgcgtgcaacacactattttaagctttattttttgatgcagaaagtcatccattctaattataaccgaccgatccaatagaattggatatccaatcataattgaattgggatcggatgtatattttgaaaatccaatcggatcggatcggttgttggaacatccgattcaatggataactggccaaaccgatcaaattatcatccaatggtcatctaattatatttatatatttttaaaatacatttataa

SEQ ID NO: 115036 - DNA, 3893 bp, Cannabis sativa
aagaattggccaattatagaccaagctgcatctgcaatggatgcacttgtgggggaattaaaaaaatgcaggaacattaccatatggaatacataatgtcattccttatgggactttcggacaatttctctcaagtccgtggaagcatacttttgatggacactttacctgatgtaaatcgggttttccatcttgtgacacaagaagaaaatcagaaagccaatatcactgctggaagtgatcctaatactagtcatgcttttgcatttcaaggagacaaaggtaacaggtctgataatcagaaccaaaagtctcaagctcccaagaaaggaagacccttttgtactcattgtaacatccatgggcataccattgaaagatgttacaaaattcacggatacccacctggtttcaagtctaacaagcaaaacgaaagcatggcaaaccagttccaaaacagtgaagaaaacaaagggaaaaccgaggatgcacacacacttttgcctcagctcaatgcaaatcagtatcaacaactccttaacctccttgctggtcagcaaccaaacgtgagtccttctgatcctagtacctcgacaggtaattcaggtataatcctcacttgtgcttcatctgaattcgttgatacatcttggataatagactcgggtgccactaggcacatctacaataactccaaaatgtttcagcatataacttgtgtacctaacactaagttaatcttgccaaataatgaagctcttatggtaaattaaagtggcactgttgtcctttctaaacacctaattcttgataatgtattatatgttccttagttcaaattcaatataatatctgttagttgtttaactaaaactgaatccattaaagttaactttgacactaatagctttgacatttaggaaaaagcaaccaagaatgtgattggaagaggtaaggaatggaacgacttatacatactggatgatgctgaaaaccagatgtgcaatgctaatgtcactgctgatatttggcattgtcggttggggcatccttcacacaaaagattagctttgctttgtaataaaatacattgtaatgttgacaatgttcataaacaatctccctgctatgtttgtcctttagcaaaacaaaagaaaatttcattttctaagcacattggttttgctaaatccaaattcgatttaatacattgtgatacatgggggccttaccatattccttctcacaccaatcacaaatatttcctcacacttgttgatgataaaactagatttacttggatttttttaatgaaacaaaaatccgatgctatgactattgttcctgaatttttggcttacgttcaaactcagtttaaatgtgtttttaaatgtttcaggtccgataatgcacctgaattaatctttaaagatctttttgcaaaatatggtatcttacatgagttcacatgtgtggaaactcccgaacaaaatgcaatagcagaaaggaaacatcagcaccttttaaacgttgcttgtgctctttattttcaagctaaaattcctattcatttctggacagattgcattcttactgcagcatatctcataaaccgcacacctacacccaatcttgacaacaagagcccatatgaaatcctttatgatgagttgcctaagtatgatcaactaagaaatttcggatgtctagcctttgccagcacgcttactgcccacagaaacaagttcactcctagagctagaacttgtgtttttattgggtatcctaaaggcataaaagggtacaaactatatgatataaataccgaagaattttttatttctagaaatgttctttttcatgaaaagatatatccttttcatcgcctcaataactctacaaataatatagatcatttttctaaaatggttttcccttctcctcatatatctgaaactgttgtacatgattttcctgatattgttaatagctctcctggtactaacattttacctcaggatatggatatagatcagcatatagatgctgataatggtgactatattgacgattatacacaacagcagcctactgacaatgaagccactccaattcagcaagaagagataccatctgtccctagacgcaccagcatatttgcgtgattatgagtgtcactcagtcctccaagacaaaaattccactcctcatcatcttgataaattcttatcttatgataaattgtctgatactcataaagcttttgtttctgtcatcacagctctcttcgaacctaccacttacaatcaggcatctcagctcaaaatatggaaccaagcaatgcaaaaggagctattcgcactactcaaaaacaagacttggacttatgttcgtctacctcctaacaagaaagctataggatgtcgatgggtgtataaaataaaactcaacagtgacggttctgtcgaaagatacaaagctcgccttgttgcacaagggtacactcaacaagaaggattggattttttcgacactttttctcccgttgctaaaatggttactttcaaattgctattggctatctccaccatcaaacaatggcatactttgcaacttgacgtcaacaatgctttccttaacggagatcttaatgaagaagtttatatgcagcttcccaaaggcttagttcttcccccctgagttttctaatgaatcggacataatttgcaaattaaacaaagcactatatggtctcaaacaatcctcaagacaatggtacaagaagttatctgatgctttaatacaagagggatttgtgcaatcacaagtagattataccctattcaatagaggatctcatgacagtttcattgaattattggtttatgtagacgatattatactcgcaggccccaaccttgctcttctcaaccaacttcaatctactttgaatgaaattttttctctaaaggctcttggcacactcaaatgtttcctaggatttgagatagcccgtgcaaaggaaggcttggtgttatcccaacgaaaatatactttgcaactcctagaagacaatggctatgttggaagtaaacccgccaagactcctatggaacctagaatcaaactagatgatcaacaaggagaacctctcgaagacccttctccctatcgacaactcgtgagaaaactgttatatctcaccctttctagaccagatataacttttgctgtaaacatcctcagtcaattcatggcatcaccacgaactcctcacctacaggcagtccaccattttctccgttacttaaaaggcagccctggacaaggtttactgtactcagcctcatcctctctcaatctaagaggtttctctgactttgactgggcctcctgccccattacccgtcgctcaacaactggcttctgcatcttcattggggactgtttaatctcctggcgtaccaagaaacaacctatcatttctcgtagttcagctgaagccgaatatagagcacttgcagccactggcagtgaactcacttggctgtaatatttgcttcaagaccttcacattcctcaagaccaaccagccttcatttattgtgataatcagtctgtcattcacatagcaaacaacccgacctttcacgaaagaacaaaacatattgaacttgattgtcattttatcagggacaaaatcaacaaatcaaaactaagactcagcccggttagcagcaaccaccaactcgcagacgtcttcacaaagcctctggcctccaccactctcaactctcacataagcaaaatggttgtatacgatgtataccgtccatctttaggggggggggcgtaacaagtttactgttactattctctagctggactgttaa

SEQ ID NO: 115037 - DNA, 4805 bp, Cannabis sativa
gagagagagagagagagaggagcatttattagattaatcaagggtttaggagtgagttcaagtgcagatgggaaacaaggtcaagtactcaaccaaaaaacaaagaaaaaaaagccatttaggaagaagagcataatgtatcggacaatcttagtttgccagaaggaaatagttttcattccatcttcaagggtcagattaatcatgtagttcttcaaatacttttagtcctttaattggactttgcagcagtatgataaaacaaccccgttgtcactatagcgtagcccatgctatgcccattgtttccttggtaaccaacatgttagaaatatacaatcaataagtatctcacttgagttttggaattatgttgagcatgccattctgaccattgttgtaatagctcttcaagcttatgtttactagctctgaaaaaagaaagagatctgctcaaaaatcaaccattggagagtaccaacagtttccaaagactaaagatcgcacatgaataattttagacgataaatatatataaatgtttagcaaattaaggaggttatctttcattatgatactaaagattcccagtttcccaccaaccttgttaaggaggtatattttacacacactgaaggttgctgctgttcatcaaacattacccgagatctcttgacacccgaaatagctggtaaatttgaattatggaagaagccaatttcacatataatcgattagctaaaaagtcagataataattaagttggaaaccattggttctaatactatttaaactgtaatcttatattttccacccatttgtattagcttccaaattctaagtggagtagaggtgaatattgtcaatgaaaataaataaacctcggtataatacatgaaaagaaggatacaactgccgcccatcttttttatcccaatggaactttcttcttgggaggcaagacaaccaatctcggcacttgccccagtatttgatgcctcggcaactaaaacattttcagtcaatttgacattcacctgtaagaaagatgagttatcaacgacatccttttcaaggtttggttctgctatgcaccgactatcttcacattgagaaccatccttcttgtgaacaaccgctggtgcggggacactgtttaaatcctcaatctccatatctgaatcactgccaatcaaattcttttcaggagttacttctagaagctcatcaccattttcacaatgaacatcattcttgtgccccgcctctgcattgttgagtttatcttcttcatccttggaactagtttgttgagaatcaatctcacttggaccattctcattctcatgggcagattcaccggaagcatggagggcaatcaaattttcattatccatatagtgcaattatgattattcgaacaggtcttctaaacaaactaccaaaatcaatctgaagaaaatgaagccccatatcagccacaaagccatataataaggaattactttatgtgtcatgtgaatattataaaattcgatgcaaatgcaacaatgttggaaatgggggaaggcctctataatatattcacctccaaagcatatataaaacgcaaaagactacattaacttagtgttacttccaagatatgcaatccttatagacaagtcaacttaaatgataaacccatttgagtgcagattataggaactctaaccataaaccatacttaagtaaacagaacatgtgaacttgaatgaagaagaaccaaatcacaaacactcgaaatcgacacaacatcacagaaagatagctactttacttatttgatagcaatctttagcttagttaaatcttcctttcacagttgactcaactattttgcgctcttttcaaatttaaaaataaaagatagcataatcatggcaagataatatactggcaacgacactccagcatacaaacacaagattacatcatagctaatcaaatcaattatgttctgaaataaagaatattaaaataaaacagaaaagagaagataaagtgagaaatgaacctgcttggtagctatgaaagaaaagaaaaattggggagaagatctaattcaaattcttattgttcttagaatcagagcgggaggtggaattagggtttggaaaaatgagatgatgagattgagaagatgaatcgtcgaagccaatcagaaatttagaatatggaaaggtagagactatagtctatagatctctctttctttgtgtgtcgctcagtacttcttgagaaggagaggagaggaggatagcctgcaatgcggcgtagggtatattccctaggttcctttagccttctcactttcactgcccaatccacaccaagatatgctttaatgcatttttttttctttttcatttttattttttcaagttaaaattcttcattattttgattctctaacagcatgtataacaacacctccttataaaaattgtgttatatttaagggaataattgcaataaaaaattagagttagtttctaattttgaaaattgagaataatagttcttaatgccacgttttttataagtctattcatctattggtttctctttctaatttatccattagatattaataaaataccatatgtcaattttttttattgatctaagtaaattttaattaaaagtaaaataaaataaaaaattattttagaatcttaaaattattttttaattctttgtcttcttcacccattctcaacctaaccctcactccacccccattcccatccacgactctcacccccgattcacagccacgaccttcaattatagataaattcaaacacacacatactaaatagacaatcatagaaattgaacaatgaattaacatatcaaatcaaagccaaataattaaagaaaagttttttttttttatatatacaaaacctaaatcacaccaagaatggatattaatacactagctctgctcaacgagaaaggagatgaagaagaagataattgacgaagaagaagaagttgaaggaaaatctttagcagttaagatcttaacatattgacctctcagactttgttgagctttcacagtacaaccactactaagggttaacccaaggcccaactcgagctcaaactcatatggagaagaagaatcttcaaaagaaaaaaccaaattgtcatctttatacaccgtagagatcgacccgcttgttgataaagctctggaaagaccaccacaatcacctaaaacaacaccctgcattggaaaagcttgtgactttcttattttttctgaaaacccaaaagagaaattatcgtaaaaaaggggtttaagagagggttaattgaaaagaaaggctatggagaaagaatcaaatatttgttcatcttttttttttaaaaaaaaaaaaaattctttcctggttctctgtctttcattctttctctctgtctctcttttttctgcagggtaacgaatctggccttagttagtgttatcccaatttttgctcacctgacgtggcatgtctacatggtcaagataaatgccacgtgggagtacaacttgtcaaaaagaaggccaaacaacaattcagctgacaggagctccgagtacttatgagggacgaagaaatgacgaatcagccaccctaagggattggtggccagccctatggccagcataggtcggccagcctccaaatattatagggtcgaccagcctgcacttggcaggcctttggtgtccaaccttcatctatggacagcaagctaagttgcgatttgggcttcaactcacaaaaataggggaaaatattagctacttccctatttttgagggataattaagccatttaatgtttattatttaattatgtaaataaggctatattttcttatttttaagagatattagtggttaatcttcatgtaagctctactatataaagagcatgagtctaaccttaatttttctaagtattaagttttaagtctataagctctcaaactctaagtttgaaactcgaactctcatttctcttctctctcacatgccttaggcactctctctcacttgagatttccaacatgattctcacattgtaatcttaagagagtcacttcaaattccacaacttttgtgatctaagtggtattatccctagtattaatacaaccaaaatgagagtaggtcattacccgctaactaagggggtcgaacctttataaaaatcttgcgtctcttttacttttttgttcttattgtgtaatacgtggtaaacatcagtaataaatacgactctgctgtcggttggtcaaatctgaggtcaatagtttgatactttcattgagagcgagttgttaatttatctgatcaaacaccatggttaacacaagaagaactccagctacaacttctacctcatcgagtcttcttcaagaccctacggcggctgatcctgatgtctgtattctagccttaactggaatctccacgaactcgacggatgtggccaaccttgccatctcgataggcaccacaaacctagccaccacgacaggccaggtggacactaccaacccggttggtcttaacgatcaacctctaccgcccatggaggaccctccactgacatcctgtattgaaggaatggccaacgtggagcaacccttgagcaccatgtgtaataccctggaattaagaaaggattagcaaaaccctaattagataattatgaataattgaagaattatattattatatagtttaatatatgtga

SEQ ID NO: 115038 - DNA, 1983 bp, Cannabis sativa
tcctggtaaaaaaaattccaacacgaagttgggattttgagatgtttcgggatatgttcaatgatcgggatgctaatctgactctaagcatacctttaagcttttatgcttcctttgatttctgaacctggtctaatgaaagctctggccaattctctgtcaaaagtgcataccgtattcttcaagaatccaaagacccaagaatcggtagtaacaattctggcttctgtcacaagctatggcaattgaagatcccaccaaaggttagaaattttctctggcgcgctgcttctgggactcttctgacttgtgtcaatctcagaactaagcatgttgatatcccttcactttgccctgtctgtcatgcttcaccagagacaatctcccacatccttctctcgtgcagtttttctctttcttgttggaatcacatgggtttaccagctggggtctctcttgatctctcttttgctagctggttggatagtctctttgactgtcttgatgacgaccgtgtttgttccctctctatggtctgttggtccttatggaaagcaagaaattcagttgtttggaaagataaggcgcttactattgcaaatgttgtaacatcagcccgcatagctcttgatcactggcgtaaagctcaagataacacctctttgtcttacatttactctggtaattgtgatgatggagttgagctttggactaaaccgggtataaacacaatcaagatcaacgttgatgctgctatttttgctagtgaccaccagtatggctatggaatggttgcaagaaacgactcaggatccctcattgatgctaaagcccattgctttaatggtgtcttcgcccctgaggttgtggaggttatgggtatcaaagaagctctaagctggatcaaacgtcaaggttggcaaaatgttaagttggaatcggacagcttagtttcaatccaagctatacgtagccactcacctctttcttctatttttgggaacttggttcagattgtatttcacttatgctttctttgccttttgttaaaatccgttttgttaaacgatcagcaaaccccctagcacatgttgttgctaggatgtcacggtccctctctggtcgtcttatttctgtgtctaatgctccagtttctatgctagatattttgtactcagaaagttaatttaatgaagttgatatttcatcaaaaaacactaaatttaaattcaaaatatgaaaatcaatcaatatataatttaaaaataaaatttacatcttatatatcatatatatttgtgtgtaattcaattagtatgtaaaattaaattagtaagtaattataaaacacttataacaattatttaacatatgatttcaaaattaaatttaaaatatacaaaaatatcatatagaaaaatatcataattatactctttcaataaatataaaaaatatatatataaaaatttaaaatgatttttacataattataaactagaataaaaacactaataaattaagttgaaaataaaataattaaaaaagaacctaacaacgacaacaacagcaacggcaacaaaaataataatatgtatataaattgtgattctcaaacaaataaaataacaagatttatagtatgtataaaaattaaaaattttgtaaggtaaaaatttattgggaacaacttaattgtgatattttgtccctatcatataagtacttttatttttggagaaatcacaacctaataatttttatataatgatgaataatgtagtttttataattaagaatcttattattattgcaaattaaatacttcacttatctattagatatactattatttgtaaaagaaatagatgatagaaataacaaaagattattatttatatttctatttatataataacgtttgtgttgtcgagtgaatttcgcaacaccaaaatgtattatttaattaatataaaaagagaa

SEQ ID NO: 115039 - DNA, 4284 bp, Cannabis sativa
aagtaaatctgattatataaaatgagttttatttagggcataaaacccaacagtacctagttatgcaaaaaaaagtactgggttacccaaaaatataagtaccgactacctaattacccaaaatataagtagctagttacccaaaatataagtagctagttacccaaaatataagtagatgattacccacgatagttacccaaaatataagtaactaggtatccaaaatatagataattacctaagatagtacttggttacccaaaatataagtacctggttacccaaaatataagtagatagttacccacaataatacatggttacccaaaatataagttactaggtactcaacgtataagtagatgatcacccaagataatacttggttacccaaagtttatgtaattggttacgcaatatagtacctatctggttacccaaaatacaattacttcgatacctaaaatataagtacttggttaccctagatactaagttacctaaaatataagtacctatatagttacttaaaatgacaataatttttttttttttgaacaacttaaaatgacaataattagttactcaataaactatacacttcctaataatccacactattccttatgtgtggtgggttgatatggaagactacggtgtgaggattattggatccaacttacaaaaattttgaggatacccaaatagtcatcaagaggtatatatctttcatgtattttatttttgatttaatatttacacatttagatattctttggctatggtacaatgataatcagacataaaaaaaatttcgctgtatacctgatttagtaccataaaaccaacatccagaagggtaactgagaagcattcggatatgcaattcagtctcaaattcatttattactaaatccctcaatatcggggatttatttctaagatcatgttcgagaatcatatcttccgaatataaaaattaaataattgtcaatcaaatatttatgtgtctttgttatccacaaaagtaggacacatttttgacagttatcaacataatgtggcgtcaacatcagcagaagatcaatgcctcatgggtcgggctccatcaaattgacccagtgtcactactacaaaattaggctttaggggcagtttttttaggcataagacgtcagttttggcaaaatctacgaccgatattgttttaaggatcgctaaaggggttgaattaaccgaaggcatagggccccctatgttgttggttattattaaatattcaacgacatagggccttccttaaacttttatttgcgcctatggtgtcggttattagtaaataactgacgctttataaatcctatgtgtcggttatttactaataactgcccccaaacatgagtttttttttttaattttattttaaataaaatttaattttgatatgataaaatcagtttcttttcatatatttatttattaatatatttaaattaaatattaattttatataattaaaaattaatttgaaaatctaaataaatatatataattacattagtctaagtaaatatattatacaaaaattataaaattactctaagtgtttaagagtatctaaacataaaaaaagcaagaaaaaaaaacagtcttctacaagtgttctagtcatcactgtgaatcacctcaagcaattttgatatccactctcattgtaacggcaacaaatccttttgtacattgtatcgagcctgtctcccaaactgtaaaaagaacaaaatattttttattactatacatattcaattatttgttactataataaataagataattaataattaaaatttacagctcttttttttcggttatgaatctgctagcatttgtagatttgactggtgtatttcaagacataaaaccacgttcttaatttttaagctattttggggaaactgcatctgttagttttggatacggtccaaggaacgcattcgtcccctcgatcttttcgtatgcgctattttgaaaattatattactattttaattaattagcataacttatctaattaaaaaatttcttatatagaaaataattaaattattacttcatcatatctttaatttgtttgggagatttgtggccagccatagggtccaaatgtaccatcttccctagtgtaacgacctcgattatccaatgtacactaaaatacatatataagatagagtaagaataatttcaaggaataataaagaaagtaattttaaattatctcttaagtagtatgctttacctgaaattcaagggaatggagaacatttggtattggctttcatcgttcccaaccaactagccaatctggtagccgcctcctcaaactgattctctttatccatatcttgtatcatggattgtgagaagcttcgagtcataaagcttgaaaatctgtctcattttagataagtttttttagatgcacctgcattaaattgttaaaaatttcctataaataggactacctaatctgtagatattcaatgttataaatagtaagtataaattctcatagagaatttaaagttaattaggttaaagaaagtatacctcaatctgaaaagcatgcattagtttttgataaagtcgcataatataccacttgttgtacatcttccttagctattgtgatgtgcatacgaggcgttataaatttattggataccgaaacttcaattataccatatttttcgttgatgctcaaataatcgttaatcatgtatcaaatcgacttgtggattttttttctatgattgctagagtgaataattgatcatcattatcaccaacgacttcttgaggaggcatagagcattttcccttcaacagaatacttgttgaaggtgtttgagcaaagggcctacaaaataccataatagatcaaaaattgtataaataatttgttattgttatttttaagaaagaacttttacctctagtgttaaaattaaatgtttaggccaagggaggaacatattggttgcttccccaacatatcttatctcctgaatcggtattgggatttctgcaacatcttgaaacatttttgaaattagaacgtgtgcatgcgaatcatcatagggcacagtatgaactactatctcaccctcttttttgtataaatatgctttggtcactttgttgctaacattgtcctagcatagaactactatatcatctaccctttgtttagtgaaattgtacatgggggtggatcatataggggaacatacatctgagcatgttcttattgaacacactcctgagcatgttcttgttgagcatactcctcctcctcatcttgttcttgttcaataattgttttcttctttttaagagatgtaatttttgctttcaatctttctatttttgagccacaacattagaaacttctcttttattctttctaaaattcttggacgccttcgtagagaacctacaattgataaataaagttaatgaagatttattttgtacaactaatgaaataacataaatcaagtactagcatacccagcagccctaacacgtccaggatgctctggtctccctaaaacctgcgtcaatataatattttggccatggaccgtaacctgtccttggctaactttctcctccaattcaacctagtgcacatatcaccaagcagttagtatataatttatatatatatatatattaactcattattacgttattagcaattaatacttactatcttaacaataatttttttgtcaaaattagtgacaagtttcgattctttttatgtgatttgatccaaacttgatggcgtgggggatcttgaacttcaagtttattttctgcattgttttacaaaacttaagtgagtactgttgcactttgatgtacattgctaaaaaattcattttattaattatcaattacttactacaacttccctgatgttggccattctgctctgaccactacggtgttcggactagtttttcagtgatcgttctctttggactttaaaagttaactactagtacttgtatttaaaaatttatcttaacatataaaattagtacatgaaattcaagagttaggcaacttgcaacaaatttcagtcaatcatctttatcgatttcagaatagttttcaagaacacatgccaactatgttggaattattttatcaggatcttagatttactaacaagtatgctatttaacatcctaaatatgagcttctaaa

SEQ ID NO: 115040 - DNA, 1299 bp, Cannabis sativa
gaattttcatactcttcttcctctggacaagattctgtggaagtgagaaggaataatctcacaacaaggattacagctaaaccaccaccaccttcagaaaatcaactaaatcacttgtcttcttcgctgagttctgaatctcactatgatgagacctcaacatcaacttcctcaagatctgccactccacctttggtatttagaaaccgcaaggtgggaaatcttgagcaaatcagtacgcgaaagcccagctacatgaatttcacgaaatcaaccgaggcaaagttgagagcttgcaaggcttcatcatctcccaatgcacagaggtacaagatggaagagctccagcttcagtttaataacatgtcaatggcattttctaatggggacacaaggagtagtgctggctccattcctccttcgggtagtttgagcaaagacttgtttcctccaatgtctaggagtagatattatgatggtgtaagaactagaagacagtaaaaaagagctcagcagttgccattgcaaagaaaggaaaatgacagacagaggaaacaatatctcactctgataacaaaaacgacactcaaactattgtccttttgagccctgcttcttccatcagtttatacttggctaaatttgtgtatctgatttttgagttcaacagcttgttgttttgtcttaggttagtgatgttacttgattcatattataggattactactaactgaaaaatggtttcagaatacagacagatatatatgatataaatattacagtgtgtgctgctagctgttccatgtctgaattgaaatctccagtgagattgtcaataagtgtttgttttgtgacttgatcatgttaagattgatggctttgattcatggctatcttgattcttgtggatgaaaaattctttcaatattatatgactattattgtcatactttaattttttttcagtgtcaattgttggacctatgtatgaaaatgaaagaaagtgatagtgaaatgggccttgctttgctttctacaacatgtccacacacgtaatagtcttaacagatcttgctttgtgtttgaaatcgcttagtaaaaacataacaaactgttggaaatggactgatccaaaatatacaatggagtagcaatattactctaaatgtaattataataacatatataaaatgatgctaaatacaactaaaccctgtagcacttttttgaaagtattattcttcagcagactagtttggtaattaaggtatattcatgtcacttataataaccagatct

SEQ ID NO: 115041 - DNA, 2831 bp, Cannabis sativa
  modified_base (2757)..(2771): a, c, t, g, unknown or other
ttatggaggaggatcctcaggtgatttactctcatcaccggggctctcccctaatccatgagcagtaggggtattatgaccttcttattttcttatcaggtcaccctgcgcccgtggcctcctacccgccttctgacgctaatattcaagatctttactctaatcagacttttgcctttggtgagggtggttcaggaacaacgccttcatttgtgctagagaacccatcgtgggagcagtcttgcacctcccattatattggtgcggtccaacaatgcatgtccaattattcaagggaagattaggagtgcatctgaggggttcccccactaggtcttgcatgactgccctttttgtagatggccgcaatgtctcaggagatgctttcacaaggtggagcccctggattttcttccagctactagatgcttttggggcaagttggagtccactatagaggagagggattgactatcttccctgttagcctctcatgaggcgcgcatccaggaattggagggtgagcttgtagcagtgacggaggctcagaagtaaggaagtgaggccctcgctgcttacggtgatcataaagtagcattcaacttgtcacttgaggaagtcataagggagcgagacgatgtatgcatacagcttgctgcagctattgatgagaggtacaaagtggcatgccaacttaaaagtgcttgcaaaaataagaagagactcgagtgtcaagtcggaaaactaaaatcttgcatccaggcactgaatgaggagctgaggttggttagccaaagttttgcggagtatgattgtgccatagtggaccaagctctttataacatgtggcgtgccaatccaaatatcgatttcggcttcttcggtcctacagctgtttagtggactgctaaatggaaggcttaattcgaccagtctggagggggcggttactgaattgactttctctttgccattaccattttttttgtgacaccgtttagttattataacatgggtgtttgttattatttttggatgactgtaattgactcttttatttgtattgcttctttattcttttgaaatcaatagctagtgcattaaggggggcgtcaccctatctctttggtagttgctcctaccttgtttgccattcttcattatcaaatttcacgactttggcttcttaattttacggtgtggtttttcctctcttttttttattgagagagggtttgggcactttgcaatgggctctttgtcctcactcttttgttattttaagggagatgatggttccatgaaccgactcgacctcttacatgtgtttataatttattgattttaagggaggtgacgattccgtgaactaacttgactttttgcatgtgctcattatttaccctcttacgcgcgttttttgggcttgggtactgtgaggagtatgtgcatttcttgcatgcctttactaggttctcccttttctcaaattaatgggggtagccaatccccataatcataaggaggaacttttggctttttatatgtgtacttacctttatctcccccaagtgtatgctagcattgatactagtagacacttgaggggtgttgctcttttgttttaatgttctgcataattatctcaatgaaacttttcataccatgtattataataaagctcggaaatacgtcatactcaagttacatgggaatggaggacatttcgaatgtcccccttgattgaaaactagttacttaaataaaacagatttcttacttcattgtagacgatggtcaccatcctcctattggtagtacttcttcaggtgttcagcgttccatgcatgtggcactacggtgtcatcaatgcgggccagcttgtacgttgtaggaggaattacttgtatgatacggtaaagcccctcccagtttgcccccaacactcatgttgcaggatcccttgtgtttgggaggacattcctcaacactaaattcccaactcggaaggcacagagctgcacacttgagttgtaatactcggctgccctttgctagtatatcgcgaccctcatctgcgcttcttctctcttttcttctaacaggtccagatttcttaccaacacctcctcgtttcgcattttttcgaaacattgcacctagtgggagcttatttacatctcgatggggagtttggcttcacacctgtaagctaaggagaatggggtctctccagtggtcgtacgaggggtggttttgtaagcccataatacattggggagctcctcaacccatgctcccttgagcttttctagcttggtcttgaggtgtttcttgatcatcttatttgtggcctccacctgaccattgggctgggggtgtaccagcaaaaaatcctctctgtattcctctctcatggcagtaatctcccagcatatcaccaaatttagtgtgattatcagtgatgattatataggggacctcaaactggcaaataataatcttattggcaaatgaaattacttgcttggttgtgatgtgtaccagaggctcgacttctacccatttggtgtagtagtccaccgccacagttgcgtactttgccccagcacttcctataggtaaggctcctattagatctattccccacattgcgaaaggccaggggctagtcatactggtgagctcagtgggcggacgtcgactgtaattcgcatgcctctagcatttatcacattggcaaagtttaccagtatnnnnnnnnnnnnnnntacatcggaagggaccgatatttaactttgattagatatgttaaaatttatcgtaatatc

SEQ ID NO: 115042 - DNA, 1937 bp, Cannabis sativa
gcttctggctagtcgcgactactgacaccgagtgagcagatttttccgatttttcaccaatttgtcccgtcttttcatcaattgactgaatttgactttttgatatcccgagaacctgaaacaaggaaaatcaagcgtaaaaccgctctaaaagacaccaataaccgaaaaaatgctaacttgttagacccgaaacataagttaaatataacctaacatatatgtgcaaaaatcaaaatattaaataataaaaacattcaacaaaatagtgtgtagtgtaatgtacgaatgggatggaagcttaaaactttcatgagctttaaatggcattgctactatatcaaaagtactagaattatcatcaatttaataaatattgatctatttatatagaagttccaaaatttaattttgtataagccctaaatacctaccggcctcggacaagagcattactagtactcttgggttatatgctgcagctagagccatgaagaggagccagccactcccaataatttctgaaaaggaaaaatgcttgatgttgtaatttcacaaacagattgcttaattgggtaatatggcttattttggggcaaagtacttgagaattgtgttttgttacttgtggatatatatgaaacatagtgtggtctcgttggtatacgacatctctgagcagtcatttcatgacccagtgattcaacgatccacatgcctctctcctcctgttatactcttgtctgtgtgtactactttctcacacataaacctttttgtgaagaatgaatggcatatatatcaaacactaattaagaccaccctttgatttgatcagtctgtacatagatataaatatttgcaactgcggacctgatggaaagattaattatttgtgatataacaacattatgtggtctccactccaatagtccaatccaactcatgctatattagtcataatgttttggtaaagaattattattattattattacatttcactaagtatgtccagtgtgttgttttcacataataatctctcatgaaatatttatttatatatatttatatgatgggatatgggatgagatgggatgaaattaagctggttgggtggaacatttaagagttgagaggtcactagttgtagttgaaaggaactagtcgtgggaggtatttgtgtatgaaaagactcttcagagtgaattttcagggatagagttctccaaagaacataatggctggaggttttaatgggattcggattattaatttccttactaaatcttagtgtggtcctttcttgggtttgggaggttacacactcttacttactcctctactcaggcctacttatgtgatgatctagtggtccttaaaagtccttttttttaaaagagatttgtttccatgtgaagattactattcagttgtccccttgagaaagaataaaaaatgatgttcaataaacccatgcctctttctatctcacatttattcatgacttggagtagaagggtctttgttattatgaatgatatgaaatgagtagttttattttactacccactacaaactcaattccaattctcatttcggctcaacttcaccttttctcctagtaataatgtgtcatctttctaaaatctaaattttatggcctaatagcacatgttattgggaaagtctttcgtacatttcaaaatggtggtttttgtagttaagtgttacaaaccgtaaaatttaggtggtttagccgccaatattcttaaaataaataagaaatgtacaagaaataccgattcgaccgcgggcgccagccgtgggagttgaggtggcagccggacctccagaggagtggtgacgaggagagggtgggtggtagattttgatggtggggagctgagggttggcagaaaaagaagaagaaagaag

SEQ ID NO: 115043 - DNA, 3556 bp, Cannabis sativa
aattatactattttaattattattaaaataaaaaactaaaatattaaataaaactaacactacgtggcttggcacgtaacaatcacctagttatatgtaatatatacgtatattatataatttttagagagaaatcaatatattaatttaattagtatatatgttataacattcaaatcttaataagatgtttttatttaattgttaagtacaacaaattagtaaaacggaagagggtttcactgctatatatttattaggattgtatatgtaacacgggtgtcgaatatgccaaataattaatgttggattctcaatatctcttgaattataatgtaaaataatttataattagatttgacgttgaacatattgcttatatatatagacaggatgagatgatgaatgtaccaatggacaaacaaaagagtactcgtgtatgagtctttctttgtcagctaataataagcttaaacatccaaaattaagccacaactctctctctctctctctctctctctctctctccatacatatcttcttattttctccagcaataataactttgctcaaagttatctatccatggcggagggttttgaactttttcatgtaccccaaaaggtagtgagaacagaaaataaactccaatattctgcaccattactcttccaaaccagtcctactcctactactcctcgctcacaacaaccttcacccctctccattttccccccaaacgacgccgcttttagttttcacaatgaccaaatctcattaccgtcttctcatcgccatgcaacgcccaccaactcacccccaccatcatcaaacccatcacaacccctctaccgacttttctccgacgacacgcgaaacggtgtcgtttcgttacggccgctggatcgtttgtcgtttccggactctagattgagaagctgcgttccattgggtccgttcactggctacgcttctattctgaagcgttcgagttttttgaagcccgcacaacaacttctggaggagttttgcgggtcgggtcgcagggtttggagcgaaccaacggacgatgatctgggttgtaaatatccgactggtgtgagtgattgggttgggtatcagtttaagaactcgaggctaattttcatgctggatgaggtacttatttttacgtagacattttttcaataattcaagttatttttattttatgttcagcttgttttaagatgctacactttccttattagttaccaaataattaaaaataacggtaaagtttttttgttaaatttgtattagctagtttcactttaatttgttcttgctatcaattactctcgcaagttgatcctaagtatgagtctgatgatattttagtctctaattttttgtacattttttttattaaaataaattcattttattatatttcataattgaatatagagacttcattccaaaccctaatcttgtatatctcctcgtgacttagctttttgttttattttttattattttcgttttaatatcaatattttatttactgtcgaaaatatgtatatttttttttcctagtttagtatagtcaaggagatggtcatttgtttttgttgaagaaaaataatgatgatttgatggttacagtgtcagtttggaatcaatatctcgggtatagattgtttgatttgatctgatgcagtagtctactacagaaaaagaaattaaaaaagatgtattgtcttgtcaattttaaatttcccagttctacttttttttttacttttatacatatctatttgttttatctgtattatgaaaaccattattattaatgtttctcttgaagaagagatgaacaacattacttgttaaagaaggttatcgaaatgtgagacgctctcctgtccactaccactagctatggatatagatatagatataggtccatcatgattatatgtctgatgggacactctataaattaataattattaatgataattatttgttaattaggtttacaagagatgcaagctatactgccaacagatacaatcagtggttaggtcgtttgaaacagtggctgggcttggaaacgcagcaccatttgtctcttctgctacgagagccatttcaaaccactttggttccttgaaaaattccattatggaccaactcatcaactcctcctctgccaataatgccaaaaacaatgcaagtaatagtagtactagtactacagctggctttgattactccaataataataataataatactagtggtgttaaagatgatcgcatttcgagattagtttgggcatctaaaacaggcctagctcgtaacccaattcacaacttaacaaattttccccgttctgcttggcgatcccaaagaggactccctgaacacgctgttgccgtactcagaaaatggctctttgagcacttccttcatccgtacaaattcagtttatcttttttttttttttggatattaaaatattaaaaacaaattataagtaacgtcatgttgttttgtgttaaggtatcctaccgattcggagaagcaaatgctggctcagcaaactgggctatcaaggactcaagtgagtgaatctttttccattaattgaatcatgcattaatttttaagtactgttgtgtaacactactgtaactgattaattttcatttgggcaggtttcgaattggtttataaactcaagggtaaggctatggaagccaatggttgaagaaatacaggatcttcaaacacagcagcaaactactcaatctcattcacatacgacaatgaactgtactcctaatgctactactccatctcttaaatcgtatgttaataatgttggtcactcttcttcaaggaataatattaacaacagctcagggtcgatggctttgaatgtgaacgtacaaaatagttatgagggtgagtcatctccacactcctcacactcatcattttccaggcccattggagaaggttttaacttcgttagtactagtactggtgaagcagttttcaagaactggttttgaagatataaggaaatttcaaatgtactgtacttatattattacgaaacctatatagcttcgtgcatgaaagtatagactaaactaatctacgctatagctgattatataggtaacccaaatatggaaaattagtagccgggttgatctttaggtttaagaattaagagttatctctatgtagctacgtacgtagtatatatatattttgttgatcactgttgttgttgttgttggttactaaggttatgaatgttttcattgtgttttcgagaagtgtttaacatttaattatcctattcaaatctagcttagagcaccaccactaccaaaaaaaaaatatttactaatactaattataaagggtaaatattttggactatgtgttttataaaagttactgattattagattttctattttgttaaatgatataataaatcttgtattttttaaattgtacaaataagattatgaattaattttttgtaaaa

SEQ ID NO: 115044 - DNA, 5857 bp, Cannabis sativa
aaatagagaatgggataaacaaattaagaaacaaaaaaaagtagatatccagaaataagcctgtcaatctttgattaaggtaggtttgaaaatgtacaaaataaaaatatattataacgacgtagcagcaactaaaattaacgaattactaaaatatatacttattattttgtctattactttgttcttttgctcaactaaacaaccacaatgggattatataccatatattaatcctgttacatgcatatggtattattaattaatattcatgaagacttaaaattaatattacactcattggtttggtaacaacattaattaatcaattacaaatataaaagtttaatatgtttgaccatattatatttatagcatatgcatagtattaattactcatcaatatatttttgcttggcgtttaattacaaaaactaatacaatcaatcatgatcaatattaggtttagctgagtgatcattaccacctaactttgcactttcaaggcatgaaatgaaggaaaattaatcatcaaattcacactagctagtaagaacaattgaaaataatggaatacagaaatcaaaagttaacatatatactaatttctttctgttcttctggtcatggattggatatactaggtaggctcatagtcatatatatattatcatagatattacatatatataaatatatatttatatatatatagcttcatatgcatgaggcacatgcatcaagcaggagaagcatgttcattcccagaataagctccaattaatatgaccatctgctctaccgtaaattaagcacttaatttattcaaaataaaatatgatcatgatacacacagatacatatatagaagacaaagaatgtagtaaaaacatgactagttttggtttccattattaattagtaaaaaggattattgatcttatttttgtaaatttgttttttaatcaaatatataaactgaaaaaacatctttaatattaggttttcaatacaatttactaaaacatctttttattttttattctctctcttaattttttttctttgaaatccacggtctctacactcaaatcagtcattttccttataaacatcatttttttattacaactgttaatttttaattaagaatagtcgggacacaaatacttaagctcatgcatgcagtggccaaaccaataaaagacaaggtagagctcttgtttatgttcattttttttttcttttcttaatgtatacaaaaaaattaaaataaaaattaattatatgaaataaaatatgtgtctgaccctcctaagtccttcaatacatgcatgtgttgcacttatacttggtaacttttattacaaacaatagttagtttttcaattacttttatgcttaaaagattaaagattaagtaaatacaataattatataatactcatgtactaccaaaaatgctacctttaataaaaaaaatttaatcacaatataaattttttgtgactatatatcacttttaattagtcacaacaaaaattacttatcactaaaatgtagtatttagatacatgttatcactaatttagttagagtcacaagtattatggctaaaaatacatttagtgacaacaaattataatttttgtgactaataattttagttataaaattttttagtttagtcacaatttttgtgataacataagaatgatgatttatatttagtcacaatttttttaattttagccactgatgctaaaagtatatctctaattaaattttttacaattgcaacaaaaattaaatttaagtatttataccatgcatcaaaattaaaattagatatataagtgcaacaattacataattaaacttagatgtttatggttctaatatcctcaaatatatttaaacagacaaacaaaaaaaatcttatgaatttttaatttcttattaatcaattaccttattttagataattaatgtttttaaattagttcgctttcttaggaaaagaaaaaattgttagaaaaattgttgtttaaaattatgaagatcttgatgagaatttatgttgataaatatacatttataaaattttgtattatatataacaaaacatgtattaaccaatagatttttttttttttcatatagtaaataatttgatatcttggattaaaatattggttgtgaaaagaagatttctgcttttttgaaaggaaaataacaatttctaataatagacaaatcaaacatagtccattacatgaagatattgcttattgagtagaatagtaataaaaaatagactaattaagttgtttacaataatttagaagaaaatcctgaaaactccaactaaataaagacccatgagccccaccattgtgaagtatcaaaactaaccataccaatgacaaacctagtgaaagatcgatccataaaacatgagtcaaggttaataacaatctggaagtctcccaaatttgaccactgcgtaaagaaattactctcattaatacaatgtgatgctataaaattaccattattgaaatcataaaacaataaaaaagacaaccattgatcaaaattaaaatatgaaagtagaaaaaaaaagaataatagaagaaccaagcaccaaaccaccaacatctagggcacaacaattattgaggtcgactctaccaccacgtgcagtagcaccccagacctatgaatatcctccacacgacacccacctcgcatcaaaacctgatgaaggaaccaccaacaaccacaatgtaaactcaaactgttgatgacatctagtgcgaatcctccatcaacgatctcctacatatatgcacaaacaacagtcccccaacttcgaccatttccatatttatagaaaggttgacgaaccatggtcggagagaagataagtaaatcctgtcgacaacatactagataatagagccctaataagaaattacctaaggattttttaatatatatttaatacttctgcttttaattagtgtattttctttttcaattacttatccatagaagttttttatgctgaaaagtggccaatactagcgtactttttgaatgtgccaaaatagctataggagctctctttttatagggaaggagatcgtattaataataaaatatttaaaaaaatatgaaaatgtagatgatgatctaatagtaaaatttaccctagaggtcagtcgtcaatttttggagcttaaaacgcgtctgtgggacctattttgggtagaatttgtaactcttttgaggataaaatttgaacttaatatcttcagaattacaattaacgtatgagacatgacttgatagagcattaaaatatcttcaaagtgcaagtttaattgcattaataatatcatttttgagtgagttatgattattttactgaaaactactctgatatcagtgcctaggttgatatccagtgcccaagttgacatatgacatcaacctagatattgagtgagtaggaaaacgtgctgggatgtatttttttgacgcctaagtgatattttgacatcacttagtcaatttctttattccagtgaactcgttcaccagttctcagagatgtttctgttttgcaaaattgggagactcgacactacccaatttgcaactaataagtcactttaccaaaaaaaaaaatgaaaatatgaagttgtaaatttgacttatttgagttcataactcttgcttaatatgaaaaactagaagaatgtttgagacaaaatcgaaatcagatgagcaaaactcaacgcaccaggtcatacatcaacctgggctctgggtgctctttttggagcttctgggatgtcgttttgatacttacaaggttcttaaaattgaggacgagttctcctaccctgtttctgaccatgccggggagaattcttggagccaaattttcatttgagtgatcaaagccagtgcactaggttgattgtcaacctgggtgctaggcccctattctggcctccaagttggtcagtttctcccctgaaagtaattgtttccttgtttttaatgaagacaaagaaaattcttgggattattctttagtttgatgcttggaagtgccccaagtttacaatatgtcaacttggatgctaggtgcttggggcacctggtgctcaaaaatgaaagtgctccaaatatgattctaatgcctcaaatatgttcatgacatgtaaaattcatgtcctagtacaaagtttgacccattttcactaagaaggtcccaaaaactgaaactctagttggaatgttaacctaggcgcttggtgaaaccctcggcacctgggttgacttatggggtggtgtttcgtgtatttttagctctccagccttggaattagatttttcatgtcttcattactctgaatactaaaggatggtgacttgtaaacaaattggtaggatccaaatatccatttcagtgcctcaaagtcaacctaggcgtagggctaggacccttccccaagttgactgctatgactcgagttccttcactccaggaatgttttccttcttgccacgtgtcaaaaattagtgttcacattaccaaggctacttttggtgtaaacatttttccccccaagtcaactttatacttgtgtgaggttaacttgatgacgtgaactaagcttgtttctcttgaaattacaaagtgggcattaattttgacaatcttaggtaattgttttctaattgtcttgagtaatttcctttgatttgggggacttctgaaatttgtcaacatcaaaatgtaaacacttactctgatctttggttgttgtcttagcattgactctcttatcgtattgtgtgtttatgtggatgtagtctttgttttctcttaggttgtagccttgaagttctttagcgttcccttggctgtgcttatagcagaggtcttgttcatctcatcagtttgccatcaaaggaggccttcttcatctccctagctttatagtggaggaggccttcatctcctcagctacacagcaggggaagccttcatcgtctccatagctccacagtggaggaggccttcatcatctcctcagctttacaacagaggaggtcatcttggcgactgtcaatgaagttttgtagaagtggctggtcgttctttggtcaattgaggatgtgaccaacttccaaattaatatacctaataagacgggggtgatgtcttccccatcttgggcgcacattgaagtgattgtaggtgcggtctccattttttccttggtcttaaccatagaagtctttgtcatcgcttcagttgtattcacaatggaagaggccttatttgtcccctcgactgtctcgatagtggaggaggtcttcttcatcccctcagctatcaacacaacgaaggaggtctttctcatctccttagatgttagcacagtgaaaaaggccttcttagagaatgttaacgatatattgtaacattcacatgctactcattggttgccaaggagacagtcaatactagctaattttgagaacttgacaggcaggtggtagatagatgagatggcttggaggtcgtagaatgttgactttctaaggagacttggtgtttatcactatgaaggtagtcatagtggtgttctctcacggggttgtttcaactattagtggtaatctaatttcaccacaagaagcgatgtcggctctgctgaaataatacattagttgcttgcatgaccctagactcttacaaagacaaacctattcttttcagggtgtgtttggataggatattctatgatgattctgttggaaattattttac

SEQ ID NO: 115045 - DNA, 1737 bp, Cannabis sativa
  modified_base (27)..(30): a, c, t, g, unknown or other
actaatcagattgtaaagagttttatnnnnggcataaaacccaacaatagcatcctctgagacataactacacataactaaaacaagagggtcaaaacaagaatgatctaaatgaatgcaaataagttaaaaacaagataaagtaccctacatgtgggcagaagcaccctcccaaacaagcaaagaaggagcatactcatctgaagaatcctcctcttccttgtcagccacaatggcctctcccattcaagccactagggcagaagatggagcgaacttctcaggaccatctttaatcctaatagcccactcaataggtacttgatcacttggaggagccttcctcttcttcttcttcttgctcagagtctctcgtttggatactacctcccctactgcctacttggcttttggtacgtagtcagatgaatagaacatatacttgacaaaattggtttcagtggccaagagagagatgttcctattaccttaagggagttggagaatttcttgggccctctttcggagttccatcgtgaacggaggtcggctgtaggatagaatatgctagaaattggtataattgctgccatccccttgacaaagtagtagtcctccgtaatgccactatctttgtgatcacctcgatatttgtggtaccagttagccacgactcctcaatttgagagaagtaaaaatacccagacatgttctgtttggggctcaacttcaattcaaatagcgagttagtgtcatgggaaaatggcagaccccatccttgagacgcgtacaacacgaacaaggcagatagatacttaaggcccttgggtttgaattgggtcagactaaaatgttaatatttggtcatctctttgaagtatagatgcaaaggaaacattgcaccctttttggtgtgagtccccgaccaagcacaataaccctccctaggatcggtagccaactaactgggagaggaaaggaagcatttgacattccctaggagaccataaaagatagtcaatctcttcatggtcaggacagatggtggagaaaagaatcaagctccccttggacctctcctatttatgggacgagcctcggtgtactcctcgtccacgtagtcctagctagcctcaaggacatcacctgtcttagacacaaattctccttttccattgtaaccaccaaaaggtagcacctgagcaacctccacttcctcatcgcctttgacctcgaaagaagttgaaggacggacctcgccttggtcctctaactcttggacatcaacatctccagtagtttcctccttcttgacagcaggacgggcctgttacaccctaaccaaagtagcaagaggggcggcaaacgaaggatttctgacagtctgcttggtgaggccatcattttgtgtttagacggagctttatcagaagtgtgccttgcagtggtcaaaaccaattcggcaatagattttccctcagtagctgggatttagaggccctcgggcaaagtgtcaaccacgctttgatggaccttgtacgtccagctggcaggaagataatgtctccaacctttcttaagctcccagatgaaacaaccgttcccttcaccacgaatctggtcgggatagaaattgtgttgtccctcgggttttggggaaggtgtatgctgctacttacttcccaatcttaagaactagaatttgaaagattgtcactagaagaagatggactagca

SEQ ID NO: 115046 - DNA, 2926 bp, Cannabis sativa
aactttattttaacaaaaaatcaattcaggatcctatttgtactattttagaaaatacaaggtccattttgtaatttaacaaaagacaaggtgtaattggtaacttttgtaaaatagaggatccaaaatagtatttaccctttttatttttatacgtgtggtaagtagttgtttaaagcttatttttgtcattatctaaaatagtatattgttgttggtgaaattaaaagtaatttgtggtataaatacttaaatttaattttttgttacaaataaatacttatatttaatttgaagcggtaataaataattttttgaatattaattttgattgacattttaaattatttagaattttctaaaaatttataaaagccctgtaattatataaaaattacaacctttttatattctaaaaatatctatcaatatgttctaacaattttattttgtcccaataattatgaatacaatattatgcatatatataaatacaacattatccaaaattatatatagcttataatttatttccttattatacatattatattaattaaaaagggtacaacactaatgcttaacaatatattattgttaggctctagtgaaaaaagctagctagctcatacaattttatacataatttttcaaaggtgattcatatataagtttttttttttcttaatgcagttagcttatttctaattagtggcaccattttattttagagcaaagtaaagaaatatataaggtattacattgataatgctatatattgctcgaaattgaacgataagttagtcataattttgaggagttagaagtagtagaagtccgcccagctgtagtgtcgaaagccttgaggaaaaatcgaggcggtggaacgtttaatttggaatgaagaatagcgccgagtgttgagatgagccgcttcttcactgccgagttaaggccgcccatagtcactacctctgcgtacgctgctggctctttgttcccaccaaatgatatgctcactgaccctttcaatatcaccatcacaaactatacaaaataataataaaaaaaacagttaatatatagaattatcatatgtattttataactataatatagagtaatacacataaaaaaacttgtcacataaatgtgtgtcactatatatatagagtattgtgactgtatgaaatgaacataagaaaagaattgtgaatttgaatctcatattgttaattattagatcttacttcaattattaaaattattaactatacaccatagctatatatattatgtatagatataactttcaataacaaaaaatatatacaatatttttgtcatatatatttagtgaaaaaatttacttccatgcaataatgtgtgtatatatataataatactaaaatataattattatacctacggatgtaattttttcgagcagttattacatttgtttaattatttttcaaaaacaagttttgttaacattatttgtttattaaagtgaaattcataaaattgaatattactaataaaattgtatagatcaagaaattaattgtattaaaataatatgatattatttatatatatataataatatgatcatgatattcatataaatccacgttgagaatataagtaaattaatgccaaagtattcaaatccatgatcataatctcatacattgtgagccaataaataatatactgttcacatgtatattaattaaagtagttagctgtccatattgacataataattataataaatatatgcatatatattaaaaataataataatatatctaattagtattttaaaatagttaaatattaaatttcatgtaattttatttaataattattataaaatatcattaaataaataaaattttattaaaaatattaataaataataatataatttagtgttatccattctcttttacatttatcttactataattaatgtgaactactacaaatacatattaattaataataaaaaagaaaacttcacatataaatatagatctagatgtgtactgcaaatataaataatatataatataattctatgaatagaccatatattatatacatataatagtagtggccatgcatgaaatcttaaaagatgaattttcttttcgaaagtgattaaaagatgaaatcttccttttataattcaattaaagtatgtacaataatagatatgtgatgatgttataaattaattattaattgaatattaatttataattattgtcctttgattactaagctactacacaaacatttttaattattatacaaaataaaagaaaatataaaaaatgtaaagtgtcgaatatatataggggaagacccacattgtagcgagggggcctgaaaaaaaaaatcgaaaaataatatatatgtattttaattagttacaacatatatttatattaaaagatgatataggggcagacccacattgtagcgagggggcgtgaaaaaaaaaatcgggaaaaaatatatatatgtatttttttttttttgaatcaatatatatatgtattttaattagttacaacatgtatttatattaaaagatgatattattataaacataatagtaagcttggtgtaatggttaaggtagatgacaaataagttagaaggtaaaggttcaaatcccactaactacaccttatattttttttttaaatttatcgcccccgctcactttaaattctgggtcccccaatgtatatatatgtatatatatattatatatatattatacatataaataaatattatcctaccactaaaaaaaattgctactgacaaatttttagtcataatataatttttttttatgactaaatgtgatttttaattacaataaaatattacttatgactaa

SEQ ID NO: 115047 - DNA, 4734 bp, Cannabis sativa
ccaattataattggatatccgattttattggattggattggattggattggatcgatcagttaggattggatcggttgactttctgcacacccttagggttatgtaagtatataagattcgtttcaggtttatatattatataaaaaggaaacatttatgtacaatattaattgtgacaatgactagaatctctcgtaaacactgaagccataacaatgacatggtaataaacacactattaattgttattattataaatacgaaacaccaaatacttaaacaaattacacaccaaaacatagagctcgatcaaggatatatatttatatatatgtatatatcctatcttattacaaagacgtaataataaataactttattccaaatccaacgaagcatatgcatgcacgtgataaaaaactacatttccttgggcagatcttcttcagccctaattcttcaattaaacaacaaccaaaattaattctcttttagaaaacgttcaaatcagaaaacactactaaataagaaaaataaataagagaaattaagttataaatatttacctctggtttgacaaaaatgccaattgaatcaataaagtcgcctgattttccatggaatccaacaatgacgccaccttgaattggaagggagaaagcagtgccagtttctcccccgaatggtccatatgttttaagatttgttataaatgatatcgatgtgatcactgtcatgttccgatactctccatatgtcccacttatagatgtcaaatactccgcaccccgctcaaactcaatctaaaatattaaacaaagtacaccaactttaattatcgagttccatcttaaaactaattggtaataagtagagtagcccatttatacttactgttgttggaagaccaacattattgggattcccgccaccaaaagttccatactcgcggtcatgcccgtccttgaataagagagacttgatatttgaactatcatggttaatagttatctgttttatccaactcttccccaccgtgaaactaaacgggcttccccccggaccaccccagtccccgaaggaaatgcttccttcgggttttacataaagaccgaaagcatcaaggtagtagccagagcgtccaaaaaatccagctatgtcactatcttcaatcggcatcacaaaaggctcaccaatattacttccataaggtccatatgtattgaaatttgtttgaaaagttagtgaaatgataacatcagatacattattatattcaccatgtgtgccacttatgcatatcaaatgctcaaaaggccaattcaaaccgatctacaaaacacacacacacatatataatcattagaacttagaaacacataatgtataatatatgattaatcataacacacttaaatactaattgcttacctttatctcttgacccaaatcaagatgattagggctgttgccaccgaatgttccagagattaagttatgagtgacttctttgaaggaaatggacttgatattgccaccttcatgaatggttatctctttcaaatcagaagtgagtttgtagctccaagggtcaccgcctgtactacctccatatggtcccaatgaaatcactccttcctataacgaccaaatatgagacattaatataatcatacatatatatttaatgatgtaataatatatatatatatatgtcatacataccatttgcttcgaattaatgttgatgacacaaagctattatataattagctcccgatgatcgagtacaaacaaacaatcttaggatttgtagttgaaatcaaaatcttacacctatatgtatatataggcttactactgggttaagaaaatccctaaactacccttacagtactttatgtctctattaatattattttgcccttctaatttacatcatattgcttacgtattctatatacatactagttggcaagcacatgaacgaggaatgtgctcccatttctttactggatttattttttaaaaattatatttttttccaatgtgaatatatagggacatcaaatgtgtatttgggccgtggttaggaattttactagcaacttgtccaagacaacctaaaaatcaagaatgtaatttttatgttttgaaatacaagactgatatcgtcgcacgagcaaatcccaatcgttatatacaagataaaaaaaacagtatgttttaattattgattatagtatttattataataacaaagaataatatatataaactaatataattttttaccttttcttttccagtttagagacaagtaggaatatagtccaaaaaccgatttcttactaatacagcgacattggatagaacggttgttggtggtgattcatgaagacttggaagattgatgctgaaaggcttaagaatttttcttccctagctgatttttttaggttaacttgtagttagatttattaactttgttaatacttagactaattttacaatatttgttaataatttgttaatacttccaaccataactttctatttctggtgcaccaaagatggtacacaagtgcagctgtggcaatcgagtatacttgcgtcttaaatttgcttagcttggactttccaatccacttaattatccttggcaaagatgctgaacatactccccatttcagccaatcttttacttgtttcaaacaatccatagaaaatgaacattcaaaaaataaatggtataccgtttcttccctgttgttgtagagaaggcatgtagcattatcagttaaatttttgcagctgatctttggttttaatccttcttagcacaaccatccacaagataaaactatgctttggaatgttaagtcggctccaaactatgttgctcaatgtaactctagttataggacacaatagttgatacccttgggaaatttgaaatctgttcaaagtgaattgagttgtatcaatcaagctcttcactttttctctgattgcaacaagcttttgccaataccagctgccttgagtcgtagctttataggtcaaccaatctgcatctctcacatacacattattgatccacttagcccataaattatctttcttcttagctattgtctaaacgtacttgaacatggctgctacattctattatgagatccttttaaaaccaattccaccaaaacatttagactgacataacgagtgccaatctaatactgctattcctgttaaagtgtgatgaacattacacaaaaaaccacgacatatagctttaatttcacttacaattttcttgcacaacaccatcacttgacatcagtaggactgaatagacattaatacaaagttgttaaaaacaactcagccaacaaatgacaagttttgagtgctccatattttgacccgagccactattttctcaacaagaatgctgcattcttttgctgaaatttatttagcacaaatgggcacacctaaatacttaaaaggcagctcatatcgcttgaaacccgaagcatctaacactcgttggacatctgaattactcatattactgtaatagaaagtagtttttgtagggttaggcattaaacctgatgtttgagaaaataatttaagaccgtgcaacatgattacaaaatagaaggacatcatccgcaatgttgagataatttagattcaaatcaccacacctctcatggaatttgaaatctagtttttgcccaattttttgcatgattctggaaagatactccatgcctaagacaaagagaagaggagacactagatcaccttgtctcagacctttctttgcctcaaaaaaccatgcaaataactgttgaacatcagagaaaccttggtgttcaaacacatttcataatcaatctaatgaacttgtttggaaattgaatgcataaagtatctcttcaatgaagtcacactttaacaaatgttgaacaagatcttaacctatcatgcaattagctttgcttgatttctttccataatgttgaacaagatcttgacctatcatgatattatggccaatgaacctctccctttaacaattaaaccctccttggtctggacaaccaagtttggaaggattgttttgagcctcgcacaaattagctttgtagcagctttataaaagacattacaacatgaaataggtcgataatcactaactgtatttgggcatttaattttaggaacaagcgtaagaatagttgagttgatttcttttaaaagttgacttgtatggaggaaagaagttatagcttcaaaaatatcattgcctatcagatgctaattgtcttgaaaaaagaaactgttatagccatcaggtccgggagctttgagatcaggaatgtcaaatattgatttcttaacttcttcaagagaaaattcaactaaaggaaagtcaagccttaaaataactgggccctggctgatgacagtagccacaacaaatcttcttttttctaatttactgccaagtaaagtcttgtaaaaatccaagaaagcatcagtaatctgatgaggatcatctatccaaatttcattagcattagtaatggttaaaactctattctggctcttctagctctaatgcaatatcaatatagttttattacactataaatttttttacttttagtcacaacaaaatttataactaaaactataaaattgtgactaattataaa

SEQ ID NO: 115048 - DNA, 1630 bp, Cannabis sativa
aaaaaatatataccttttttttcatttttctaacaaacaatttttagttttcttaatcttatgtattgagccatttcaaaaaaaaaaaaaaaatctcatgtactattgagtattaaaagcaattttttttttttggataatgttttatcatccttgtcatcatccctccaatttcccattaaaccaaacttttgacacgtgatgcaatcattggttgattttttttcttaatgccagattaataattaataatattccttttttcaattttttatgatggattgttgcattatatgtgtattagtattattttttactgattttttttcttcctttgatgggacctaaatagtatgattgatgatattcttttgaaattgcacaagtgtcaccaaacattaaacaataggcccaagatttttttaaacaaatatcttttttgcgttaatctttctttctgataactactgctgacaaagtccttgtattttttctccttaaaaaaagtccttgtattttttaatgtactttaatgaaaaatatagaagtcaatatcatattctcctaataatttataagaggaatcgaaaaaaacattaactattattagtgcaatttgtctctaagttctaggtccaacaaccattatgtgcctaagtcgctagttcatagattcttaattcataagttagagtctttaaatccatagtattatctatccactttaggaatattatttcaccaaccaaatataaaaataaaacgctctttcaatgccttttttgactaataaaatatcggtgattactttgtcacaattaaacgttattagcaatttatgctcaacttttcttttatattttcctttttcaactttatggggaagaaaaaatacatatcataagaagagttactagagaaatgtattcagagaagaaaagcatatgaattgctttattgattttttattgatcgaatcaagtttacaaaaatggttcaactatattgtatttatagaagtaagttgtattagtcagctagctaacagaataactaaaactaataaactgtaactaacttaatgactctaaataattctaataggtttttttaaggtttaacgtgtatcttgaatacaatctcattaaaatgagaagaaaataagtgatttgtgtctttgtgaaaatgtcagttaggttagtttgaggaaacatgattattctttaaaagaatgttgttgtttttgtcccgaataaaataacaaccgattttcacatatgatttgtagaggaccagatttttggatatgtgtatggttgcattgttgtcatagaagagactggtgggaagagaaatgtcaatttagaagtttttgattatgatagtgagctaggtgagttcgcatctcacatttgcaagagtttggtattcggcttcattagacgatcgagactgtttgttctttgacttctggaaaatgaaagatttgccaaggaaaatgtagaagccaaatattgatctttgagtgtcaagatataggcccaatctacatcagcaaatgttgatagtttgagtgtgttatataaattaacaattaacccaagatctatttgtatataacatagaacac

SEQ ID NO: 115049 - DNA, 4678 bp, Cannabis sativa
agaacacataaaagtacaacctttgaactttcaaactgaaaaaaaaaaaaaaaacagagtgagcttgatcagatcagagagcccagtaatggaaacccaatccgatggaaacgacgaaaacgctctacccaccattaaagaactccgtcaaaccttagaaactcgcataaacacccaccacgccactcatctcgagcttctctcatctcttcaagctcatatccaacccaacatcgtttccaccattgatctttctctaaaggttgtatctttattcgaaaatcgtccctttattcccactcctcaactccctcaacctaaaccaaaccccagaaaaaccctcgaatcaactcgccctgtttccaagacccaaaaccctaataatgataaaccccctttgggttcgaattcggagaacgagaagtttagcagcagtagccccattgatgagagcggtagtccgttgtctgtggttcgttcgatggtggcggtttgtttgattgaaagggttcctttttccccaattgattcttcgactgtgttgagaaaattggagaatgaccagtctgctacgccgtcggagaaggcggcgttgcgtgagttgggaggtgagtctggggctatacttgctgtggaaatggctctgagatcaatggctgaggagaatggtggggttgaattggaggagtttgttgttagtgggaaatctagggttatggttttggctattgatagaactcggttattgaaggaattgcctgagagttgccagtaccagccacccgaatcgaattcggttgatgggaatgggaatcagatggtggatgttagtggtggagtttttgggagaccaatgccagacatgtggatggctccaaatgatccacatttatccgggtttcccccaatgtttcccgggggcggtccgggaggaatgatgggtcctaggggtggtggtggtggtcctcctagacttatggggatgatgggagtgcctagaatgagtgttcctccatttcatagacctccattgggtcctaatgcttctggctctaatggaatgccacagaagggacttaggagtgaagatgatgatttgaaggatcttgaggcacttttgaataaaaagtcttttaaagaattgcagaaatctaaaactggtgaggagcttttggaccttattcatcggcctactgctaaggaaactgctgttgctgctaaggtttgttcttttgtagcctcttgtattggcatattgtggagaaagactttagtttgatttggaagcatgcatatttatgtgttgtatagtgtaactgatagaagtaattgtatatacaaaataggcttatgattttttatcccgcccgaactttgacatgtaccaaattgactcatgaacatctattattgaaagatttaaggatttccgtgcaattccgtttagttttactgacagatgcttaatgtaggcaattgttcatgtaccaaatcgtgtttcctgaacttttttccacgttagacacccttaagtaaaattgaacggaaagttctcaaattcaacaatctcaataattcgagggaatttttaactgtgaagtttgggggtaccaaatgtcaaagttggggcagacaaatcctaattaaattagcctttgtatttttggctttgctttgatagtcaagagagctagataagtaagtgaagagtactcaagtccatgtaaaaggtacttggatgatgtatcttaacttttttggtcttgcttagcatattcaaacttaccttaacaattagaaatcactgatgccttgttatgatattgttggacatgagaactgatgtaactttcaaattttctgttactagttaaagttattgagattttgctaatgtttgtaaaaaaccaagtttgatctcttgaatgtgcttcctttgtgtttttcttatgatttcagacatttttatagtttatttcggttctcctgtttaaagttttctttaaattttacactaatgctcttattgtattcagttcaaaactaaaggtggttcccaacttaaagagtactgctcatccctaacaaaagaagactgtcgacgacaatgtggttcctttgtggcatgtgagaaggttagtgagccatacagtgtgccattattgttagcaaccctccgagaatgagttattcgtttatattcagtaaatgtcctttcttaatattgtttttttgaaaaacttctttttaggttcattttcgacgaataattgctccacataccgacatcaatttaggagattgttctttcttggatacttgccgtcacatgaaggtatataattttttacttcttttgtgatcaatttcacccggttatgtattggttatcattattgatgttatgatctctatgtggagtaatgaccgtctttcaatttatagacgtgcaagtatgttcattatgagctcgatccaacaccagatgtgtcacccatgataatgggcgcttcagttcttgcaccttccaaaccgttaaagcctcagcgtgcagaatattgttcacaagtggagcttggtgaaccacaatggatcaattgtgacattcgtaacttcagaatggacattttaggacaatttggagttattatggcagacccaccatgggatattcatatggaactaccatatgggactatggctgatgatgaaatgcgaaatcttaatgttcctgcactacaaactgatggtctgatttttctttgggtcaccgggcgtgcaatggagcttgggcgtgaatggtatgattaatcatgttttatcatttaattaaccggtttataaactcttttgacaatccttttggtggtttaccagaagaatctgaatatctttatacttcttcagtttggacctctggggatacaagcgtgtcgaggagattatttgggtgaagactaatcaactccagcgaattattagaacagggagaactggtcattggctgaatcatagcaaggagcattgcctcgttggaatcaagggagatccgatagttaacaggaatattgatactgatgttatcgttgcggaggttagagagacaagtcgtaagccagatgaggttagtagaacataaatacaccttagaagctttgaagtatagatatataatcttatttatgttcttattcaggtaagtaagttgagttatctcttgtgtattcgtgcagatgtatcctctgctggagcgaataagtccaaggacgagaaagctcgaattatttgctcgcatgcacaatactcattcagggtaatattttgtctcacttttacacttcttacatgaatatctttaagtccctttttcgttttgctgcaaacctatgcaatgattttcttgatcacccgcatagcttgaagagacgaacttatctaaatttataatacatacttgttaggcagtctaaatttatctaattctgtgtagcctgtagcttcatgaaacctcgagtttaaacaatcaagtagggcaaatacattgaggactactcattctcctatgcgtttctttggcttaatgacgtttccttaattatcatctttcatcaggtggatgtcgctcgggaatcagttgcaaggagtacgcctagtcgatgaaggcctgcgagcaaggtttaaggctgcctatcccgaggtggaagttcagccttcttctccaccaagagcttcgactatggatattgactccaatgtagctcctatgaggagtccattttccccaacagagcagccaaagccaacccctgctcaatttacagagcctgcagctcccgcagcaccctatgctgcggctgctgcttccgaagatagtaagccaatgggtgtggatgttgaaatgactagctgaagtaaaccactaaattcaatgttgcatcatcacatcagctatgccttttcatacagagaaaaaaatcaacattgtccagttttttatggtcaatttcttgagagcttgaaggagaaccttatcaatatcattacatttgtttcaagttgttatattaatttattcatgaagagaaagaagaaaagggaatattaacaaattaattgtataagagttgttattagattaggcctgatatgtaataccatatttttggttaaaatgatgtaaaagattttgattatttattgctgctgttaatccctttgctccacaattgtcttttcccaccctctcattcaaaaaggttgaaataaaatttacaagaacatgttccagttcccttgagctgtgttttatttttgttaaatttatgaggaaaccattcctcatgtgttgaaacagcacaatcttgttggttgtggtctggtttgaattctgcagcaaccattggcacggatttcagccattggtttgagtcttcttcacaggggcggtcgggtttagtagaggagggtttaaaatgatcgcttggtccctttggaaagcttgaaatgagttattatggaacggttaagttgggacagctgctgaaattgttgttagtgcacgttcagaccttgctcaatggagttatgttcaaactcatatttttgagcccttgctgcagcctcgtgaaatgcacagtaggggagagcattggtctaaacccgaaactaatacaatcaa

SEQ ID NO: 115050 - DNA, 1278 bp, Cannabis sativa
  modified_base (960)..(966): a, c, t, g, unknown or other
ataaaatgtgatttctgatctttattaattagtaaatctaattatattcaaatgagttttatttagggcacaaaacccaacagtcaattggtgaaagtacctcttgttcttatcaccgagcttaagccaattaatttgagagcattactcccaatacacttcttctttataaaggagtcgatcaaggtccacttgaagtaggggacaaagaagaagatgagaatcagtgggttgaggttgattctaagcatcttgaagctaagcttggacttttttaatttggtgtggaagaggaggaccaagagatttcttccactcaaaaaggatgagaacacaatgttgaagcttgttgctgagatcaggggtcaatgctttacgaaggcattcctcaaaacaattgtgaggtaaccaacttttaactaagtggaattgtggcttatgaggctgcatacaatcctcaacatgttgaagggataatatttatgctagatgatcagatccaaagaagtctccatagaggaggtgccccgtggggaaagaaaagtcccacatgatatttgagaggccccagtcaaatctttcttgtatgtggatgcgatgtgaatgtttgttagtcttgctgtagggactgccatggccatgaatggggtggagaatgaaagtatttaaaaatttctgaaaaaaggatcaaaggttgtttatgaatgtttccccacctttgttagtaggtgagagaaaatcatgaaattttcccattaaaagcaatggtaaattttgaatagtgtcgccaaggcggtgtacgagttgccacctgttatggaaaaagtacctgaaaggtagtccataaatgtctctaattgggtagatatgaacaaattaattttgagtggtctgaaatctcacgatcatcatatattgattaaacatattatactagtgagtatccattctgtgttgccnnnnnnngttagatatgcaattacgagattgtgtttgttcttcaaatctctttgtggtaaagtggttgctgtaaagtggtaaattatagaagttttgtgttacttggaacaatttttcccgccttcctttttcgacataatggttcccctaacagtgaatttagtgagagaattgaagttatgtggacctgtgtacatgagatggatcatgtacccattcgaacaatacatgaaaatcttgaagggttatgtcagaaatagaagtaggcctgagggttgtattgttgaatcatatatcgttgaagagacgattgaattt

SEQ ID NO: 115051 - DNA, 5219 bp, Cannabis sativa
aaatataaataaacttgattttttattcaaaatggggtacctccgaaccatgtaaaatgcacatctcaaacccaatttgcactggtagtaaaaagaataacgcatacgcaccaacccaccaaggcaagcatatcagtttgtcaataaaccaaaaatatgaaacaaaagaaagcagatacatgcatcatcactatgccactattacatcaaattacatgtgaatcatctacttttaaacatcattttttgagcctgaaatcctaaaaaaaattggctcctctaaacattgattttctaacagctcttcaccccatttttctttttccgttcaaacaaatgtggggcgcaatcacacgagtcaccatgatgcttttcactgcgaaagcaatctctcttctcccatatcatttgactcatctcaacttgtccaaatcttggaactttacttgggtttgtgttttgggcaaattcctttccattttaactgattttaatcaaagaggatggtaaggcacatagcccagtaagctcgtgacattggtcacgacatcgttacacctcgtcaagaggtttaacatctgttgagaaatgtcaatggcagggggcgggtgtggtggtagctgtagttgtggttgtggtggtgcaataggagtgtttctgggtgccataatttcagtatgacgtaaattattaagtggagcttttgcaaattgagggggaagtgggagaatagatgaggtagatggagaaggaacgaccttttgaaagtttcttacactaaaatccattgtaacagtagaagcaggtgtaccattatcagcaaaactagcattgttgttggagatatttctattaccggctgctgccgattggtcggctaccctactcgtactctcttcaccagccaaagcaaatttaacacgtggggtggcacccttgttgccaccactagttccggttaactgccctgactcatcaccagtcggcttcttcaaacaggacttgagctggatagaaggctgcggctgcagttgtggcaccgctggtcgttgtaaggcagcaggatccttggcggctcgtggggtatcattgtaagcatcatcaccttggttcttccccaattcaggagcttccggtcctggagtttcgacttcctttacgtaaaacctcacactgatgtttccaaatagagagttgtttgatatggcatatttataagctgcttgagcatcggatttgtaaaggaatacaactcggcacgtggcagatttccagaatacccttagatttgcctgatccatcggcccaaaacgtgcaaatcttgccttgagttctgcttgggaagggagagatgtttttggagggaacttcatcaccagcgtagtgggttggacaaccttcgcaggaggttcaaatctttttgcagaatctggcttgtttcttcggacaaggggaaccgctgattcttttccctccccacgtagcacttctgaagattttggggtggccttcttctccgctgccaaggatttaatgtcgttaattttcttggacctctttaccgcaatctcctcttgacgatctgatggagcccgtttgcgtccagctatagtaggatcatcagatcggaaagggggttttgctggttttgaggatggcagatctctaacgtactcagaggagttattatccgaagctccaacagcaacagaaaatttagagagacggacttcaacagattcagtctctgatgggggtgaaagaactaagcttttctggtaaacaagggaccggaatctgaggaagaacttccttacaattgcagggctgtttctttccgtaccatgaaaaggatcaagagcaagagcatgcaaatcgctcaaaagttctggaagttcaagttcaacgttgccaaccagtagggaatttccaacagaatcagataaattgttactaacagtctttttagattgtttaaccttcgactcctcttttgcagccaaaccaatctgggttgattttacccctatttttccagaggaaccttttttggaaaccgaattcttctgtgggtccctgaatcctgtttctgagcctaattgtttcttttttttctttttctttccgtctgtcattgagttctcagagttcgattcttccaatggacgtttaactttggcctttttcaccccaacagaagcactcattccactcacacgctttgcatcacttgctagaccttcaacactactaccatcctgaacttccattccatggcttccttccactctcggtgtaagactcaactgggattgttgaacatcttcatctggtctaaagattttcacattctcctcacgtttaaactcagccaagccctcattatcctccttaaaggattgtgatgtatcatctatcatacatggcacggtcccatttcctgacaaatcgacggaggcagtggttttggtaatctctactatatcagacactgatcttgaagcctctttcacttcttctttcactttatcaagggatggcttttcatcctcaatgacatcttcgctggcaagagaactcctagctggtgcttgatctacaattaccgattcactagcatttgaactagaatctacaccgggcaagctaacagacccagtctgtacatgtttttctggaatctgagactttgaagaaacaagtgaagctctcttctgcaacacataatccgcatctccaactgctactgatccctccacataagctgattgggctgaggaacttgcttgcccctggctcgttttctggccttttatgttaccagattcatctctacgcttgaacaagtacctgtcctttttggaactgtccttaactttattatgttttgtggcactggtaccgccaccgagagtttctgcaatcaccattggaccactcaaaggagctgttcaggagacaaacccatcaccatcaggactagaaaaatagaatgcacagctgataaatatgatttgcagacaagaaagcaattaacactgctctagaaattttctttgcttaagtggggaatacttgattaacaaataagaatagataacttaattgctactatattttgggggcggggggaataaatcttaggtaacaaatatattaaacaaaaactaataaccatatcaagggatccttcaaatatgaagtccaatacatcgtttttgttaaagaaaattaatacatggtattccaacccccaactatttatctctaattcagtaaaactgacggttagatgcattacaccacaacattatgggtcctcgtactgggatgtttatatcaatataagtgcaattaacatattcatgtcttctctatgttactccaaattcatctattgcacatagcatacagaatatcaatgaatgtatagagaaaacaaagaaaaaaaacatgctcacctaaataaaatacgatcactattcttattaatcccacacgaaagtgtaaaatggtacactgattatttgaaagtaatgagcgccaagcatttcaacaagtacagtatgttacttgttacaagcatgaatttcgaaacagttttagaaaacaccagaacacaacatccgatggaatgaacaatcaaaataattcccaacaatgactctaaaccatgtaaattagtacctcgagactgcaaaacagctggtggttcacgagaagaacgtccggactgcacattaaacgcctgagcataggtctcgtcaaattcctcaaatactgccctacgaaaagaaaaaacagtggccttattcttcacaaaactcagattcttctcatcaccatcgctaggtgataacgccaactgcttaacgaaggagaggatttcagatggcctgcaattatctctagcctttctgatttgaatcgctgaataaacagcacgcggctcataatcaggcacatcaacagcgaaatagccttgaacatttgttgcacgaaagttatttggatttctacatttacaagccaaagcaagaccacgcctccgacatacctcatccactgcttcctccacggccttgataaagctcctggaagtcaattgccgtgatttctctgcgaaattcgaatcgaaaggaataagctcagcagggtcgaaccacccgtagctactatcaccgaagaaagccactaatatatgaccctccctcctggttcgacgcacctgagaagtcgcaaaagcttcgttgaatatgtgacccggccaccatggatgtgatttcaccttcccccaaaccatatcaccaacttcaaacccataacgctgtgccctcgaagttgataattgtccactattctcattagccacaaaatcatcgaactccgacaacagagaattatactgagaaactgtaccttttcccgccccaccatgtgtatcatcatctgcatgctcctttcgactatcctcgctctcgctttcttcatttcgagcttcgagttcatcggcgctcgagttttccaccttagtctctgaatttttcaattccatttcttcatcgtcactttccttacggacatctcccttaaccctaatcccatctaattctccagtatcagaaaccctggaaccaaaatcttcagctcccgaatcgagctccattgccgataccctaacctcgttggaacttgaatttgaatacttctcatcttcagcgccatcgacgcagccttctgagatcctcccgcctttcacatcttcaggttcttcaatggcatctgattttctatcaatttcgtcatcgctgttcatcagagagatcattgaaggaggaatgaactgaaaatccggcgaaaccctaaagaaatggggcttggggctctgaatcaccaggcatacttttaaaccgcctcgaagaaaaaaaaaaatcagagtacaaagcttagacaccggaaagtagaagaaacgtgcgaaatctatacaaaaccctagggagagagtgtttggatggcaagaaaatcaaaatctggggagttagaatatgttgagctttgtaccaatcggtcactcattttgcgttagttttttatttttcattgttaccttctcactcattttatgtgaacttaaacgacaccggatatttaattatgaaaggatggaaatgtcgttttgacaattcaatatcggacaatatatattttttttttttttt

SEQ ID NO: 115052 - DNA, 1519 bp, Cannabis sativa
tggttcgacctcacttgcgtgagtgtactacttgattacgtgcacttgcgtattgttcatatttttcgtaacaagtttttggcgccgttgccgaggaattgtttaaaaattgatattacagtaattagactaaattctactttggttttttttcttacttcttactaactatttttgtctcatttttttcttaatctatctcaggtaccattggtttatgcgtcgtcaaggatcaaatttaagagtgcctattgatcctaagattgcgaagacttgccgacggaatagaaagaataagaggttagaaagagttgcacaaaggattgacccgattgaggagatggctaataacggtaataatggaggtgtcgtggaagaccaggcaaactgtaataatccatctgattgttgcctgagggactatgttcttccaacattgacgagggttcagtcttgtgtaagactacctgccgtagatgctaataactttgagattaagccagccatcctccaaatgatgtaatcattagtccagtttggaggactgccctcagaagatccaaacgtacatttagctaactttgtggagttgcgtgagttcaaggtcaacggagttagcgataacgccatttgcttaaggttgtttccattctcgctgagggaccgagccaagagttggttggtgtctttgccacccaactccattgctacatggactgacttggcaacaaaatttttgtcaaagtttttccctccagctaaagctgccaagttgcgaggagaaattaataatttttgtcaactggacaatgaatctctctatgagacttgggagaggttcaaggatctcatttgaaaatgtccacatcatgggattgaaaagtgaatgttggtgcacaacttctacaacgggctaattggtaatactagaacaattatcctgcagctagtggagcttttatgagaaaaagatcaaatgaggcttatgaacttctagaagaaatggccatgaataaccaacaatggcccaccgaaagaagctaatcaaataaagtacttgtgggaatacatgaggtggatgctataactaagttaacagcccaagtggaggctttgaaaaagttgatgactgttcaggtgaagcaagctcatgttacttgtgagctttgtggggggcctcattcctatgatactggccaagtggatgtgaatagtttgctaatggatcaagctcaagccattggtaactattcacaaaataataattatgggtacaactaaggagggagtcgtcaaaactatcaaggacagccatcacaacaacaaggtttccaccaacgaagaaaccagtcccagcaagctcaacatcccttcgaacaactaatttctagtggaggcttaaatatctaagctaacttattgctccaattgatgatggagactagagcctctattaaaactctagaaactcaaatggaacaattggctactcaagtggcaaaacaagctcaaggaaatt

SEQ ID NO: 115053 - DNA, 7192 bp, Cannabis sativa
ttgagttggttgaaggacaagccataccaacatgtttgtgtggagagtgatagcttagttactgtacaagctatccatagtccgatagagatgttttcgggttttggtttgattgtgaaagattgtaagtctttattagactctatgaataatgtttcgttaaagtttgttaaacgttctgctaatcgagctgcacatgttattgcacgtcagtctcggttgtttgctgatcgtacgttcacaaaggatgatgtcctttcggaacttgaaattgtacttttgagcgattgctcttgagttaatgaagttgattatttattcaaaaaaataataaataaataaataaatagttactaaacaaatttaattataaatattaattttaaaaatattaaaccatcaaattttaatctaataacaaataaaagaaaaaatttaatttctatgcttaatttaactacttaattaaaaatatatattaaaaaatatctcttttcacattatattgacaatatgttcatataaaaatatataagtcaaactcaatttttacttatcctttttttttttgctaattttttttttacaatctcaacccatatatgatataaaaatgagagatttcttatattagatagaaaaattaagcataaaaactcaaatttttctaattttacccattcatgggtaatactcattaagagtgaacacatatctattctacataaaatgtggctatgtaatagaattcttgctttaatgcagttttttagttttttacgttaactttaacagaatatctcaattacttaacaaaatattctttattaattttataaaattattacatatatttaaaaataaaaaattatatagatactttatataaaaaaaatttaatttaattatatatatttaaaaataaaaattacatctatatataatcacatctatacataaaatatacacatttaaaccttaatttcacaacaactttttgtttttaaaaataattaatgatatatatatataagcttttaataatttgtacactttattgtaatcaaactcccctaactacaaattaagaatattgtttcagctactcattgcaaggggggctatggccccccaacatttatatatccccatattatatatacacatatttatatattaataaattaatatacatatataaataagtaaaattaataataaaacaaactctattactaatttaaatacaactaatatatatatatataatataagttaaatatttaaataattataatatatataatataagttaagtacttaatttattaaaaaaaaatacattgtattttaataaaaataaaatgtaaaataatttttttaaaagaaattaactttcaaattaaatttatatgtagtgtaaataaaataaggtaattgtttattaattgattttttttccttctactacttaaattgttatttatttttaccaataaattagtaacatctattattgtttatgttttttttacacatttggttcaaaatcatttactaattgctaactttcatctttattttaaaaattagacatgtctcctctaattaagtgtctaaaatttttaatatgaaaattattttatttatatatatatatatttgttctataaaaaattaaactttaatgtgtattttgattacaagtgtgttaataaaatatttttgaatttgaataatttaaagtaatttttattttaattatagatgatttttgacataaaaaaaaaccttgttgtaaattttaatattgagtataatatataattatgtgtaatgaaaattttgtttgatattaaaatttaaatttagcccccctaacaattaagtccgggttccgtccccgatcactatcaaagtatcaatatatatttttaaaatatatgtttggaaataatatataaaatgtattttgaaagtaattaattctctaatcaacctcaaattttgttaaaatattttttaatataatccttatatagagaaagatcgatataaaatacatataataataaaatttattcttttattgtatatatataaaatacgtatatataatcacatttaaggaacacatcaatgtagccgcaatagttaaagaaaaattttaaagattaaaatctcaaaccttttttttttaaaattaaaaaataaaaatacattacctaattaaaaaaattgaacatacttatattgcacttaacatcacttaattaaatctaattaaaaaaactaattatacgtcattattcataacatcaatttaatatatattaaatactacaatggtaaaaaaataaaaataaaaatcggccgctaattttcctttcataattataagaataatttattataacaacttgcaaattaaattttgtgaaacaatacagtagattccttttcaaaaaaaaaaaaaagaaaaagaaacatttcagcagacaagtggccttagtgagatagataacttatcattggaatattcggattttggtaatcccctatatatttataatcatcgattattattgcttacctattttttttctgtattattttaatgttatgataaaaacttcgtgttttcaaactttagatttatatgtactttctacttataggattaagagatctaatctaatagttaagttgacctttctgtatattcttcaaaaaacaaaaaaaaattaaaaaccatgatgctttaagtagtttgtaatttttcataatattgtcaagagcacttctaatagcttttttattctttcctttaatatacctcactattcactagaattttttttttttttatctcacatttatattacactatgtattatattttttttaaaataattttctctataaaaattcacatagaaacccacctagcaactaacgaaataactaaaattcatatagcaatccacgtagaaactgtcaaaacaacccaaaccataaattaaaaaataatatataaaataatttctcatgttttcttttttacactttaaagcaatcttatttgcatttttacagaaatttacatagtaacccacatagtaactaaatgagcaacttaaattataactaaaattcacataacaacccacataaaaattatcggagcaatccaaactgtaaattttttttaaaacaagaagaataatatataaaatatttttcctaaattacacattcctttcttattattttttttttggtgaggaatatgttttataaacttttattgaaaaaataaagaatggcataaaaactgatatatgctcattgtgaatgaaattttggccaaatgtatgtatccaatgctaaaacaaattatatatagaaatgtttaagcaataatattgcatgtcctaatataagaatgagaagtgttaccattaacatgctattataattttggtgcataaaaacacataattttttttaaaaaaaattaatggtgttcattataattttagtattatccctgtaaatttttgaaaaactttgaattttatgttatcctaatttttgtccacgtgacgtggtatgttcacatagacaagattgatgccacgtggagtacaacttgtcagtaaaaagaccaagtcaccatgtataacataccagttgatgaagagtccaatggccaaccagggggatctgaccggccctaatgccaacataggccaaccagcctccaacaaagggtaggaggaccagcttctcttctagttggcactttcggtgcctttgtaactttcaacttggacaacgttttcagctacgaattggccttaaacaacccacaaaaataggagtctaacttcagttatttacctattctttgggactaattaatatgttattttcttatttatttaatatgtaacaaataggtgatatctcctcatttcaaggaatatcaacctactatctcttataagctctcttctatatgaagagcactaggctaaacttaaaagctctaagttctgaagtctaagttctcactcctaagctattgagttcaagcacttaaaaccctagctctcactttcttctacacgccattatcattgtagtagagactaagtctctcttctctcatctatttgagaactatctgatattgtacactattgtaagacatagagagccactctagaactcacaacacttgtgatctgagtggtattatctctcatatcaatacaactaaaaggggagtaagtcggtacccgctaactaagggggccgaacttctataaaattattgtgtcttttttatttacttgttctcattgtttacacgtggtaattttaatcatgaatacgatttcgctatcggttggccaaatttgaggtcaagaatttagtgttttcacttagagtgttgtctatcaatctgatcaatcattgtggctgtaacaaagagactccgactacaacttctacctcatcgggtcttcctcaagaccccatgattgctaatcctgattatttgtgttctagccaccattggagtttctacaatcccaacaaatgtagccaatcctgccaatcctaccaacccagcaggcccaacaaactcgaccgatacaactggtctagtcgaccatgctaacccgactgattccaattactagcctctatcgcccagggtagatctcccattggcacctcgtacagagggttttgtcaatgtggagcaacccccgtgcaccacaactaactctggcccccggtattatgctggggaaactgggtcaggaattgtgaactagcaattggtgagacttatgtggacctgggagaagaatttgaattcgccagacttagagaggttatatgccaagtcagccaaactgaagaactacgtgatgttggttgcaatgcgttcgcacattagagacgtaaatttctgagatggatagatgaccaggagtatatcctctaatctcatcaggcaaagttggactgctgtaacaggaaagttagtgacctgataaggcagttcaatgacataattgttgggagaggttaggatatgattaaagagggagactagtcaacagatcgggcaaggtctacaagcaaacaatctaacaaagttcttcaggaacaaaaatggaatttcccatggctgaaggcagacaagtcctactacacagatctagtggcgggagcaggcagactctagaacccaatggcatgggggctcggcctggtatctcttgctcgataacacccccacttggccaaccattggccgaccaacagagtgagattcctctccaaaacatttgggagaaagtcgttctaaggcccatctttaaccggctaggtcagggaatggatggaaacacccaaaacaatatcaactcaaggagtgagacttgaagtgattttgttccaccatctctaacctagctctcactctcttctacacgccattagccgtgtattagagactaagtctccctaatctcatttattcaagaacggcctcacattctcactattataagacatagagagctactctagaactcacaacacttgtgatctgagtggtattatctctcatatcaacacaactaaaaggggagtaagtcgtttcccgctaactaagggggtcgaacctctataaaattattgtgtcctttttatttacttgttctcactgtttacatgtgataatttcgatcataaaaacgactccgctgtcgattggctcaattggaggtcaacagtttacaaattcgaaaaataggttcgaatttttttgaacacacgtggtaaactgaaatatcaagaatattattttcaatactgtaaattaattggaatttttcaaaaatttacaagaataatattatctataaaaaatattgttatgaaaaaaagtttttttttttaaaaaaaaatattttgacacgtgattttgaacgtgaaagttgattaaaaattataataaaaagttataagtagtactcttagtcagaaatatatccagccaaatttttgtaattagtaaatttataccaaagccttcttatcgacttgaggatataaaaagtttcagttttttttttttggagagataaaaatttcaataatatcaagtttaaaaaaacataaaaagtggtaattaataatctttctcagatggccccagccaattgtttgttcttctttctagtaagtcaaatttaatcaaaagtttagctgttttgtttggtcaattgtttaaaaacaagttgagattactttaagagaaaagaggtacaaagttgagcctccaaaacaaaaaagaaacaaaagctaatcatgtatttgattgtaaacaactcatcaaattgacgcacgagggatttaaacaaaagagaaatattaaagatcacttaatatttttgtgtggtataatattattataagtgcaatttaatatcgagtctcttatattttattttaataaaaattataaaattttactaactaattataaaatttgatgatagtagtaaatatattagtgtccataacaatactctaaacaatatttatgatcaaaagacccatcactatcagtcaccaagttggctatttaaataataataataaccaagttggcacaaaacagtacaattaaattagatgaagtctatacactaaaaaaaaaaaaagtggacaaaccttagacggctaagaaaggtcacttttaaagtcattagttaaataaaatgtacaagattcaatcgcaacgaggacgacaaaactcgacgttatcgatcacgtgggggtcaagatttcacaatcaccaattctcatgccttatttcgtacattacgcctctacttctcactttaattttgaaagtctattgtacttgttttaacttcaagtgcaaaaatgtaactggatgtaattttttaacttgaggtaattttgtagaggtttcaagatttttaattttactgcccataatttagctaagtgggaagtttgtgcaaaatataagggcattttacaaaaatactggatttggggtaattgttttcaattttactgtcacacggcagaattaacatttatactgtcctccttttttttttttcttttatac

SEQ ID NO: 115054 - DNA, 1574 bp, Cannabis sativa
gtagcaagggagagaagaaatgcctgcaaaaaagaagcaaagtaagaggagtaaaaagaataaaaataagaacaagaaggagaaaaggagactaacctgatgcataagttcataactccttttagatagagtaaggaagtgacgccaaccttttgtagcgtgcaacgagtagatttgcaaaccttcagtcccgacctcaagaggtaggggataggagggctcgagaagaaccatctctggaaaagaactagagaacttcacttggttaactgacccagtggattattcattggcacttggctgacttgatggtgagttggcctgatgatttcttcttgttggctatggatttggtccttttgggttccttggtagaacccgggcatcactagcttgggcagccctcttcttggacttcttgtcgagcggtggaggattgctgaacatattctccaaattaagatccatatttgtgaggcgatgggaatacatcagtaattgagaaaaaataaataaaggaagatggggaatgaactcccacttaaagaaagtaaccatatttatcataagggaatgaggaaggactataataataaccaaactccctagcccatgtgatctcataaatatcataaggatttagtggagatagatccaaacttgaatctagatggctcgccctatcaaggttggtcccatatttctcggctattccatagtatgaactactgcagctaagctggaggtgaaacctagggtaccaactatcgaatctatgtgctatctgatctatgagaaagggttccaagtgtaaacattatattgattatcttagaatgatactaccatgttacgcttgaccctaaggacagagggtgaaaatccaaaattattaccttgggatgctccttcttcaacttcccgaggggcaactctatggagataatgtgcgcgagcaacataatctttgctttcttcgtctgctgggacatgtaccttttgccatgaagaatacttaggtattttatagtcaccaataagttcgtctgaggcaagaaggccaaatgtcctcaaattcttctcactacataagaaatatgcggaccacaacccaaatggaagacttagcaaggttttatgatgcttggccatctcaggagttagaactggtctctgggaaaccgccgtaagcagataaaaacatagtaaatgacctcaaagatataaatcaatacgattcaaagctaagttattaagagagaagacttatgtatattggaaaaagaaattgtatttattggagagaggtcagttctctagaagaaatcttatttaaaatcagacttcgtaggtaacctcacaatgatcatatgatcatttgtgtcggtaccgaggtaataaaagtcccctgtacacttcttcctcgcaggaattaccttgacctaatggaagtaagaaaattcagggggagtggggctctcccatcctaatatatggaacagaacctttaagcttacaagaattctgtatgattacaaaactccttgaaatagtccctcaggggaaggaccgcc

SEQ ID NO: 115055 - DNA, 1778 bp, Cannabis sativa
gtgttgtatgattacaacatatatataagattagtgcataaaacttttgacactcttgttcagctgggcaaaccactaatatctcaactatactaaattattaaaacatgtataaattaaaactaatttatattaaattgtatattagatgcttcagttttttatttttatttatttttaatggttcaaagtaaaagacaaaatatatccattacttatatttgtacgccacgtaataagaataagtactccacattaaaaaataaataaataaaaaaaatagacaccccatattaaatttgtgtatataaagtttgtgattttgtttttttgtttgtttcttttggtttagaataattatttcttgtaaaaggttgtacgcgtattaatatgttaattagagaataattagattagaattataaatttaaataaggtttaagggtatgagtgcaaatgcagaaacgtataagggcaatttagaaaaaaaagaaataaaaagttagccaatttaaaaataaaattgagtggtggtggtttttcacatgggaaagttggtacatacacgtgcctaacaaaaataataaatattataaataattaaatatcatgatattataaaaacgttatttccactacacgcatcaagcaaaacgtgcttcaataattacctattttttattattaattaataaaattaattttaatttcaacttgagatatgtattaatttatttaattatattgtcaaatcatgtgtacaataataaggtagataaaaaaagagagaccaaattgaagggccaggattcaatctcattaggccaacgcgttctactcgctttgctttttgtgtttttttgttctgtctgctctttttattgctttgttttattaatgattaccaattattattatattaattactcaccaattcaccgctgtaaaatttaaaaaataataatagcaagagtaattaatattagttactattggagcctaataacacattgacacaccttgcttgtaattaataggttttaatgataattattaaaattaatattaatagtacacatagttttgatgttggactttgatgtactatactattgtgatattttagtccattttttggttggaaaatacatattaaatattttatgaagggattatttgttatacttaaaatattatttttataaatttttaaacttttttgaattgtttacaatattaaaaatgtatttgaaatttttcgaatgcgcatcttaaattaaaatatcaagaactttatttttaataatgtaactatttgaaaatttttaaaatttataagataatattataactataataaatattgctaaaaaaatatttgagcaagcatgtgatttctgatgcgtttaataataaatagtagtttaattacattataattatggtaggtaatataaatattttgtttaatttttaaataatttatcatcaataaaatagaatataaacagttagttgtgtggtataattaatgattttacattttatttttaattctataaattaattagaattataataatcaaatttttgttataataactaccatataagatagagaaaaactaaaatgtactattaatatctttttaatattatataaaaaataattttttaaaagtatcgctaactaattttataacatcactcgtatacaagtgtaacaatactctatataatattacatgtgaaataaaatataatgttttttttttttt

SEQ ID NO: 115056 - DNA, 1621 bp, Cannabis sativa
atgaaaaatataatatttggtgtagttttttggtgttgtggttggaattgaaaaaaaatttagtgttgaaataatagttttttggtgttaatttaacactaaatttagatttatccattggagatacccttaatacattaaatcatcattattacctggtaaaaaccggtaagcaaaaaataaaataatacgttttcttgtgttagaatctttatatagtgcagctttgatcgttttgcattgttgaatttggtagaaacatatggaagcaatagcttcgaattttaaaatccattatttgatgttgttctcaaattattattatatttgggcatgaaacaatatatttggatcaatctaggccttgcttacctagtatatgtattatttatatgtgcacatgctgtaccacagaatctaatgcttactttttgatttcatattcgaaatgaaatggtttgtttcaatttataacagccaaaggaaattaataataaaaaaaagttaaacatataatattaacaaatgcaagccaatctaattaaagcacttaatctcaatcattgtaacttaaaaatattaatttattcatgtccttatccaaatcctatcggtttgctactggacttgttctatttaggtttcctcttcatgctaaccaaagggttatataaattataaacccttacctaatttcatttaataacaaaaaaaatttatatgtctatttattatatatataaaaagggaaagtgtcatttttttagtcgatttcaaccaaaaaagtgtcttgctttttaccaaatcatcctctagaccactaatttatgagattaaaaaaaaacaaagagtgctgttcaagggtcttcggaattatttaatcaacaagagagtcttcaagcaatttgaataaataaatgaacaaaataataaatgtaatagaaactgagaaagatattaatgttttttttttccttcttaattttaaaattcgcattgttttgttcttttcaacttggacatatttaatgcaaaaaagtgcacataattataaaatttgcgaactttaacaaaaaaaaatatatacttggccaagtggtaacaatgatgtaattggaaaaagtcaagtaatgcatcggtggagctgagtcagcaaattctaagagaaacacgtggcactatcaaattaggaggagagaaaaatcacccttatccaattagggtcggacttttttcagttttcaagtcattatcgatctaagactaactccacacatcaattatatcacttattatttatccataaaccaatcaaagttttttcttacatctcacaaagagtaaattggagattttgcagaattcttgtcaccaagaaattatttagaaatttatataaataatttattaattaagatgacccaacttataaattatcacttgctatacaaatatacattatatttgtgtgtaatttatgtaggtacatatcattactctataaattcatataagtattttactctataaattcatatatgtataaaccaaggctttttgtatgttatgtatgtagtctctaccgattgaaatatttaatttgctgacataatttattgtc

SEQ ID NO: 115057 - DNA, 3584 bp, Cannabis sativa
gactaaatgggaaactaccaataacaaaataggaaactactaaatttcagttaccataattcttttacaactaatatacagttaatattctaacaggaatcaataccatacgattcattcccattccctttaagtaaacataccataaaacgtacagagagtcttttgcagacttgaagctgttacaactaagtagctaaaaactaggaaaggttgagaaaagataggaaagtagtccggcaaagaataagtcattaacataattgcctaaatttttatgaattttaactttgttatggaattatgtgttgtttgttatgaaatttacgacttataaacttttcttcttattgttgaggtgtacgccttgatgtcctcaaggcttacgcaaaatgcgtcggtacccgattctgtttcaaaagctcatggaacaatactatttccagttacatgtgtatattgtaacagttctatatcatcgatgtacttaattatgattacactgcttatatatgacatctaattgttgttggcatagttctattgtcttggtgttgaggacttggaactactttcgggagaagaacttcactcaccaaattcatttctagtgatattcaatgggcatattcttggcaagcatcggaggccacaggtacgtagttatatccatctaatgtgcaaagcatatgtagtaagttgtttcctcttccaataattaatttcagctcttgactttctatttagttgtttggagacatgctctgttgcaacagactataataataatatcactcttttcttatccaccgagttttaaaagatagcatcctgattctagcaaattattcacgttacttagggggttgagtgttctcacccatgaattgctcctagatctcatttcttgtctgcaaaacactaaggttaaactatgttgcttctgagaccgtttgtacattttccggaatgtttgaagccatggctgtactgatctttggttattggggctctcttttgtaattgttatatttttcatatggggactccctgtcgtaaatattgctatcttctatattagtgatgattcttgttcattatcagagaaaacaaaatgagggtaaatacctagtatgatgagttttgtttatgccaattatgatgctgccacaagtaatacatacgttctagtaggttatgctatcatgtatgattactatatttggttgcttcagtcatctctttctttttcttttgtcattcaattagggttttgccacaacaattagaatgctacgtagagctggaaaaattggagagtttgtcagtgtctttctcaacgaaaaacaggcaagttttcaatacttctccaacaattttttctgttttaatgtggcattgtgcccatgttgaatttttttatcttccatagtattgaattataaagtttgacagaatctaaaattggtgaaacaacaggttgataaacggaatcttttttcttgcttgtggtgttagaaaagagatttgcatgggtttattataattgtttttccaagtacacagacttaacatctgtttgatatatttacatatgtttctgcatgtgcacttataacaagggaaagacatagacaagtgacctctgtcttttttttgttaaagagaaaggtacagagaaacaagtgtttatgagaaggatatatcattcagcatgtttgaaagtctacactacatagttgattctataaagatggaaagttctatagaaagctatgcaaacactttcgaaaaaacctgctcataatttcctagaagaaataagtttgaatgatataatatatcatttcgatttaacttgagcatagcaaatgtttccattatttataatcttcaaacgtatattttatattaagaactgttgttgttttttatcctgtgttgggctatagttttatgttttgtttatgtttactacggtattcctccaccacaagtgaggctcttaataaattcgatggggggccagtctaaggcagtggcctctttctcttttttaaataatattcttatattaagagcaaagaacaaaatgcatgggtagatcagaggtctatttctaattactgggtgaggttttattcgaataagatagtttgtgagacggtattctccattttccatgtttgaggtaatattcttgttgagatcttacttcatattgcaaactaatagtcacaagttcacaactaacaagagcatatcatatcagcggtgtgtctacattgcttctgatggaggccgagtttgtcgcccacttgtcattgttgacaaaggcattccaagagtcaaagagcatcatatgaaggagttgatggtaaacttttatctttgctctatacttgaaaaataatattgggtcaaatctaatattcttcgcatgcacctttcaaggatggagtacgcacatttgatgattttttacgagaagggttgattgagtatcttgatgtcaacgaggaaaacaatgctttggtttgttcctattaacgacttctgttgctttttggtttaagatggtgaacttcattgagccttattaattcatggttttgtattttagatttctttgtatgagcaagatgttaagacagatacaacacatcttgaaatagaaccattcaccatcttgggtgtgattgctgggttaataccatatcctcatcacaaccagtctcctagaaacacttaccaggtttttattttttttagttgtagtttgtgctttgatcaatgttttcatcttaaattacttcattaatcaagttatatattttttttctttattgtttttgtccttcattttagtgtgctatgggaaagcaagcaatgggaaacattgcattcaaccaggcaagcatttaacattttttattttgtttttctcttgtttcatgtttggtaaatgtcttgtatttttcattatctttgttggtctatgaagaactcatacttcaatttcttaggtatgttcagcagcttggattgttcaatatgtttcttttctacaattgttaatgtggtagatactcaagctaaagtatcttaacagtgttttcaagtatatgtttttggaaaattcttcaatgcactctctaaaaagggtataccgatgtaccctcatttgtttcggtatctgtgaaaattttttagttgatttttttttttcaaaactttatggagtgcaaataaaatttctctttttataaccacactcctatttacaaaattgggtttcactttttttttttttaacaaaaatttgggtttcactttaaaaataaaaatacaccccaaattttctaactgcccaccatccctcttcattttttttttcctttttcttttttcttcttgaatgaaatgaaccacggagaagttgaaattacaattagttaaatttttatgtgtatacatataacttttataatatagggtgattctacaatgcacctccttaaaagagatgtactgatgcaccctctacttgtttcggcatccagaagaatcttttagtctaattt

SEQ ID NO: 115058 - DNA, 1780 bp, Cannabis sativa
tcatggatttcacccactgccaatctctcatctaaaattctaagttgaattaaaaacttgttgaattaaaaacttaaatatatttatatatatatatatatatatagatcacctaatatttaatatgtccaataataataatattttctgcttaattttatcattgtttgtgagcttaaaatattattaatgtagtggtgtgttgtaaaatattcaagtatctctctatatttttgcgcatcgatcttcttagaattatatatatcatttatttcataaataatatatgttttattatcattttatgtgtgagaaaaatgtggagtgatatttgtttacaataaaattgacaaatcagcatttctaatgagatggattaattttttatactatttggtataatataatataaataaaaatattaaagtgtgacaaatatatatatgtattaatgtaggattaatatatatataaaaaatatttggtgattaaattatgtcatatagtttaaatatatatacaacaaactttaatacataaagaggttagaaatttaaaaataatttgtagttcatgaaccacattggattaatttatgtaattaaataaatgagttattacacaaatgagttatggattcaaagagttatgtttctagtaattagaaactaatattaagcttatttatatataaaaaaaataactattgggacgtggttggggtacgtatgaattaattgtgagaagatttacaaaactttatttttttagtatgctgaaagagtaccacgtgacaagacgacatgtcgcctgtaggttttttgtaaaataacttgtgaaccattggttacgttccccaaatcaataggggtgttaccaataatcaataccaacgttagaattctattttcatactagaagacatatatatataaatatatatgtatgtctcgactcgtaatattcatgggctgtaagaaagtttgaaaattaaatgtaatttgcatcacaaagttaactgatgcttataaggtttttcttgagcccttatacatactggatttctgtaagaggtgtaactctactcatcaccaagtctcctttctcaataatccagtccttgttttcatcaccaaaagtgacaactccctccttttcttctttgtaattgattaacaatttcttgttgctagtcatgtgtcgagagcaactacaatcaaagtaccattatccttctagaaatgtagacagtgaaacttgagtcaccaaccaaattcgattcacaattagacctcgatctccactcactttgatcgagatcctccccttgtgttctattgggtttttaaaaactattaagtcaattaatcatatctttcaagtagttttgtagcttattgcatctgggtcatatatgacccctcctgttacagaagtgacacgctaggatgaatctctccatttgagatatatcttccggggcaattcttcgtctttctaacttcaccttggtaggtttagatggaacatggaatcttccaattggatacgaggactcaaatgtcaagggaagtgatgattacttgtaagcctttttgtccaggttgatcactggtgtagtggactcttctaccccaaagttatctcctcgcttatataacatcttttatccgatagaggttcaattaccataagatttttgaagttgaagagtttgattgatggcagccgttcctggagggataaactctaaagcctgtttagctcttatgagttcagc

SEQ ID NO: 115059 - DNA, 2926 bp, Cannabis sativa
  modified_base (2857)..(2863): a, c, t, g, unknown or other
cagtataacagtttttggtggtgtatttataatttataatagtgagccacatgaaattaatgataaccaaccttcccgataaaatgtttaatcttttattgggtaggacttttgaaattccaaagcaatcaattgccatttcttacctacaagctaattagaagaggaagggacttagaataaaaagcaagatggtatcccaatttcttttcctttttctttgaagaaaaatagcctaagagaaaagagtgtttgagaattcattaatcaatagtagtctatctgtaaagcagcatatatacaatttagatagccatgtcaccaaacataataatcacagagctagctttatagagtgtgcaatattattagtaatcttaggacaataaaatagataataggaaagtgttatcccaatttaacacatcctattgagagtgacactaaccaaaggtaaagcaacacctcaatttacaaacatcccaagagcaagaaagagttatggaataaagataactgaggaaggaagatttgttatgcattttattacgtatacataattggattgttatgcctataaatttgtttgatctaacaaagaagtgatcccacacagcagaaaacaaatctccaagaacttgttagcacacacacaaaaaatacaacaaaagagagaaaccagctatggagttctttagtgcttgtgttacatcaaattagtatttacagagaggtctagagcatttttatagatagactcttggactctaaccagaacattactaacaaaactatctaacatgatcatcaaaagatacccgtgttagtaacagaaaaactaaataataaaccatctatattaattaattaacagtgaatattaactacaatatattctacacctattaactgataatttgtatagaaactgtgtgaatttgatcactacgattagtcttgagtgattagaagcaagtttagactttgttgttggtgtgcatatattatatatttgaagggctatcatgtgtcgacaccttgttgagttcaaaggttatattaaattttgtggctcatctcgcatttcctatgaataatttttcatcttttgaactagtgaaaaactattcataagtaatgtgggactaatcacaaaaagcaaatcatatttcactttttccaagttataatataatctaagtaattagggatgtaaatagctagggcggggtcggatggctttctagtttctacccttgcttcgtttaagggttagggatctaatcaatccctgtttaataaaaaaggttttttttaatcagtaaaatgatgctaaaatatccaatgtttacctttttatcttataagaaaatcataatcaaaaaatcttttttaaaaaaataatagctgtttaccttaccaaaattaataataatattttatagtatactaagtagatatttctcatggagaagataatattctaaatgtatttatataactttttaatttaaccatttttaaacttatctttgatgaaggcttgggtgggcgaaaccacatagagcgggtggtcgctctatctgaaatttagtttgattttaagtaatttgggacttatgcttaaattgggcatttatacaaatattgtacttttatttgagttacattaataatttaattgttttattaaaatatgagttgatgaatagttatttgccattttaactcatatatagttggtgatctatagttaatagacttagaatctgtgtaaagtctagctgaagtaaaagtagaagtagaagtgtgtgagcttttactgaaacctctaataaagagacccagtccaactataggatttttgttgctaaatcttctcccttactctataaataatatattgtactaccaaactctatcatttctcaattatttctatagagcgatgagatatgtttattatatcattcaattatttgtagtattctaagttatatgtaatattgtatcatgatatttaataaattttctaacatgaagtatcaaattgtaaattgtgcataatttagggccagtttggcacagctgtactgtgagaaaaagcagttgtagctgtgctgtgagaaaaaacagctgtagcaaaactgtgagaaaaaaccgagctgagtgtttggaaaattataaattttaaagtactatgagttgttaagatctattataatgataatgttataatttagtttattataatgtaaaaacttattttatataatactttattttttatatatttttaatttttttcaaatataaatttatatggatttgataaaaataatttatagtatttgtttattatattttatcaaatgtaaaaaaaaaaattagaaactgaagtatataagaaaaattttaggttgatgttgtttgttaatattaaaataaaatataattttttttgaaaaaaaataagagatttaatatgttgtttattttattttatttttattttttttaatatgtaataaataagtaaatatggttttagcacaaaaaaaattattatagtcttttaatcaaaataactttttctaaaagttgggtaggagcagcttcagcttttagctgcagcttctcaaaaaattcttcaaaaagctattttttgactgtttgccaaacacatttttgtcacagctttttcaaaaagcaacttttagcttttttaaaagctgtgccaaacaggcctttagagactaagatgcaaatagacttaaatttaaaaactaagttagtaaatatctctttttttgaaaaaaaattaacaaaataactaaatataataaattagctaatnnnnnnnataaaaatacatttactacatattaatttttttttttacaaaaaatatataataattaaatta

SEQ ID NO: 115060 - DNA, 1182 bp, Cannabis sativa
ataaaaaaacacagtaaaaaaaattgcctggcagtatttttataaaaaaatagcaaaagttagtataccatgtaaattttcctattaaaataaccctcatcaaacactgaatcacttctttaatattgagtaagaaaattacaacactttatttttattgaacaacactagtacaaacttagaacatacaaatgactcttaagatactctaaaacttttacacactttgaaatctcttactcacccttaaaattctaaaaccctaaatctgtgaacctttgtcggtgcattaacgtgtcggtaaaggtaatacgctcctaattcttgattagcatgaaggtttttgccgacgcaaaccgtcactggtaaaaccttttgcgccagacagttaacaaggcacgaaacttttatcgaggcattaatgcaccaacaaagattttgttagctaaattttagcgaattcgggactttctttattttggtgtatactttttgccgatgcttattatcgtcggtaaaagccagttttgccagcgcaaaggtaaaatgcattagcaaaaggtcttttatcaaccgagaattactgacatcttttaccgacatatttttgcaccggtaaaagcatgtcggtatgtatggagtacatttgccggtgcaaaaatacgccaacaaaagtaacattttttgtaatgataattatgctaagatctagggtttatggtccatatcacattcaacaattattttaaatctaaaagttttctaattacacttctattgcgactcgaatataaactataaaaaccaacagttgttagtatagaagagggttgggtccattatatcgtaccaactacaatgacaattttcttataatgcgagtaatttaacttttgtttctattaattgttattcattaattaggtccaataacgttacttagtggtctaattagatctaaataaaatatatcataccacgatgttttatttagtaacaatactctatatttgttatatatggaccactatgtatctaagctcaacaacaaacatataaaagtcaaacaatatatcctagggctgaacattggacgagtttaccgggtttcgggttggcgggtttcgggttcacgggtttcgggttcaaaaaattgaaaccgaacccggacccgaatagggc

SEQ ID NO: 115061 - DNA, 1508 bp, Cannabis sativa
ttccactgtagatttcaatgtccaattatagtgacgacgtcttagtaatgattttctggtgacagcaaaaactctaatgattttctggtgatttttcttgtaacaattacaatttcaatgtcttatccgacggtaataactttgatgactttttcgataattatttttgaaatctagttaattagtttattcattgtattttgttatagtttccattttttaaactttttatctctaaaaagacccatattttgtgacattaattttatacccatacatacatggcatgatatgacatgacaactatgatctaataaagacatacatggcatgattgacatgacaactagtccaatacaattttatcttatttaatgttttagacccactaacacacacatacctctagccaagcgtaggatcttgtgagttcataggttgcaaaccctccattcttgttttgtaaagataaaataagatgaacagcatccttaaggtgatccgccgctatggcttctcccacgatgtccgaaggcaggtctgatagtaagagagctgcctgttatatatatagtattaaattcatacaaaggtagtttttcaggtatgtatcacttttattccgaataattttagcacgtaaataaattatatctatgtttttataatatgaccgtacatatgttgctgttatatcatgctttctactaataataaattactttagactattctcataaattaaactaattattaaaaaaaatatctcctaattataattttagtcaaataaattttaaaaagagttaaataactttattttattcagttttaatttatttatttattttattttttctaaaactcttaaatatataattaaacgtataaaatttttaattatttaactttttctctgaagaatctaattatcatctcaggaacagaagaaaaacctctacaacatgatcataaacatagaccgcctaatttaccagaatccttcccttgggtttatcaaaattagcaaactatcatcttagataagttatacttatatatttaattgattatttattagttttaaaatagaaactaaattaataaattaaaattttgagaaaatatataaaattaggaattctagtatttttaaaagtatatttcactcctttattcaaaaaaaaaaaaaaagtatatttcactccttataaaaaataaaattaaacatgactaaaattataattaggagacattttttactatttaaatgattagatggtccttttaagtatttatgataacaagggatccaaattagtctttagcaaaattacagggaattaaaacggtattaattaaagttcaaataatttactttgttaaaaaagagtccaaacaaatatttagttttacatgtataaagcagaatattttgaattctaactttggtcacgtcaaaaaaaacaaattctaactttgacactctaaattattattattattat

SEQ ID NO: 115062 - DNA, 7797 bp, Cannabis sativa
  modified_base (64)..(65): a, c, t, g, unknown or other
gagaaaatagagatgaaaattgtcaaaattgcaaaataccaagtggggcccattaactctatgnncggccacttggagaggctttttccaattaatattctgattattttaatgctaaataatttttaacctaaacctagtggttacctataaatagatagtgatggctcataattagaggttgtcataaatactattttacctttctaattatctcttgaattccttatgtaccattaattcaatgtgaacaattggtatataatttattatagattcgaatccaactgtcaacacttcctaaattaacactacaggagaattaatatttaatctgttaggaaatcttggattccactattgtatatcatgttcccagccactcattttattacattccaaaaacataagttgtaagaattatcttctttgagaacctaatgaacacaaataggagttcatgaatactcaggattcagaaagatctatcaatgatcatcattatgatatgaataattctttcatggtaaatgacatgttaatgaaagatattattgcatattagtgtagtcatgtataatcaaattatacacaacatctttactacatgtctattgatatatgtgatccaaatcaaaatcacataaactagagtatagtgtatagtaaatcgtacttagtagtttcatattaaagatccttttactttaatacactaccaacttgttttattcatattgtataatattaattctcttgtacgaccttacaagattataccaactccatatgaataaggaattttcagatattttcatttatcttataattgtattttatattttctataatatattatccattatttactttattttaggccataaatcctaacagaaagaacttcagttatttctttacttagttcaatactgccaacccacaaatcttaggataagtggacgagttatcacacatgtaatagttccctaagacccacaatcaataaagcccaatgggatttggtacgaaaagttaacaatgaaggctcttgtttgatcacttgggagcacacagtttatggcatgcgagagccatatgttacatgggcattcaaatttttttgcacaactgagtagtactttcatggtaaagaaactcttagaaacattcacgttagtcctagtgacttagtttattaagaaatggagtgttgtacaagtgttaaaaggtcaaggcataatagataaagtaaaagaaaagaaatcatcaaaataaagttttttattaagttggaataatctctaatttaattaaaaaaaaaagtgtaatgaaattttacgaaggcttatccacactaaaaggttgcccgggacaactaactaacactctaaaatctaaaagctaagaaataagaaggactaaggcaatgtactacaaagcaataaagctatctaaatcaaccatagcttctatttgttcctcattccctattggtggtacctcgacccttcatgcttcttcgataatacgaacgtcaccatttaagttgaagtcaatcctctgaagagcttcaacattaagacatcgctcacaacactctataacgaatggcacttgtttcttgggaaaggtcatccaattgaatgactatgctcctccattggccgaccaagcatgataaatggcatcaaaacataggccatcatagaatacgacacctataatttttgtctcttctaacttagtcacttgaatctcacgacgtttaagctgaccctctagttgagcaacacttagggtcttgtcatcaagcgactgttgaaaagagtcttcaaattcgaaagtccttttccgagaagttggtagatctttcttgaatctttcctcataagatttttcattatcagtaactccttgaagattggatacgctgctctccaagtcactaatagcttcttccaagtcagccacctggatctccgaagccaaaattttctcagcaagttcaacaactttttagtgctcgttgtccatggtgtaagcataaccaacacaaggttgaaagtaaatgaagtatgtctatacatttaaagaagcaagctcgaaagatgataagaaaacattgttaccccgacaatatcaatgaaacatctttgggcaatgacatgttgagggttagaactaaccaacttccttagatgaatattcttagcctaacaatcaattaagtaatctccaccagaaaggagtcatttttcttgtgcagacaactgctccaccaactctgagccactgggttttgatttactagcatcaaccttttttcgggaaatttcaattggaatagcaggggatccttcgccaacttcagtaaactttaacttccctttacttgaatccttgataaggggactagcttcaactgtcttgcctcttttttgagacttattctttgtaggatttgaagaagaaacaaggataccatgcatgacctccctagctgaagcaactgtcaacttcagtatagttgtctttctcttcgaacagttcaccatggcagcaaggaaactcatgttttctgtataaaggaaaagacaagtggttaggacagcagacaaaatatgaaaaacaagataacatgacatgattagagcaaatggatcgtcagtaacctgttgactcttctactttctccaaccccttactaccgaagttaacttcttcatcgcttcaatcaagaaacacagatattctccctgattagtctaggtaattttgaatggaatcctttccttcaaaggatttctcatcttttgacatcactttggataagatcacaatttcactttggtcgtcctctttgtcatcttgaagaggcatcacccaatagtcattagagaattgagcatccaaataaacacactaacatgccattatcaaatcgactccgcagatatatttagtggtaagcaaggtcattccatccctctccaatttctaatgtcaataagcatggcatctactctcctctttatgtcaatcaaaggagcatgtctctttaaaggcataactgtctgaaaaacagtgtgcctagaagggagaaccagagaataaaagtattcttcatgatagaggttacaattactcttggtcacattctcaatgtatggattgaattgattgaagtaataaaaccattcctcttttcgagcaggactcctcttcaaatcacataggaagttgatgtcatgaggtgtgggaacatgccaattctctagccattcagatttatttggtagggaaaaactctgaagtaatatgtaactgagataaaccactagtgcaaaggaaagtaagcacccacgtagatatggaactgagaccaagccctataacacgtattttgagaacattgggacatccagtttgacatttccaaacgatagtttcaggaagaaaatagtatcttgatctctcagatcatcactcacaatgaaagccttaagaagattgatttccatcactttcctaccacgcactttgtttatttttttatttaggcattgtaagctaatttattaggtcacgtgtgggtcatattcatcaagcattcttcaacttcccttcatacgaggcatggaaactttaaaacgtcaacaagtcgtaactctgaacaactgaatatcaactcagaagaaaagaggaaacctaccaagtttcccttttcatttctcttgatttaggaaagtacttaagtttcctaattttttttatttgttttaggaacaaagctgatctaattgttccctataaataagtggagccatttcactattgagggattgaaaatcattcggtccatagagcacttaagctactaaaactattgtaagagctttcgaggaagatcaagaatttctttgttcttttactcacaagttaataaaagtaaaaggtgattaggctattaccaccatcacgtggccgaatctctataaaaatctcagtgttctagtttcttaatcattattattaattgtttctaatcgctttaattgactcattgtcattggcaaaagttgaggtaaatattttgatactttcataaagagcaaaagatcataatttattgttttgaatctttgcaggatacacaaatatgactttgcaaaaatgtagggcaatcctaatgagacaattgatgcaatggttacggatcctaatgttcaaactcctatgaatcgatgagatccaattaggacagatcccaatccagtcatccctcagcttccagtaggtccccaattaggaggacaagcagtgacaactcctctggcggggttcattataggcattcaagaaactagcgccactagtacctacgctgagttgacttctcttattacttaaatccatcagttatagatcctcgaaggaccaccgttgatgagaccaaattgtagaatttgcgagaaacactagggtagatgtaagaacacaccaacattcttcatcatgatcagtatgatacctatgaaactgtaaactttgccttcgagcagtagatacactaatttaaagagtggatggatcaacagatataaatcaagagggccaagaaaaaatcgattgacaatcattgtaggcaggccaccattctgattaggtgagcctatcaaataatttgacaacaattattggtaaatactttgataatatgaaaggtcgtgcaatttttttattcatattcagcttcaaggctttcatgttcttgcttttggcctataggcactctggttttaaacactactattgtaaagccttaaagccttttactatggacatatgattgccctggctatcttcttattgccttgacatgtatgtatcaagctgaagtatgcatgcacttgacctaaaggtaggtttagtagcttatactaaatattaaaatttctcaacataagttcttcgtgcaagttcaatgcattgtatagtgtgggtgcctcccaactgagcatgtaaacttatgatctcttagtcacttgtaattcaccaagttgcatagaccttgcttgggaattttctcaggggtgctattgggtgtatgcatgtggaacgaaaaaaaataactttaagaagttatctttattattaagtggtttagacacatttggtcttacgtgcgacaaaagcttacaacttagtgtctgcttttgaaataacgttgtggctacccctgtgtagcttactgcgcaaaggccatcactgaaaagtgatggaaggccattctgtgaagtaatggtttctagctcttttatattttgctacttctcaatgggtactagctcttttgtgaattcctggacggttaatcgctagaggaaccactatacaagttggctagtgagagaacttaccaaggtgctctttattctagtattttggtagaagagccaactctaagttctcattgtacttcccaggcttgtatgcacctttattattatcttttaacttggtgcggaacttttcagtttggtccaaacatgcttgctacatgatctttattgtcaaggaatgttcttcaaagcactaagttgcttacaaagaatttcctctctctgacttgtttgttaaagcacctagtaactttttcctaacaaacatgtcgatttaagttggcttggtctcttcttctttcccattcttcaagggatccttctaacaggatgtggtttaattttcggtcattgtagaccaaaagtgtgagagtagactattggcggattaggaggagtcagggtatagaccaggtggctagccacattggagcattgcttgaccatttggatgaggctatggctggccagcctgtggaggtagtggttagcaagatttttggttttatgaccgaccagcctattgtggccatggttggccaaccttttggagggcaggtcgatgtgccacttttatcccttttgcactcgattggctttgcccccaacatgattgccgtagagccttttttcactccaatcaataactattcaacttttttcttggtcacacttcttagaggtggtattgggataccacgtctgtgcgttatgctgggaaggattgtacaccaagtagctatcctccgtactcgtgctttttggcaaggtctttgtttggaggtatgttgctgtaggtgtacccatgttggctgtccaacatgtctatttcttttcaaatagggatgcttagttcattgaaagattgaacgggtaccaggttgtcaaggctgaaatggctagtagagtgagtgtgtcggatgttgcatcatctttggggattttcctttcggtaaagcctttgcgttgacttaacaagtcttggatcttgttagaagccaacaatcagagcttcatattctacttcattgttacaagctttgagtctgacctatgttttctcattcaaccactgcccctatgtgttttgagggtcatgcttgcatcgggcaggtggccaataatgcaccttctaggttgaatcgtcttgctcttgctctcacttcttctctagctcatgcctttctcccaaactttaagagattttaggggatatgcttctatgtttaggcatgaaattggagagagcttggccttttacgaccatgcttggttgacatgtggccttatattggttgagcctcagtggtccacttgagtggtcgacgaggtgcttcaagttttggtgacacttgtcgccaaggccggttggcatgcattactctgggagttttggtaggatagtgaagcgtgcacacttctcctccttctcctttagacttcatagcgtaagggaatcattgaggttttgaatttccttttttaccattatgttggttagagccattattgttgcgcttacttccaatattctcattgttggagaattagctgagattgtctacgctattcggcacgtcagacaacacctagggcaatatgatgccctgtgtctgttcaacattgacttgccctcttttctgggattcctagatagcttcttctaacattatgaaaccatcaactctctcaaggaactccttcatgtttctcgttgagatccttttgatatctttgaagaattatctcaacggtaaaattcctctgagtatggtcgtatatcgaccttcttctgttaggccttcaaacttggtggccttagccatgaatctttgaatgtagtctttgaaggttcgtcatgtctttgctttatctcgacaagatcctccaattatgaaggtatttatcttgaggcagagaactaaatatagaactctcaggataattcttccaaagaattaaatcttcttggggccagcatgacataccactgttaggctatttcagccagtgttaccagaaagattcagcatcgcacatctctagttacttattggagatctgtttggatctcaaagtatttcaagtatactaggggatcttatttccctatgtacatcttccaagttagaatcttgaattcaggcacaggcaaggcattgatgtatggcaagaaaagtgaaccccttgacctatctaggtcaaggtctgatggttttaggccagctaagtccttcagcatgtctcgtaattgatcttgttgtgcttgcataaaaggatctgttgttaaaggggcctagttgattggcccttcttgattaagatggaaccctagattggcccagagcctagctggccataccctgggagagagtatggtcgaggctggcca

SEQ ID NO: 115063 - DNA, 4694 bp, Cannabis sativa
  modified_base (256)..(259): a, c, t, g, unknown or other
atcatccataaaagtgggtatatcaaaaaaaaatatgaaaatagaggtaaaaattaaaacaaataaaataaagtaggtatacaatgtaatttcctcgttttcttgtgttcctttaaaaaaaattaaaaaattgtgaaattgtaattatccttgggaaatttacatagtatactaaattttaccattttgttacaaaaatattgctagatggtattttttacttttttaatatattttttttataagtttcatactnnnntatactgtgttaagtttcactggtgttttttagttgttcaactgttgttttgagttgttttactttgtgttttactggtgttttataaaaacacaatatttttgaaaagatttctgtgtaacagtatttttgtaaaaattaacccaaattcgagtatttttataaatttcccttatccttttgtgattgatgtaaaaagcccattgtttggttgtagcaaattaatttgggccaaattaatagtgaaaattgaggccatttcaaaatggactctagaaatacacgtgttgctaacgacgtcgcctcgtcacaaatgagtttagggacataggactttgcggccgtctcctctccgacttcctctctctccaatccaacaagttcttcttccttcctttatcaaaataaaactaataattccctttcccaccattttttctcccgagaaaatataattacttattttccctagaaaataaaatatatataatcgacgttgtctttcggcctatgtagctccaaacatggcaaagcctcaataacaatctacaggaataagaaaagaaagaaaacccctttgaatctttatcatctttgatttttatatttctagggttttttattctcaacatatcttcttataatagttatagtaatgtcctcgcaagtgcagtcggggatggaccctgccgtcctcgacgatataatcaaacggctaacggaggttcgatcagctagacccggtaagcaggttcaactttccgagtccgaaatcaagcaactttctgttgcatctagagaaattttcctccgccagcctaatttgcttgagcttgaagcccctatcaaaatttgcggtattgttcgtatacctgtataatgaatttatatatttatttattttgcttgactttattatattccttttatattaaaatatggctattggaatttttttatgaaaatgatcatcgttcaaaaatacaaaaatatggctaaaggtggttcttttgttatctaggttctgttatttgacatggctgttgtgaaatttctaatggggaatgtttatttaattatttcattctgggttctgttgttttggatggttgatatgaaatataaatttttggaaggttgtggaaatgctgggtatttgggatttaattattttcggatttgataagaaaaatgtctatctgtttatctttattttgttcctacggttgttcaggaatattaacatagtccaagaatgggttgttcgatattacattgttagaaaatgagaaaggatgaagaaaaagtatgcaagtcaataattaataatttcccatctttgtttttactgggtggacggattcttacttgctattgatgctgttacatattggttatttatttcttgcatcagtctaacattataattaaacttagtattttttggctctgttcaattggtaaagaatgttggagtagaactataatagttagtgcatttgtaatgttaactgttctggctttctctgtaaaacgactgttcagtcagaatatggattccttggcatccttaataaaccgtgtatggtgttgttcaaaatataggcacttgaaatgtaggtgcattaatgttatgtatcggagtagacacaatgtcatgagagtaatttcaaaatgtttctttagcttgcaaggatctctaaactttagattgctgtttagggtcaggaaggatataagataaacttggctccattgacttataaaatgtgaaccagaaagactctctcataggacataccagatccttatattctagttttgggtgagtgataggaactatgctgattttagtatttcaagctgtttctttgtgactgttcttgtctacattttgcacgctggtaattggttaaaaatttgattttattacagtaaatctcatcttggaatcagcacatctctgacccattattgtttcatttacatattcaggtgacatccatggtcagtacagtgatctgttaaggctttttgagtatgggggttttcctccaaatgccaattatctatttctaggtgactatgttgatcgtggcaagcagagtttggaaacaatatgccttttgcttgcttttaagattaagtatccagagaacttttttcttcttagaggaaaccatgagtgtgcttctattaatcggatatatggattttatgatgagtgtaagcgtcgatttaatgtgagactctggaaggcgttcactgactgtttcaactgtcttccagtggcagctcttattgacgacaagatattatgcatgcatgggggtctgtcccctgatttgacacatttagatcagataaggagcttaactcgaccaactgctattcctgacactggcttgctttgtgacttgctttggtcggatcccggtagagatgttaagggatggggaatgaatgacagaggagtttcatacacctttggctcagataaggtgggagaattcttacagcagcatgatttggaccttgtctgtcgtgctcatcaggttgttgattttcttcaattttccttttataactccagtctcagatttcacttatttcagatgctgatcaaatgccttgttttaggttgtggaggatgggtatgaattttttgctgacaggcaacttgtaacaatattttcagccccaaactactgtggtgaatttgacaatgctggtgcaatgatgattgttgatgaaaacttaatgtgctctttccagattcttaagcctgcagagaagaaagctaagttcttgatgtgaacaaagatgtaaattgagctcaaagttgctccaagacagatgattattagtccccttaatctctttgattgaaaaaggtgtaatgtcttttgttagcatgttagtttagtatatccttacatatttattaattttcttcttcaagcaggcacatttcaaatgtttcttggagaaagtggatggtaagaaaggtgaccagagcttcaatgtctgttatatactcttgaggaaatcaagtttatactttaggtcttacaactttggtctggactatttgtactcgtttaaggagtcagcagaaaaacagaggggataatcttctgctgttttttttttctttttttttttttctttttctacttcacagttattttgctacagatgtgtagatatttctcaaaatttatagttattgcagtgtcaattgttagccaagaaaatgtttttccaagtattatagtatccagtttctcatatagatatttcttttcttttttagaaatttaatcacactaaagtagcatttatctaattaccaaaattttataatagggttaaggcttggtaattttcttccttcttttgtgtagagctaagcctagtgtcaattagttgttttcattgtcgttttcaacttcattcattctttcacaatacaaaaagtggggaattgtactctacttgtctatttgtattgcttctaaactaattgtcctgctgtttgtagggtttgactttgatgattttgattagcttgatagggatagttctgcattcgtgtctttatttttgttttgaattttccaaggacaattttctcttgataattgttaaagtgattacccaaagttttttgatacctttctttgtcctttagaactgattaaatctaagacaaaaatttgaagaaacttagggccactatttgtaattcaatattttgttatatattttaattcaataatcgtaatagaaaatctctactccctcataaactatcattttatgatagtgttaccattattggtgtctttgtgtgctgcggtggttgcaaaaatttattcctttgtttttttacatattacagcaaagttttacagcacaccttacaacttctctattattttcattaaatcatttaaatttaatatttttatgtacttctatgttaattaaatttataaaataattaaatagaaatgaataaaaataaaatatatagagcataggagctgatgaagtacattttattcatgattctttaaatttttaaacgagatactcttttaaaggagttgttgggagtgtaatagctttggggctgaactccatctcttcaactcttttcttagatccaaagtccaaactacatgagtagtaagtacgtaaggtggacatcattcaatccaattgaatcgaattaatgcaattcaatccaattataaaaagttagatatccaattataattcgattggatgctaaaagtttgattctaattggattgaatcgattattgtaacgcttgttgttttgtgtatttattttcataatgttttgttttattttattacttaaaaatattattgttttaattatttaaaaattttagctacatta

SEQ ID NO: 115064 - DNA, 826 bp, Cannabis sativa
  modified_base (100)..(104): a, c, t, g, unknown or other
  modified_base (788)..(800): a, c, t, g, unknown or other
gagtataggctgttacttgtcaatagtactgtcttatgaacgttcgggactcagtatcttgtgggacacggcagttaggattatggtcaggggtatgggnnnnngatcataacccgggatttatgtaatgaattgtttaggtttaaggtctaggacattggaaccatgttctaagaaatttatgaaaatgatttataagcctaagcataaaagcaaacttcttaaggctcgagccattggaaccagaacctcgggaaactagaagcaaagctaaacttagcaaagttaaaattcatcatatatgcatcaaatatctagtgagtataaagtcaaagaatgcaaattagaaacattcaaaaataattacatacttaaagccctatgataaggtcacaaataatgtctccgcatcaacaaaaagaagtttaaaatagttcatgaaattggactatagctgacctggatcagttagttcctgaactaggtctaattgattttcaattgaagcctcaatgactgggacatcactagttggactctggcctgaagctggaacttcatcagctggatcaatctctgaggacggaagagaagatccttcttggatcacatcatttgatggaatagcttcaacatcctctttaataatctccttagtagcatgttcaatagttttaagttctaggatatagggaagaacctgtgctctatcatcttcatctagaacattcaacacttccttgtttagcttccatagatggaaccagtgttggaaatattttaccagnnnnnnnnnnnnntaccatgtatgtttcattaacatcct

SEQ ID NO: 115065 - DNA, 2357 bp, Cannabis sativa
cactaatgaaaaaaccccttaatttattctaattgatatttatttttgataaattatattattctataatttaaattagtgttattaatttattctaattgatatttatgataatgttattgtgggtattatgacgcttaaacttgacataaacaaagcctatataactgagtagagtaaaaaaaatttaggggcattatgaggaaatttggatttgataaagatgggttaagcttattatggattgtgtgactactctagctagagtatgcttttggcgccctagggggcgagtggttcctaccaggagttgcgaaaaggttgtcccttacctttttatttatttttattttgtccggatgcgttatcatctttaatcaagcaagcagagactatcagagatggttagctttcgttgtttaagaacgagaccctgggtatacatttgttctttattgatgacaacttaatgttttagagaagtaatgctaatgatattgaaactattaggaagattctacaaaagtatgaagaggcttcgagtcagaaaataaacatggataagtttgcaattacttttagttctaatgtgcaacaactcgataaatatatatatttttacaaattttggggttaacttctgtgattcccatgataagtatctagggttaccaactattgttggtaggaataaaaaaaagacatttgaaggtctttgtgagaaggttcgaaagagagtacgaggctggaagaggagtctctttttagctattggtagcgaagtgcttatcaagatcattttacaatctatttcaacatacttgatgatcattttcaagttgccagtgtcggtttgtgagaatttgaaatccataatcttgcagttttgttgggttcttcaagcaataaaaagaaaattgcttggcaggagtgggaggtggtgtgtcaacctaaggtgaaggggggatgggatatcgagacttgcacttattcaatcaagctctggttgctaatcaagtttggcacattctgcagttttcggagatgcttgttgctagagtgttaaaacacaagtatgttctgtgtggttctctccttgatgatattgatagaaatggttcgtctcatttatggattagtctcatttgggggttggagttgttaaagtatggatttaagctttcggttggaaatgggaggctcataagggtgcttaatgactcgtggttgccttggcctcgatcttttaggcctattactgtgagacgagatgatgataggttagttagtgaatacatcactgctactggggttcgggatgtggggaagttgatccatgattttctacctatggatgtggatgttattctcaatattcccttggcttgtggtgtgaaaatgataggtggtattggcactttgatagagatgggaattacaatgtgagtaatagttattctcttgcttggtgtcttaaatttgataatgggtgtgcggattcctcgaggttggcttggtggtggaatgttttatagagttttgatatactacctaagatgagcaaactcacatagaggcgagggcgggaggggcacagtcatcccctaaaaaaattagaaaaataatgtctatgtattttagttaattacagtatacatttgtacgtaaaagtgatattaataaatataatgtaagcttttgtataatagttacattattttacacacttagtagatatcatgagttcaaattctaacaaaaatatgtctactttttaatatttttaagttttttttaacctctaccaataagacttgtaatttactttaaactattaatactataaaaatacaagtttgcatcaatttttaatatgttatatcatgtaaaaaaagagtacgtcccctcacttacaaaaaaaaaaaaaaaactacgcccttcaacttaaatcatgggtccaccactgccgttaggcttttgtgtggagattttatcatcatgctataccagttgcatctcaattaataaaaaggaaggtacatgtttctctttgttgttcgcgtggtgaagcaactgaaactttgaagcacgctttagttttctgccccttgctggtcctgatttggtgtaggttagacttttggtcagtcattcttcgttggcagtcagggcctttgcctgagctttaggttgtgttgtttgagcaattgacagccacatcgtttgaaatatttatagtagtgctctagtagtgggtatggtatgattgttgggaatattataccaagatctagatttactaacaagtatgttgaattaatatcctaaatataatatctctaaaataatgaaattaa

SEQ ID NO: 115066 - DNA, 1216 bp, Cannabis sativa
ctaagatcctggtaaaataatttgcaacatatttataggccattcttcctttcacgtacttgctgggcagatcttgctagggaaaatttgaccattgatttggtaggtggtcgattcatcacatggagtttaaagatgttaatttgtactgtacgatcacctcatacgtgtcgcctcagggtcctctttttagaattgcccttatcgatggtcgttggatcactcgggcaggtacaattgggtgtgcatgctttgtactatgacataatatgggggacaaaacctagtgtcgtactcaaaaaagcatggttgtccagtctgcaatctaacatgtacatgtggagctctcccgtgtcactggaagcccctagccctcgcgaggcatttggcttttgttcctaggactgggaaagatcacggatcgcgaatgctctccgtgccttcgccttgcatggatgtatcctttgcagaggccctttccaagagctagggcttccccccttccagaaactgtggtcaaaggcactaaccggccaactatcatctagcctacttggattagagtccatgtgtcaagcttacgaaaaatctagacaacacctaggcccaagacccaagaaccaaacccaaaatagacgatcacaacatacccaagaccacacaccacgattgtaatatacccaagaaccaagaccaacaatcataaatacccaaggccaacaatcgcagtatactctagacccagcgatcgtaaaaactcaagggtgttgatcgtagtatacccaataaccaaacccaaagaatgatgaacctaacaaagaccaaaagccacagacccaagaacaacaagaataatgaacgcaataagtagaaccctaaacagacaaaattagaaaccactccctatgaacagagacgaaaacataatagaaatgaaaaattgtgatcattttcaatggcccaaactatcgtatttacaatggttggtcttatgtgagtgctcatgtgagtggagaacactgagagaatcttggatgcatgggagagtggctactttgaatgtggcaagtcgttataattcagccgatcgacaaaaccactccatatgaaaagagacaaaaacgtatcaaaagacacaacaaattgcgatccttttcaatggcccaaaccctcgtattaatagggaaacttacaaaaatactgaaatttgagttaa

SEQ ID NO: 115067 - DNA, 1170 bp, Cannabis sativa
agtggttacaaaacgcatttttatttttcaaaagcaaaatttttaaaaacaaaaattttactttcattttataattaaaaaattagaaaacaaaagtgttaccaaacggcacttatataagttagtctaataaaaattgagaattataattattcacacatatgtagatgcagaaaaaattattttcaatgtttttccttacaaaagaaattatatatttcaatcttcaagaatttgcaagaatattgtcttattattattattactgatcgatgacattagttaatttatatattatatatattaattaaaattacaaatttataacgaacaatttcttaaatttaagtcgttaattcttagaagaagcttatatataaaattgggatcagatcagaaaattaacaaaatatacataaccttaatttgtttacagtaaaatctcaataagaacgttttagccaataatgaatatcttttgtttcatatataaaaaaggcaatattacatttcatcactacccatttatagtattggattacagattgatatttacctatctttatcatatatatatatatatacatatattatttcacgagattccattttcttaatagttagctcattctgtttgaaaaaaaagttttttttttttttttttttttaaacgtttatatattacacatataatttaacattaactcagaatctctaacacacaagtcaaaatttctgttaaaatataatatctcatgctatgttaaatcaatttaaatttgacacgtcaattaacttaatttatattaaatatactaactaagtcagttaaatatttaattttttaataaatacaaaattaattatatgtgagattcttttaactagagatcttaattcctaacacacatactcttttttagtgacttgaactaacttcaattgttttttttttcggaaaaaaaaagttagttcattggtaatttccacaatatcataatgtgacggttgaagattgttgctttttaatttcagttgattaatattttgtgtattttgggtattattattataatctttatatattaaaagtgcctatctaacggcatttattggtttaacattcttggtttaacagaatatacttaaaaaaaaaagaatattctgtta

SEQ ID NO: 115068 - DNA, 2838 bp, Cannabis sativa
ccaaagcatcagactcaagaaccaccaatagttgcaatctttgttaaaaaaaaaaaaaagaaagaatgaaatccagtcaagattaaaatattaaattattatgacaatttaaaagcacaccatatcagtacaacataaaagcgtgttatacctcccttacataccctacaaattaagtatagtctaaaccatccacataaattaagtaattactttaattaagtgactcatttagtaacagaacaagtttaagcttcacagtgatcaaaatcagattatatacactaattgttccaacaaattccattaatcatggaaataatatatgattgtacataaaatacaacaagttatcatcatcatcatcatttttacaaagacaaaaacaagccttcttatacataagaaaaaatgaacaaaaacaaaagaccttttcattcattacaacatgatcatattttgagaatcccctgcttttatatctagctatgatctttggaagaagaccttcctggaaaatcaccagttgtgaacatcttagtactcgaaaaatcctcaccggggttctgaaacccgatgttctcaacagctccaacagtcttaaaagaccgccttttgtttatctcctcaaccaaagaccggtgcaacaactggcttcgcacatcaaccagtgatcgaatcctagttagcttcggcggatagtggtgttgttgttgatgatggttatgttttaagtgaggacaagctcttatagaagcagcttcagtactattcgctggccgaaatcttgtagatttttgtgccattgtagcttcaacattgttattacctctgagacttgaatcataatcctcttcatagccagagcaatagtttaggttggagtagttgaaggaattcaatgagctcatagagcttgaatcatcattcatatacatatcatctgtataataaacaagaatctatgtagttagtgaatcataaatgatcctacattcaagtgagtgataaaatcccaagtaaaattaatttcagtttcttagtaactatgggtgacggtattctaaataagagaataactaaagattcgagccataaagtacttcaattcactcaaaaaaacctaccacaaagttatgtttcttgctaaatctctttaatgttataaaatatctaactcgggtatttttaaaagattaatgatatgtgcactcaaatattataaattacaccgaaaaggcctaagtcaaacgtggagggattcggtgcaaagttgaattgttgagccacttttacagagtgaatatgccaaaacataggattgaatctcagattataagacatagtgtaactatgatcaatcaaattatgtaccttgagaccaactacgatcaaaagaagccatgttgttcccatgaagaaaattggaagagttaagagccaaaagagagttatgagaggaagaacatgatgaagcatagaaaggtctatttgcaatatcatattcttcctcaactacttcctcttcttcttcttcctctacttcatcatagctattaggaaaacaactacccttttctaatggcgtcaagatccaatccttccaattcggtaccaaagaagatatctgttcttctatcatcacagcaatctcagacggttcccaatcactaatctccatttctttaaccatctccgtcgccacatcaatagcagtgtcgtttacaatgtcgaaaggaaagtaaatgttcctagcattgttccctgtaaaaaacaacactaacatattcaactaagcaaaagttcttctccctctcaaatgggctcttttttttaacaataacaagattggccttacgaacatgaattaagaacgccttacgaaactcaaaattttagcaggcttaattgttatacaaaatatttatgcctactttaaaaaaaattatatagttttttcactaatttggtgtataattatctacttacaagcaaaataattaatttttaaaatggaattttttgagtgggaattgtaggctccataaaaacatactgaacccgtctctatctctaacaaataatctaaatcattagagtatctctaatcatattctctaaacacactcgttagctaaaatggggagtaagtttcaaaaggagatgctcttacgaaataattaaaatgtcttaactctttgaggcatattatcaaacacgttgtaggctagcataacatatatacgtaccattttcatcatcagaaatatgaactttgagaaaaatggtatcatcttctggattcatggtcccagtgattgacatattcgtagtcctctgtaaatcaggttccactaattgctcttcctgaatatcagttccattttcaatactcgagttttgttcttcttcttcttcttcttcattgacaatatcattatcattataatcatcgtgggaagaagctagaaatggatcaagcaagagctcccgagctgggagtctgttggaaacgttgtctaaacacttggccacgaatcgctttgcttcttcatcttcaatcctgtttagggcttccggcaatttcccctgtaataaattgtttctcgtaaatcttaactcatgcaaaaatatgttttttttttttttcttttctaaacatgcaataaaaatatttatttataacacattcgagtgtgattttagaattgaaatattgtttgtatgttatgctattaggtaaaaagtattcatatcaatgggagtaattaatagttttttatattatttatagtaaatgttatttttgatttattgttttgtaaaaattaccaatta

SEQ ID NO: 115069 - DNA, 4294 bp, Cannabis sativa
tagttcatggggcatttttaacgatcttaaaagttcaaggggcatgatttgatacatgtcaaagtttagggggcaaaaatcctaattagcctttataaaatgtgtaaaaatgtcaacatattatgtaattgtgattgaaagtgtataaaaatctaattaaatataaataaaatataaaaaataattaaagatactcataagtgataaaagagcaaatgaaatatttattattgtataaaatttaatttatattaaatattgtgttaaatttaacataaaaatatgttgaaatttaaatcatattatagactatcatggttagagtttaattttatgaagaggctaaaaaataaatatacactacgtttataacattgattgggatgctcttgaaaccatgaccatcaaaatgagaattcccaagagaacaacaccattcatccaacttcacatctcctcattgtgacttcctcaacaatatattttcttttgcaacttagattttcttgtcacatgccacgtgtcattttgttcatatcaacaattaacttgattaaaaatatacctaaaaagaacagcttgaggctgggaaagagtgtactaataatgtcattgttattattgttataattaaggttatactgtttccttcttctcttgctttgtatttttatatctgattcactccaattcttgagcagagagcagaagtgagtgactgagttctctctctctcttgtattattatatatacagaagcagatcattgatgttagtacactcttcaataattttgtatagctggattttgggtttggtatatatataccatctcactctctttttcctcgaggttcattttgaatttcattttctgggatttgaaaatactatactattactaattaatcaattaatttatttattttcacgttttcagtgctaaacataattaatttcagtaaaagttcaaattttgaacagccccaactaattacttttcgacattggtttttctatagaaggaattaattaaagagttttcgacattggttgatgcagtttaaacagtagcattcatatttggcacctgtagcgttcatcattttttataaatgatgctcgattaaacaatagtacatttcaatagtacattttaacaattctctttaaacaatattaaataagaaaaaatcatggaaaataagagaaaatgcaagagatgatgaaaggttcattatatgcaaaatcccaaaaataatatcttattaatattctgaaaaagaaaaattaggtatctaacatttcaatatgaattaccaataagatcaaaactcgaggcaaaagtggaaacagtacccaatttctcaacagcggaggattcatcatcagcatcaacattaatctcgtaatcgtcttggctacggtaatcgtcgtcatgatcagattgaataacataattaccattttgatgatcaatatcaatatcttcacataatttctcatcaactttgttgttgttgttgttgtcgttgataggaacaatactcataatgagtcgtccctcggctctattcactctcaactcatatttgttatcgtcgttttcttccacctcttgaacgacaagtcgtttaccatcgtctgtacatctccgaaccaagtggcatcttttggtcaacaatatttgtaaacaaccggtttgcttgatgagtgaggttgttaatggcggtggaaaatccttcttcgtcgtcccaatcatctttttcatcttctcaaatagtttctcctttgtttctatcatattcattcaacactctccactcgattggaattgaagggtttttatattaaggttgttagctaggttttacaaatatttatatatataggtgatttatattttcatttaataaaatttgtattgatataatcaatacattacgaagttcaataattttatttgatggagcagaggactattaatgggtggtgttcaatgatattgtgaggcgtcatcaactctttcaggtgaaaaaattgacgaactatatacttattacagtccaactgtacattcatgaatttatttttaacgaagcctttctccctcgaagagataaaagaaaagttattatgttctatcaacaacatattgggatattggattgtctagagtaaaggctggatctagccttaactaatgaactttacattacattggttagtctctcattcccaaaggtaaggaaccaggctttgtggttaagtattatttttgggtattggtggtgattatcgctttttagacgtattaccttacaattcattagcgatactaactaaagttattatattaaattatatgagatttattacttaattacactaataaccatatattgtattaggctactttttagcttttctttaattttaggccaatttcaatttgagtgtctatgtcagacaaatggaaaaagatgttatgagtgaagcatgtgatcgagtagatataatgagttttgaatgctaagaaacaagctaggttttaagcaataatgaatttgcaagttaatatcatgtgtctcttcaataagatattttattgtaaataaatggttaggcttatggcgaagtaattccatgaagaggtatatggcaaagagatcatcttttacagtatgttttcttaattagtgcaaaaggttttttagctcttcaaggtaagtgtaaagagatatatggagattaaaagttgttaaatttgattccctcaaagcattttcaatggttacactcaagcactcttcaaattcactattatagtgtcacttattattatgatatcagtgttactctttagccctaagcctttgcaattttatttgtaggcactttttcaaaaagtcttattctaataatatattgttcattcttatatactcataaatttcatttttaattaatataggactttgattgtacacctaacacaattatatttctaaaccaacaaaagaactttcaattttcagacgaggaagaattggacaccaataatatattaggtggtagtttacaaacgatttgctaaacggaatgatatgatagcttaagtaatgctaagcacaccactgaaattcagacgttatatgaaaatagatgtgaatatatgaaaacagtaatttacttgatggcaaacacaaacaaacaaacaaatattttattacaaaagatatataatgaaaatattaaacaaatcttcactcaattttctttttgctcgactgtacttcctcaagtgtgggagaagaggtattgtaagacgcttggtatgggcatgcactcttgatcaattcatccacatattgtttagcctttttcttctccaatctctccaattcttccttttctctcttagattgtattaccaaatgccttgctaattgctccaattgctccaattgcttcacttgctttgaatgatcttccaatttctcatctatttctcttctttgtttcaaatattgatccaacaaacgctctctgatcgacttttctttataaggtgatgaataactaagtccttgaatagccaattccttgttcaacaaacgttctggaattgacacttgttcttcaagtgataaattactaagcccttcatcatacctttctttctccaattccttccctttgttatatttctcccattccttcaatctctccaatctaagaaattccttccgtttcttcaattctataaattcctcctccactttctccaattcattccctttgttatatttctccaatctttccaatctcttaaattcctcccccactttctccaattccctccctttgttatatttctccaatctttccaatctctcaaatctcttaaattcctcccattcctcccatttctccaattctataaattcctccaatacagattctttctccaacaaacgttctggaattgacacttcgtcttcaagcgataaattactaagcccttcatcatacctttcttcctccaattccttccctttgttatatttctccaatttctcccattccttcaatccccatttctccaattttataaattcctcctccactttctcccattccttcactttgctatatttctccaatctttccaatctatcaaatctcttaaattcctcccattcctcccatttctccaattctatacactactacaaaccaagcttttagaggcactttttttcagcacatattaaagaaccgacgtcatagg

SEQ ID NO: 115070 - DNA, 1550 bp, Cannabis sativa
taatatttatctacgtattatctcaaaccaaaaatagcttagtcgtgtgaaccaacccaaatccatttaatgcgggtttcgagtgaggttgccaaccgtcctgccacaaagaacaaaaaaaatattagatattgctaattaataagaattgttattacgcaccaaccactgctaccagtttcttcacatgttggctaccaattatattacaaccaatacatacatagttcgacgagggtgatagtgaccggtgcctgtaacatttctccgtgactttacttacaaaattctttattataatttttgtttttaaaggaaaaaataaaaagaaaaaaagaaaaatggtagtactgagtgaaacaagcgttccagtgattgatctaagagattttgattttgaattcgaagatgaagatgacaaatcatcatcatcatcatcgtcagaaaaagtagtttaccagaaattgagagaagcttgtgaagaatggggttgtttcagaataatcaaccatggaatccccatatctctaatgtcggacatgaaaaccctcatccgatctctactggatcttcctccggagatcaaggccagaaacgctgacgtcatcaccggaagtggctacgtggctccttctccggccaaccctctctacgaggccttgggactctatgattatgcctcgccggaggctcttcgtcgcttttccgatcaattgggtctctctccctaccaaaggtcaaccttctagtttattcatttatttaatccaatcctatttatttatttattattaataatcatacaaactctttattaattttattttttaattttcaataaatgaggttattttattataataaataccatatgagagagcctaaaacaaagttatctattacatttcattttgattgatataaagttggaatttggtttaacaaaatgaattttgttaggtttttagttttcttttgaaaatgagtgattttgaggattattattaatgttggtgaaattgtataggagaacagagagatagtagaaaagtatggtagagcagtgaatggattgagtttagatattgggaaaaggatggctaagagtttgggtttgaatgtgttgaaattgaaagggtggccatggccatgccaattcagaataaacaagtataatttcagtgatgatacattgttgggttccagtggagtccaaattcatactgataatagtttcttgaccattcttcaagaagatgaagatgttaaaggtcttgaaattattaccaaaaatggtcaatttctgcctgtggatccttctcccggtactctcttgctcaatcttggagacattgccacggtaataactatatttttttgtttgaaattatcacttaatttgtttctatccctaggcacatttctaaatttagcatttaaagaaattataattttttttataactctctagttagaggagatattttatttgttatttaaaaaaattagaataatttataggataaatatcattttggatcttgtgtttt

SEQ ID NO: 115071 - DNA, 1259 bp, Cannabis sativa
  modified_base (1232)..(1233): a, c, t, g, unknown or other
taatatatatagtcaacgaaattccaaataattttatggaattcttttgtagctttgtctaataagagggtctacatatgtctctctctcctcgcatcaattaataatttttttattttattttattcttatttacatttaccaattctatattttcatttcgactataacctaatgtaaatgtaatctagctagaaaaggagagatcgaagaaaacgaaattctattcaaatataagttaattttttaagtaatttattgtacctaatgataactagaagagaagtacatgtgtactttttaaactattgtattgttattataaggcaaatataaatgaagttaaattaattaagagaaggcacgcattattaattatcaccaaaactattgtatatattattactacacaccctaatacatgtctaccaagctttaattttaagatagaattttgataattagttgatatatagatgttacttacactctaatagaacccggattattaatgcaggtggaaattgtaaattttattgaatgataaatataatataaataggtgtatgtatattgtagggcaaagttggaggaaaacaagagcaacgtggtgtgatgggattaagagtagaagtatatatcatgagaatacaaaaacatgtgatttgccttagtttggtgcatgtgactgattgtgatctatgaggacacgtggtgtcaggtcattcgtataccccacattattattattatttgtgggtttgttttggatggaaatggaataatatctatatcaaattaaaagggtatcatgaggagagaccaaattaataaccgaatcaagaactattgcaaattaaagtgtacagtactcctctctagctactctcaagtctcatcatcatcatcatcagagagttttattacaaatatatatttgacaattgcatgcacccttcacccttgcataattacaaatatcattttttttattatttctccctttttgtgggccatccagaggaagagacttgcaatgccatggtaaacttccttcctagtatatattgtaggagaagagagagagagagggaattgatgggtcacgggattacactttagtttaagcaaaggaaagtcactctcaccactcccaaagacagagcgagagtagagttcaaccatgcaatatatatatatagggatataattttgtcctgttattgtacttnnacggattgtaatccgtgatgtacgac

SEQ ID NO: 115072 - DNA, 2321 bp, Cannabis sativa
  modified_base (2267)..(2271): a, c, t, g, unknown or other
ggggggggggggtcatggccactgcatggcacaaagaggttccgcttctgtatataatgtaatttccttaattttttttttctactattattattattattattattgttattaaataattccttctctctagtctctacacttaataaaccaaatgtatcaaattataaaggctcaacgataagaaaataagaaaaaaaataataaattaattgtgttgtaatagtagtgtaatggtagagatacacaaaattataagaaatgtaaatggacacatatcgttagtgtattttattattaggtctcatacattttgatttaataaataatatgagaaataactaactaattatagtgtcaccagataccaacctaggctaaaactaattaggcctgtacacaaggttctcccaaacccaagatccaaaattttaatacaatatattaatatgtagagaaaaaaagtaattataattttgtaaaatttattaaatataggtccaaactcaccaattaccacttcactttacatacaacccaaaaaaatattatgcctactttttgttagaactggccgtgagtgtcacgcgacatagtgttgagcactttaaaatgccaaataataatatgaaaaaaaattatatatatattttcaaacacaatgattatttaatttgtataataaataattatatattagaattacattattttctattaaatatgtacaacttaaatatatcacaatcattattctttaataatatttttggaaagaaaaagactatgaagatgttgagagttcatgttataatactaatataatagctttgatttaaagtaaggtgctaaatttatggcttgaattgcataataagcttgttgggcaacgtttcatttataatttagaagaggctaaacatcatctaaaataaataatatattatacaataaaatatatatatcaaatataacaaaaaatatgaactatacaataaaattatatataataaaaatatatataacatgctaataataatataagaattttttaatataggagctccaaaaaagactccatcattgggggtgtctcggtggcaatcagaacacgccacatcatttaatgaaagtgtatttgggagcagcaagatacaccagattatttttacatctttttttatcattatttctaaatttctttttaataactacgtttattagtaacctttgatttttgagctacttcgctctaagtttttcgtcaaagattttcatctaacgttttgctaacttttttcgtctaagatttgatacaaaaggtgaattttgggttgttcatttgggttgcgaggttgctattgagaaggtgattttacccggttagctttgtgtttatcatgcagattttgaatagattaaggtaaaaatgtaattttttatttgatttttatttttgtttattgtctgagattttgatttgtatttttttttacttttattcaataattaggtataggttggtcaaataattagattggattatgttggatttgataaaaatgaattatgggtaagtgaataagtgggttagtttatgctagggatttggtgatttagaataggcaagtgaagagtttgcggtggtcgatatcattattgatggaggtttgttgttaaagtaattaaaattgtcatatgtttagtatgaatattaacccattaaattccattttcaatttgaactttaattttttgttaacataataaggggtatgttggatagtaaatatttatgcaattatacttggttattgctaaatatattgtgatttattcggtgttggtgaagtatttatttaagtagaaattatttgactgtgtatttttgattgttatgcaaacttgttaaatattcttgcgataattattttgttaatatgattgtataggttgtcatggataagaaagttgtggtggagattattatgtcattgagaatccatttagtcaaatctggtgagttgaagtcaaggattggcatgcttaaccatagattagagaagttcatgagttcgagttaagggtggttgttgaggaagaaaagtttgaactattaatcgaggaatgttgtcagaggaagaagctagaaagagaatttatacgagaatattaagattgtaagaatgttttggatgaatatgtcgtttttggtgaatgtcatgttgttgattgataggatgctattgttaggttttatgccctannnnnaactccatttcaatgtaatctattttattcaacatcaataaagaaacaga

SEQ ID NO: 115073 - DNA, 2781 bp, Cannabis sativa
gacaaaataaagaaacaaaataataaaaaaaaaagctgccaattgccttggaaaacgagataagctcaacttgggtctaagttgcgtccactttaatgagaaacacaaatttttgctctccttcagtgttgactgcggtctcctcttgttttaaaattctgttgataagttgttgagttcttctttaaatctcttggcttgcacccttgtcaccaggccaattgaaactttacttgtatctttagccttagtgttctcatcaaaatataaaatattattttaccaaatagaaactagtaggtttattaacatatataatagtaggctatatgaaatgaaatgaattattgttctaatatacaaaaagaaaattaaaaacttgtttcaatatgacaaagtaaactaatagatttattaacatatactatagtatagactatacaaaaagactatattatgtaaacaaagaatgaacatttatttcaatgtggtaatataaactaattatcagtttattttgcatgtataagatgtttacaaataaggtagaggtaaccaaattgtatctcaaattataaactttaaaaataaagtttttttatgtgaaagcaactaatgagtttcttattagcattataggtaaccaaggttactcttgaaaacccaaaaaaataataaaaaatgaaatttgggattaattttatttcacgcatattatttgagaactaaggtattttttaatgatgtggcaaggtattattataattgaaatttattaaggtatttttgtgaatagtttatattttatgtatattattgaaaaaattcctatattttatgtattgtatatgtatatattgaatatttttaactaataattttttttttaaatattgtgaatgagaatgaaatagtagagttttaaaataaaagtttagaaactaagttctaagatattagtttagaaattaagtttttaaaaatttcttagtgagatataatttattatagttgtatatgtaatatattttaaaaaaaataaatgtaaattgagaaaaaatagcacttttatttattttttataaaaaattaaatttaaattttttccattctcattaatctggttttacaattttttcgaactattaagtacattttttcattcatatagtcaggtgtttttattactaattagttactaattttactaaccagttactcattagtaactagttactcacaaatgatataaccagtaagtagttaaataattaaattttttttttttgatgaatcagcaagatcttcattactccaataaaacatctttacaagtaaatagcgccttcaaagagaagacctatatatataaaaaaaaaaaccactattcaagtaatctctttaatctctcttttctatcttgtcctctcttctttcttttcttttctttttacaattgaaagaaccaatttgtatatataatattaacttttttttttggccaacaacaattaattctacctttaacatcatttttgatcttgttgatgatcaatggttccttagcttgacccgaattccagacaacttcgtttctagcacgccatgtttaataaaccaaggatgccattgcagccgaatatacttgcttgcaaaagctgctgcattttcttctccgtatccactgaatgagcttgctcatttgatttgtttcagccctccatgatagccataatttcacctgatgaagacaattagaagctagtgaacattgacaaaaaaagtgctctgcagattcattatgaagattgcagaaaaaacattttgcttcagcaacaatgtgaaattttagcaatatttcctttgttctcaacctattttatattgccaaccatagtacaaaactatgtttgggtatattaaaccttccccacacttcattgctccaaaaaactttattttgattcggacaaatcagcttgtagccttgagagatactatatttcaccccagcctgttgttgaaaaccagccaagtttttaagcttgtcttttatggttatcaatcttctccaataccagcttgcatgcgatggtggcttgtatgaccaccaatgttcatctttaatatacacactatgaacccatcacacccaaagattttcttccctgttagcaacagcccatacatacttaaagagcgttgcaatattccattctattatccttttcaatccgacccctccagtagcctttggttgacaagcagagtcccaagtaataagacctgaaccttgcagcaggtgttttcctttccaaagaaaagcatgacatatggattcaagttccttggttactttctttggcaagataatgatttggctccaataagaatgtatggtaagcaacacagaattaattagaaccgctctacctgcaaaagataagtttcgagtacccaatgccttgattctagctgttatttttttcagtaagaatcgagcactccttactagatattcttttggagcaaatagggatgccaagatatcagaatggaatctcttttgtactaaaacccgaggcatctataatgcgttggagttctctatcttgcataccgcaacaatagatggcttgtaagtaaagaccacttaactttctttatttaatctggaaattagcagataaatagggtttaattatgaaacttgcatattagttatgaattatcagtttacggatatttatttgacttcagaatgcattttatatgtcatat

SEQ ID NO: 115074 - DNA, 6966 bp, Cannabis sativa
gtgactgcgttttcctgaattctcggatcgtttgagctcaaaagcatcacgaggaatgggatagctccggcctcggtgatgattctccgattgtccatgctggttttggccagcaaacggagctcgtaagccgcctgccgttggatctcgtgtgatcctgtggctaggtttccgactaagaattccgccgtcattttgatggcatccgcggcggctttaacggctgatatatgatcaacggcagctttctccacgacatgccctcctcttttgctatcatttctctctatgcacgagagaaacgacacttgtgtctcgtctaatggtacttcgttttcttggctccattgttccattagagactttagtgcgtagttgggtattagggccatgtgaataagcctttgtccactcttggggcatgtgtggtgccctgaatcgatccattgagcaatcgagtttcgatcgtaagtgtgtcccgaggccacgatcacagggtctttaatcaagtccagtgaaatggggcatcgaaattcatctgggatattaatagattgagatgatgaagagctattgtagctcttagccgtggatgaacacaacagtttcttcttaagaaggtcttgtttggttttctcatgttcttgatccctgaaaatcatggactggcaatacgaaacaaaagatatcaagttgttaagattggacaccactattagtccaccggtaccggcttgttttttgacttctgcctctagtttcgaaatctcttcctcataatcttctggggttttgagaccaatgctgttgaaaatctctcccgctctaccgaaatctagtaacccttttctgtaagtgttcttctcattattgcttgccatcagttgtagaagctcctctcttctttgtagatctctaatgtcaataaacatctctactctacttgcttgcctgtgaagtaactcaatttgctccttgatgtcagctgaaatgttgaggagactaagaggcaagatatcgagtgtacttaccaactctttgaccaagacatgaaactggttagagataagctctgtctgcatgagtccccaaagagagcttccatttttgcagccttgaatcaggaacttcactcttcgaatcactgagaaaagttcagtaagacagagaattgaagatggagggagtggacgattggtttctttaatctcctcaaacaaagaagagagaagcttgatccttcttatcattgttgagatattcctaacttgtggaattggaaactcttccatcgaaccaacttcgctgcatacataaatcaatgattctagcagagacccagttggcaaaaagcccgaggaaacgatcatggaaggcagagcgaccgcgtccatggaattctgatcactatccaagtatgattcttttcatcattaataacaaaactttttcttacacttcttgattgttggatttgccaaagttcttagaaatataatagtgaccaaacgaaacctttagttaattgcatgaactatttggctgcttctgcttgtttatttctatattgtggacaataaaaacggtaaagtgaatgaaatctagcttgctgccacttggaggatgttcctgcctcctcaatttagctagcttattcttctgtgatttttataagtacaatttgcattatcttattatataaatcatccttgtcaaacttgtatgcttgtcctttagttcattacagttgttatgttcgttcttttactaaaccttctttaatttctccttttaagtaatccattttgctacaatagaatattgggaaaagtaggaactgaaacacaagacactctttaggatcaacggtcaattgttttatgtaaaatatatataaaacaattgatttttgttttgtcttcttctttgtttgtgtgtgtgtacataatccttaagttagaataatatatatatattatataaatatatattacatatttataaacttgaaaatgttacataattgtttctacgattcaaagagacgttggatttcaattttaagttgaagtttcttcttgtctttatgccttgttagccgatttcggccccatgaaaacccgttgattcattacgacacgcatttgcattccaccacgtcacttcactactattttaagttttgagtttcccattatttctactacttataataaaaatattctttaggttgatataaagatgacaattcagtccatttaaaaatcccattagaatttaaacaaccattaataaaatggacttgatcatagttattaatttgcaaggataattgttttataggaactttatgtttaaaacgggagaggcatgtgtaaaaaaacaaagaactttagttatggtaaatgttaccacatccaatctttttaagaaaatcttctgttatatacttaggaaaaaaattacaaaaatacattagacatgcatattcaacttttatatggtccaaatatatttcattacaaaaatatatttttctcacaaattctaatcgcatcaagaatatgaacctatacaacaataatccccgatttgtaacgacgcaacaactctaacgacaaaaaaacgccattaattttgacgaatcaacccgagaaaaacaaaatctcaaacagtaaatcaacttagattaattaattaaaaattctgcaaaaaaaaaaaaaaagctttgaaacgtaaacttaaccttgaaaattaattcaaattctagaaaactaattatcataaattcaatttacagaagttgaactagagtttttcgaccaatttaaatcatgtatcatacaaaaaatgcttatcactacgatctcacaattataatagttgcattaatgttgtttctttagaatgttaatgttcgaattattcaatttcaatctaaagaatacacaaaatttgaattcatatctcgatattgatctgggtatgtaattttgatattttgttgtaatatagatgtcgtacagtttctcgttagttttattgacgttcaaagaattgatgtatcaatacttatacagtgattaggctatactatttttagtgttatttgtaaatattcatatagacaatcgaacatagggctctcataaaaatgattctaatattgtaagtttgttcatattttaattttggttgagttgatgttgatttacagtgttcttacagttgattcttcacaaaataacctcaaattacaagtcgtcgtttatcaattcaataatagttggttaaattttttcttaacaatgtccaaatatatggttcatacatagttgctaacacgttgtccaatggttgtcgtactaacatcttaaggccttagatttccctttcattttggattttttgggggtccccgatggagccttctccgagatcgtttccaaggactctcctaaaatgacctctaggatggcagccagctagagttcccttgtaagaactccctaagttccctcagtggtagttccttcggtagggacgatggcagagctgtccttgatttccatcgtgtcaagattgaactctacattcaaatccatcactagcaaaagaaaggaagaaaaacactaagcaattaaatacccactttcaatatgacgaaatgggtatcggggaaggcctcctctaaaaatttcatggataggtccccgctgaacccgtcgctttcaagaacatatttctcacaagtaactcaaggcaactaattgggaacctaagagaggcaactaaaaatgacgctgatacaaacagttttagaaaacaaaggccattgtggattcctaacaactccttataggcataacaaaatgaattttttgggtgtacattcaagaatccataaactaccattcaaccctaattccaagatcctatcagcatgcaaagtctacaggttattggtgactatactctaactagctacacagtatggacactcatggtgcatgaaattcacacacaacccaaccttagaaacatgtttttagaggaaacatttgaccattcaaacacacaatatgttctagacctagcttgaacttaacatttatatcctagatatgaaatagcgtaaaatcaatagagcgtaagggaacttacttgatgtttagatggagaatggaaggttatcatgcaaactacccaagaacgttgaattgagtcgatcaggtggttgtagctggcctacgatcacgtggttgtagctggcctaaacgttgaagttctcatttggctaggggtgaagcaagtctggatttatgggtttagcgtttggaaaacgaaatgaacagaggttaaggaattactggatgagacagtcgagagcttcttgcattcactgttaatggcgacaataaagtgagagtgtttggaaaataatggccttggtttaaaaattgcaagagggcttctgaaggttgaagatgatgaaaaaaggaaaaataggttcttgaaacctatttatactttagttgagatcttagcaatttgaaataaatagcccatatcgattcttccaaaaaagcatcttttaatctgatggatggggagttgaaaagatcgtatttaatgctcagcctaggcatttaatattaatcattgcacatctcgtatctcgtaacgcattaatggaggggtcacctcaatcgtcatgccatcattacaacttcccctaaggaatgcgcccccaacgcgcgcgtcactagtaaatgcattaaaggcgccgcatgcatgccatgccaaaggtacatgcagttaataactcattacttgatgacaaatcatgggatacatccgtgattccagccagcaccatgtgttaagagtttgccataaagaagcggaggagtactgcaagctcctagactgcgttacatctcgagagcttgatgggtaaatgttaaccgcgtttttgcgaagtatgacacgtggcatttaatggggaaaactaatttaatccttccttaattgaagtcatttgatattgttctttcacataaatgcttccaagaaacgggaatcatcttggatgaaaaggaacgcggaagactacccatacctgccttaacttctcgaacactaaaggcaaaacatctctcccagacccgaaagggtctaatagggaaaattgctcaaatgatattcagacaggcattcgaaagatctaaaacagatatcgaccatcatgaagtgtcgcagatgttgaccttctatacatgctaggtcaccaaagtgacagttatgctttttttgacgaagattagatcttatctcctacatccgagcatggtagtgtgcgtaccggccccacctttttgctagatgaatattacaaactcctactcgtaagggaataagctttgagtgacatgtggcccctactttgaaaggttcaaccttttcgtgacatgtgtctgagcagtacaaaatagtccctattatctaactgctacatgcacgggcataatattttccacatgatcatttagttagctctaacattgcatgcaatttaccctaatagtgagatttgagcaaataccttaagcgggtcatgggcatgtccatacccaccacttagcctataaatacccctcaattctcatacaaaaggggcatcagaatccacatagctaaaactttgccaatattactctaggtcgtcttcttcttcacgaaaaacttagagtaaagagttagagtttcttgcaaaaatattgtaaacatatcaataccactcttagaggttaatagtttggctcgtggactaaaatttattaacactcgaaccacgtaaaaatcttcatctctttatttctgcaagttattatttctttagctcctaaatatttagtttctgaaaatcttagtaaataacatcaaatcagatccaatcacaattagacatctaatattttgcggtctgttgtaatttgatcgatcagttatcattagattagattgattatgtacacttctacactcaagggcagaggcaagtagtgttgtaaatacaggctgaactttttaacacaacacgaaattggcatgagcctggaaggcacgagcacgactaagtaggaaaaaatacgggctcgggcacgacacaacatggtgctacaaattggcacgacacaacacgaaaaatatatctttaagcacgacacgatacaaaaaatatgtccttcagcatgacacgacacgagaagcatgaaaggcacaccaggaaagttcgaatagactagcccaaaatactcaacacgtgaaaaacctaaaaaatatgacacgacatattaaaaacccttataataataataatattaataagatgtgaatttattaattataaataataataataaaatttaaatataatactaaatatgataattatataattaaacatattgcaacataaaaaattatagttatatattaatttatttataggttgtgatataataatttgaaaatttataagtaaatatttaaattcttaataatggtaatagtttttttttatataattatatgtaatatattattgaaaatttatataaatataacgaaagatataaaatatatatgtactttagtcattgtaagaaaatataaaaaaataaagcacgaatttaagtttagatttgaaaatggactggtctgtataagaaatacgggctattacgagcaaagcacgacgcgaaaatatcgtgcttacgggccgtgtcaggcccaccctataaaaatactaacacgatacaatactatccacatatttttctgtagcatggcaaaacacgatctgtttttttaaaaatattaataaatgtgaatccagggctggcctaagtattttgggggccttgtgcgaaatttttaaattgggccctttagaaaaaaaaa

SEQ ID NO: 115075 - DNA, 4309 bp, Cannabis sativa
  modified_base (552)..(558): a, c, t, g, unknown or other
  modified_base (3390)..(3399): a, c, t, g, unknown or other
tcatgaggctattaataatattgacccagccaatattattgtttgctatctttgttgtatggataatttaattcgtataaagtaataaaaatatccaatgagcttaagatatttgttcatgcatgcctacaataacggctacgtactttaatttaattaataattgtgtcaaataaaatgctccacaattcacacactataaaaaactactacttgataacttttcaatcacaatataaattttttgtgattaaatgagacttttagtcacaacaaaaaattaattgtgactgaaacatagtatttatacaagttgtcactaatttagttttagtcacaataaatattatgactaaaaacacatttagtaacaacacaataatgataatttataattagccacaactttttttttatttttagtcacaaattttattgtgactaaaagaaagattttttttagtgtcaattgtctattacaattttttttacttttagtcgcaataaagcttgtgactaagagtaaaatagttgtgactaattataaattannnnnnntatgttgtgactaaaaagtccatgactaaagatattagtcacaaaaattataagttattgtgactaaatgtgttttattagtcaatatatactgtgactaaaattaaattagtgacaatttgtgtctaagtactatattttagtcacaaatgattctttgttgtaactaaaaatcacatttagttataaaaaatttatgtaataattaaaaaggttgttgttttttgtagtggccggcttagtattagaaaacgactgtgtattaattacaagaattaattgaaaataataataatgaaaaaaaaaacttgagatagtaacatgttgtgaaacacacaagtatacctattgtttacaattaatactcacaagagtggggtttatccattaaggactgtacatagttaattactaaataattaaatttttaactctgtttggcgacaataaaaataagaaaagatatttaaattctactaaaaaagaaaacaaataattaaggtaaattaaaaaatgattaaaactttaagtgattaatttcgattgaatttactttatatggtttaatacaatttaattcctaaattctaatttttacgtgatagtgaattactaaagaaagttatattcgagttaggacatataaattaatctgaatgcaaactttttactctcataacgtacaaatttaacatgcaaataggaggtattatttgacttacatttgtccgagatcaaatcatggataagcaagtctcagttcgatacattcctgtactcgattataagctgtcgatatcttgaccaaagctttgtctactgattgatttgtgtacttaaaatccaaaataaaaatagtgcctacgccatttagtttgaggggagagacgtaaatgatatgttagttaaagttttggttaagtcagtcaggatctttaattatcttctaactaattgttctgttagttattttttctgttgttagttaattcctttggtcttaattaattgtataaatatctgtcttaattttatcaataataaaattgagctttgttcaatcaagaatttctctttgattcctttcttctattctttgctttctcactctgtaattcttacataggcttaccacagggataagaaaatccttaaattaaccacccttacattaacttctgtctctattattataattttgcccttctaatttacatcatattgcttacgtattctatatactagttggcaagcacatgaccgaggattgtgttcccatttcttttatttgattattttttttacagattatatttttggagaattatcccatacactgttttttttaacttttttttaaaatttacggtttgagtttctaaagtggttgcaacgctagttgcaatagaggtttctatacgattttttgttgcaacttaagttgctagttgcaataaggatttctatgtagaatttcgtaaaaatgcaaagaaaattattttgaagtgtaaaaatgaaaaagctcctatatttttttttccaaataatattgctaatattagactatttaagtatccaatatcatgtcgatattactcgttacaaatggttaattatttttttattatttattaaattaaaatatgagatctgatataataaattaggttaataaaggtcatctcatataagtttgacattttaaagtgtcccttaacatttttttttcttcaaatttaaaataataatatgttttaaataaataatattacttattaaaattatatatggtctcatttgtagagcaacttgtacaatatttcgagaatttcccaaatattaaaatatgcaataaatcaaaaaaattaaataataaacaacaaatatatagataatagcattatatcattgacataaaataaagaaagacttgtagttagttattaatacatttccatactccttccgcgatctagattttgacatctaatttttatatattttttttcacggtagaagaattaagtccattattactaccatttataataagaggtgtaatctttataaaaaggttatagtattaaatgttctctgtatccagagaacagtaatagaaaatacgccttgatctttcatattaacaaacaataatacacctgtagatgataatggaacattaatttatattagagtcaatttttaaaggttctcttctactacaattttgcctacaaagtttgaggttaaggatatagaaattacaagcatttttttttgttgtaaaactatcgacctaagcgatgaaatacagtttatacaaaataaagaacttcttaagatgaggcacgacccagctaggtcagttgaatcaaacatggataattttcggtcacaatagctctccaactctatggccgcacaaattattttgctcctacatagctacgtacaaccagagaatctttgagcgaggtacaaaagtttcccgtaaagcatatttcataaacaatataaacaagggaaaaggcttcaaatctttgtcacaaacagaacatttcctaagtttggccaagccaactcagtgctctcctaacctaaattcaagcctcctatgaatttgggggttcaacactacaaaaaatcttattttttactcaaaacaaaacatgtgactaaaagtaataaaaagttgtgattaattataaaatcatcattcttatgttgtgactaaaaggtacaagctaaatatattagttacgaaaatcaaaatttgttgtgactaaatgtatatttactcacaataggtattgtgactaaaactaaattagnnnnnnnnnntatctaaatactatgttttagtgacaagtaactttttgttatgactaaaagtcacatttagtcacaaaacaaagaattatgttgtaactaaaaagttgtcactaaaagtatgttttatttgtagtgcaaaaaccaaatccgtgactccttaatacgaattttgttaagtactaattaggatctcagacatacttttattgtgactaaaagtaaaaaaatttgtagtgtaggtttttcagtgtccaatcttattgtatattatgaaataaaacaatcaagatcagcccttataaataaataaataaatcaagctcagcaacttttagaatatttcttgaatttcaaaatattaaaatatgcaatgaatacgtggaagtgtttatccatcttttaaaataataatacttcatgagacttaagttcataacccacaggcctgaataaccaaaaaaaaaaaaaaaaccgcaaatatatatagaactatttacagtcattgacctataatagagaaagactgtatatagttattaaagacccgagttttaagggtcttacaattaactaataatttgtatacaaacttgttagagattatatttttatatgaataatattaagacgactataaagaaatatccaacaatatattatgtattagtattatgacatatggccaccactcctttcgggatcaagtataaaattaataagaataaatttgatgatttatattacgtactaccatttttaaaataaggtgtatgtagatgaacaatattattaattattagtgtcaaaataacacaattaaaattttttatttttagtgaaaattttttagtcaaaacataattttttgtgattaaatgtgacttagtcacaacaaaaagttatttatgactaaaatata

SEQ ID NO: 115076 - DNA, 2442 bp, Cannabis sativa
  modified_base (70)..(79): a, c, t, g, unknown or other
atttataaggtaagaatccgaatatgaatgctcaacaatcttaccataaatggaaaaattattttgtcannnnnnnnnncaaaaaaggactttacaaaattaatagtgttattcgagttaggtaggttaggtcggtttaattgggcaggttgctaaattttaaacccgctcaatatacagattgggcggtttttcttttttcgttgatttttttcggttttttttttttttttgcagttttttcggtttagtttaggcgggttattcggtttaggcggtttacgaaaatatatgtacagccctagttttgagtttaagattatgttatttatattttaaaattatattatttttattttttataaataaattaaaagtgtataaatgaaaacgtctaagaaataataaaatatatatttatatattaatataatactattctacgttgacgcgaaaataaagactccttcaatatcacatttaatttataacttgcttcaaataataataagaacaatttataactaattgtagttggcagttatatattgttatcacacatatcagtgtactacacaatacaccatcctgtactacgaaatttcatttatcatttatatcattgtactaccaaacgtttcatttcaagctgtctcataatttcagcttccagtacagttggacattcctatttttacttagaagatgagaaaaaaaaaaacaattttgtaaggaaaagaaatagctggaacaacctcatttaaaaaaatagtcacaataataaacttcttgtgctcatcctaactaattatacatcttaataaaagtcacaccatttaattcctccagctgactttcaaatttcaatggtggccccttccccaaaaaaatctagtattttttgtgtggacctacgttgttttaaataataagaaaacgaaaactgggccaaaaccaagttttgagaacgagcatgcttcatgcagttttttccatatgacaagactattaaattttggtcccggaatcgacttctacggcatgtattgaatttagtttgatatttttgagggcttcattttcactaatttatttatatgtacttcccaaattaactgcctgtggtgtgtactattttgtttacccaaactaactaggttgtagtagtagtactactaaatccaaaagcatcatctacagctataagattatctaaaaataaagagccacgaccaatcataataaatacccactctaccctcttatcaagaaagtaacgccttaatttccaaacaaccaaaacaaactatacccatttcttcttcttctttttcttaattacaactttcaccataatggatcataatatgcctggaatggacatgtcaccgcccacatcatcgtcatcatcgcccatgaacaacggaactatgatggggggtggtggaatgggtcataagatgatgatgcacatgactttcttctggggctcacaagccgagattctcttctccggttggcctggttctagaccggccatgtacgccttggccttagttttcgtcttctttcttgctctcatcgttgagtggctttcccactgccgactcatcaagccaaatgggtcgggctctcgggtcggggcggccctgtttcagaccctgttgcacgcagttcgggtctgtttggcttacatggtcatgcttgcaatcatgtcttttaatgttggggttttcttggtcgccgtcgccggacatgccgtagggttcttgatttttggaagcaagcttgtgaagaaagaggaagctgagaaggtggcttctgatcttccacccatgacttgttgatttctcttttaaagtacaaacaaaaaatactttttttatatgatgttgatttagggttttttttttcttttttaattagaagtctcttgcaatccaatgttaatacataataatcatatgagcaatactgtgtttttccttaagtaagataagaaatattgtgttttgagcatagagtttgtcgaaatttctaaactttgttctgagtttgttattaccatagggttcgttttaagtgtagagatgttaaacttcttgtttaattaagttagctttattatttgggataagctgtggaatatttttttttgttcctattaattaaaaatacgtttatattatatatttttttttaaatatagctacttttttgagtgtattgtctaatatttttagtctacatataatttgcattaaccaaaaggatttaatgaggatttaatgaggatattatctttaaaagtggatatatcttaaataatacaaaaattgttttaaaattaaaaacaaataaaataaagtagttatgttatgtagttttctcttattattttgatgttaaagcttcttctaattggaatggggccttctctcc

SEQ ID NO: 115077 - DNA, 2431 bp, Cannabis sativa
  modified_base (49)..(55): a, c, t, g, unknown or other
tgtttctttattgatgttaaataaaatagattacattgaaatggagttnnnnnnngggcataaaacccaacactttcctactcaaggcatttactaccaaaatggctttctcggtttataaagaatctcgcaacaatagtctttgactaactctaaccaccgtctttgccccatattcaaatctttctgagtaaagaagtatttgagactcttgtggtggtgtaaatctcacatttctctccatagagataatgccgccaaatcttcagtgcaaaaaacactacgacaagctctaaattgtgtgttggataatgtcgctcacattccttcaactaacaagaagcataagcaatgaccatgttagcttgcatcaaaacacatcctagaccctgtttggaggtagcacaataaactaaaacaaaaaaattgatcagatggcaatgctaacactcgagccgtaatttttccctgcttcaacacttgaaaactagcatcacacttatcggcccataaaaatcattgattttccttagttaattctgttaaaggtgtggaaatcctggaaaacccttctaaaaagcgacgatggtacccggctaaaccaaggaagcttctgacctctgtaactatcttgggccttggttaatccctaaatcattcaatcttcatcgaaccaaccatacttctatctttactgacaatatgatccagaaaagatacttttgataaataaaattcaaacttttggaacattgcataaagcttgtgttccctgagtcgctgtgaaagaattcctaggagtatacacgagtatcatcaataaatactacgacataaatatcgaggaaatccttcaataccaggagatccatgaatgttgtcggagcattggttagcccaaaggacataaccaaaaattctcagtggccatatctagtgcaaaattcattcctcagaatgtcttcctctcggattctcaactgatgatagcccaagctaagatcaatgttgcaaaagattgtctttcctttgatctgatcaaacaaatcatcaattctaggcagtggatactaattcttgattgtcaacttgttcaattattgttaatcaatacacatattaaagtgttccatctttcttctgaagaaacaaaattggagctccctagggtgatacactgggtcaggtaaagccaaggtcaagcatcccctgaagttgtaacttcaattctttaagttctgctggagccatctgatatactgccttagaaactggttgcgctcatggtaccaattcaatagcaaagtctatctcccgttgtggtggaaaaccaggtaattcttcaggaaccacattcacgaactctttcactactttgatgtcctcaggcccaactatttcaggtctgctagtgtccatcacaactgctaggaatcttatgtatccatattgcaatagttactcatatccaatttcaacgtcatacaacccttcttaccctttatctttcttttcaaatagtgcattatttcaaatgccaccataatattatcagagattaaacgtgtagggattaagacactttgagcctcaataataacatggtgaagcaccaccttgattcgattagccaagacttttcaaggattgttcttcttaggaattaaaacaatactagtatcagttttcctctctgggaacacccatgtttcaaaaaattccgtaacaaacttgaccatatcaccacccataattggccaaaatttctagtaaaatttctggctcataccatctggtctcagagatctatcttggtgcatttgaaactaagctccttgaaccttcacctataaaaccacttctaggaaaacatcattttgttttggagaaatagaagcttgaatatcctcccaaatatgcaactctctactacctgcctacacattgactcccttagccacacactcaaagaaaaaaggtggctttccaaccataggaacattagtacttggaaccaaaaacaaaggccaatgatcagaagaagaaaaatcaagattaaataacttcacctttggaaaaagaaaaagccatgtatactggtaaccctaaagttatccaaccactcttcaatccagttatccgaatcatgtcccttctcccatttatacaggtacccttaaagttctaagtcgataaggccacaatcatttaatgcttcctagaaattttctatcaaccaaacaggataccttctcctaccccatttatcgaaatggatacccatattattcatgtccccagacaaacaccaatgcaaatcaaattgattttccaaggtacgtgtagaaaatagtgattcgaattgtgtgttgatttcatagaataatacatatttatatacaaagttaggagactaaatatctactaaata

SEQ ID NO: 115078 - DNA, 3101 bp, Cannabis sativa
aattttatttttctttttatttgtgctacaaaatcaacaatcattagtaacaaataataatcaaatatttgttaatcatcaaaataaggagacctaaaagtttgagttaacagttatatctagaataggtattcatgaaagtcatgagctcgtgtcccacggtggaatcaacgagttgatcaattcttggcaaaagaaaatagtcttttagacatgccttatttaattcagataaaatgtctcttggataaagtaattagtcaaaagtttgtcgaactcctcttcaaccactttgtctttcaggattaaggaaacgccttttttgctgtttcgggggataaagcggatctatattcaaatggtggcaaatgacattcgggtcaatcccggccatatcaaaatggcttcaggtgaactgatcctagtttgcctttaaaaagcaaattaatttctattttaattattcttctaatcccttcctaatttttgtggttttggtgggatcaaaagaattgaggacaacttattcaagttccttaattggcccgaggtgtgaatgatcgtcagctattctaggatctatcctatgtcttcttcttgggattcacttcaaaattattactggtgtctgatgagctaaaactttacttctcagttcaatgctataatactgtctcgccaaaaattgatccactttgacagttctaacccctaactgtgttaggaattttagagacaaatgttttattgaatttattggccccaatcctgttaacactggacaacccatcaacatgttgtttactgaggggagatctactattaaaaattattgcaattgtgttattgcaagcggtgattccccctttatcaatgggagctcgattgtcccaagggttgcaatgtgtctccagtaaaaccacacaaattaatagagcaagggtttaatctaacatgttccagtcccatctttttcaaagtttctttgtataagatgttgaccgaactaccattatcaactaacaccttttttatcctcttatttgtgtgttttatcgtgatcactaatggatctgtgtgtggaaattacacgtgtggtgtatcttcatcaataaatattactggaggattcgcatgattcattcgcttcaccttctgaggtgcaaagacagaattttgattcttcacttaattaatataccttttatgtgcattattactagttcatgtgatgtgcttccctcttgtaattatcataatatcctcaccttttactcgaggaggctgaacatcttgatttcaattttggctattaggctaattttggtcattttctcaattttacacaaactattagaaatatcctcgtgatatcagactttcaatattgtccttaagttgtcggcattattcagttgtgtgtccaatatccttatgaaaacgacaatacttttcatgatcacgtttgttcatagcattttgcatggggtgtggctttcaaaatgcatccttgttttcattgatcaagaatatgtttctcaagtctcgttaactcagtgtatactgagtaaattgacacatatttctcgtgcttcttttatttcttttgatccttgttcaaatctttagatccatattttctctttccaaagggctcacttgcattatttgacttttttgtatttgctatcgtggtattggttgctacattactcgaatttggtgttgcttcattaccaattttgagtaattttaattctgatcgagcctcctctttttgaacatatatgagtgctcgctcatattaactaatggaccttactggtcttccttggaaatcatcccataacttttctcttacaatgatcccaacttgcaaggcggttaactaaatactatcactcaggttcctagccttagccactacagtgttgacatgacttaaaaatgccttcaactactcactaggttgttgcttcatgttagttaatgaagaagctttaggccttctgcttcttgatgcctgaaattgttacttgaattctttagacaattattcccacgaaattatagaatattgtgggaacttatcaaacaaaatttttgccacctttgtaagttggtaacaatatacatcacaagttctatccaacattacttgctcgcatgatgtattaaaattactcggatgtcccacatgatcggttgttccatcatatggagcgacatgaggatttttgaacccttttggaaattgtaaattagttatattgggatgaaattgttcaaattctttgtcttaatcatatccaagaaatttcccttgttctccatctcaatatctatgaaattgttcttgtaactgtatgatccataattggatggggtcatcagctggtccattattaaactgctcgtgcaaatcaagagcatttctgttcaatttctcattaaggtctggagcttacgattcaggcattcgtgcaaatcgggttgtctttaatttagatgtgcccacagaccaagttcatcatgatgttcaaggtgtcgctctcaccttgtatcataatttctcaccgaccttgtggtctagacactctcagattggtaactttacaagtcactaacactgacctgagcatctcgattattatgatgagtgttatgcctcccatgttaggaaacttcccatgtctgagatcgcaaggattggccttgtgtttggcttctcctcaattcacttgcaaaaatgtttgtttcagttctttaagactgcacttctcgccttggcatgcgtcgttcaaatagataagacatgtagcttcaaccagccctttgtggaccttctagtcaaggataattctgttctggtgaagacattacattcctatgagaaggttttggagctttaggtcatgtttgacttgaattcacattcttagggttttgagagattttccctatcaacaacaatcaccttggtattccttagttgttggtcctggattttttgggattaacctgattattttcttcgacaggtgttacgaaaattctgtttattacgcaagtgtacgtatcaagtagtatctcacgcaagt

SEQ ID NO: 115079 - DNA, 1302 bp, Cannabis sativa
ttcctttaattcttcctgattaatggcttgatagactctctgatgaaccagaaatgccttcattttaatcctccatgcataatccaaagtcattggctccattgaacttgtctacttcaaaacatgcaaaagccacgagtcacttttttgattctgttcttgctccaagaacctgagctctaatgctaattattgtgaaagcaacaagcaagaacatacagcacaagaattaacaatggaaacccgttagaattgtgcaaggattgacatcatcaataactaatggcaaaacagatttaatcaaatacaatgaaaacatgaattttatgaggttcaaaaaagattatggtaattctacatctctagccaaaaacaaccacaatagggctataagagtctttattagctgatgaacaagaagagattacgagtggttcaattacacaactcaagaagcttttgcttctgttacaaacaatctcactagtggtgatgatgattagaaatgcatcacactattatagccctcaagaactcactactcttattcttttctctctgaacagctcctctaattctctcactctttatctggttttctcgatgtgtgttactcccaactaactagaattaatgaaaagctttatatagattttggtgtagactcgagtaccaacatagacagttggttaagttagttgagcaatgggtaaaataggtagagagtgatatttggccgaaacacaaataataataataataatgataataataatacatgatctgtcatgttaatattttagattgtaattagtaataatatataattttatggcttcttttcccactaaaatatttgtgggcctctatttatatgagtcgaagttgaagaatacttttttttttatatatatatatataaatatatatacattaatcaaatttacctccaaaaaaaatttaattcaaatgtatctctttttatgagtattgtatgtaaattatcctcacacactcacataactaagacataattttaaatataatagatttgttttatttgtagatagatgtgtaggtttgtaggaaaattgaggtaaaattttgattagagaaaaataaaaactatcgtgaagtgataatggtaaaattggtaaaatgatttaaaaaagaagtaaacataatagattttgaaagagatgggaaaaattaaaggcatctaattaaaagaagagcattgttgttaggcaccagtgatgcctagcacatttgcgacatgttgcgttgcgattggctagcgat

SEQ ID NO: 115080 - DNA, 2453 bp, Cannabis sativa
  modified_base (46)..(61): a, c, t, g, unknown or other
  modified_base (2289)..(2290): a, c, t, g, unknown or other
acttctgtttctttattgatgttgtataaaatggattacattgaannnnnnnnnnnnnnnnggcataaaacccaacagatccttcccgtgttgaagctcccatggctcatccaccatcaatgacttccattgaaaatccttctcgaacaaatgtcgttcctccacctactgttcatcgtcccaatccagtcgacagactagcctacgaggatgttcgatccccctactacctcagtacagctgaccatcctggtttagcattggttacccctgtcctcaccaacaaaaatattcaaccatggaaacgagacttcaagctttccattggagcaagaaacaaaaccccctttcttaaaggtagactccctcaagcacctgttaatgatcctcttctcgattcttggattcgatgtaatcaaatggtaatgtcatagatattgcaatcggtttctcatgaaatcaagagcaatatcatgtatttagacactacattcgagatgtgaaatgtgttacacaatcgatttaatcaagttaatggtctacacatctttgacttaaatgaaacccttacctatcttaaccaatgagatgatttagttagtgcctatttcactaagcctactgccgtgtgggatgagataaatcaattgaggagtcgcattccttgtacttgtgctgctgctgctcaacacttggatcaccaaaaccataaccaagttcttcaattcctcaaaggattaaacaattcctatcatgatatcgtgaccagatcttatttcttgcatccttgccttccattaaacaaagttttttcaatggtgatcaaccaagaaagataaagaaccttgggtcatcgactgattcctcctcttactatttctagttctgcccctatgacagattctacacatgcagccaatgcagcctcaagaaacaaaacgaccacattttaccaattgtcaaaaatatggtcaattacatggataaatgttacttccgaattgggtttcctccaagctatggtactcaaaaacccaatgacaatcccaccacccatgcaagaaaacaagacactggtactcaaaccagaaatcctcaagcatcacaagtttccagcaccacccctgatgcttccaatccacaactcaaaccagctcaatgtcaacaactcatctctatgttgactcagcaattacaacctcttacagatgcttcaacatctaatgataatgttgttgtgaacaatttttcagctatttctaattctctttcttggataattgaaaatggtgtcacccaccatgtttgatgtcaccttcaatgtttttcatcaatacaatcaaatcccatagctatttctatccatttacctaatggaactaacgttagcataaagaaaattggtactatcatacttaactcacatataactctcactaatgtcttatttgtacctaatttccaatacaatctattatctgtcagtgcactcacacatgatagtcaagctttcatttctttcaattgtccaacatgtcatattgcaaagcaaaaaaagttaccagttcagtcaaatcataatgtatctcctacactatttgaccttgttcacatggacatatgggggccatattctattccctctgttgaaggctataggtactttttaaccatagttgatgaccattcaaggtacgtatggttgtaccttctaaaagccaaatcagatgcccgtttggccatacaaaacttctttcaatacatacttactcaacacaaaaccaatatcaaatcaatacgaattgataatgctaaacaacttactcttgccactttttatgcaacaaatagggttctccataacaaatattgtgtaggttgcccacaacaaaatgttgtcgtagaaagaaaacatcaacaagttcattcatcattcaataatttcctgggagcagctgtccagggatttaaagaagcaatttcaagccgctagggataggcgaccggaagcagcctcactaacccatattaagcagcaacttgacgaaacacttaaggcgtacttaagtcattttagcacggctgccgctagggttagaaacttggatgacagcacgtaagttacagcccttcaggcggggatctccacagatccattaactaccggaggtgagttgtgggatgatctagaaggacgcccggtaaggaacatcactgagttcaacgagagagctcaggtgtttgttcgaaaggaagaagcccgaaaggaaatgaacttgttgaaaccannctcgggaggtaaacccagcaatgtttcaataaggactgtttccacaagaattgataactcggtggtttcttgtctgaaaagaaaggacgaaattagggaaccatcgaaggatagaaagaaacaaaagaagcatgacaaatatgtgtcagtgtatactatttat

SEQ ID NO: 115081 - DNA, 1192 bp, Cannabis sativa
agaaaagattagtaacaaataataatcaaatatttgtttatcatcaaaataaatgagtgaatgacttttggtcaacattattttcattctcactacaacaatcaatttcattaagttaaaattttaacttaatttcaagtgtttatgtatactcaagattaaggttttttattatttatgcatgtattattatttaaactcttttatttagtatttatttttagaaaagatggtgagactcctatccctatacatcaaatttaactcacatttcaattggcttttggcatgccaacgtattagtagctccatgctttgagtaagccacaacctcttcaacatctgcagaggtgtcttccgaaaaagtattaagtaaaattgataaagaaaaaaaaactaacaaaactaaattctactattaattgatttttttttcaaaaaaaaaatccacaacataaaagacaggtaattaataattgctcctatatagaacaacaaagttgaagacatttcgatacatttactaaaaaaaatgatattatcatgacaaatttgctagtttattattatcaaattagcatacacttcaacatcattcacagaaatttattaacaaatctaccattcaaaactaaaatatgagcacaaacaataaatgtaataatcatcaaaatgaatccaaaatatgtattattattttatccaaaatgggcaagatttaattcaggaaataagtaagtcaactcgacataaaatttgtcacttaacaacactacaatgtaaaagataaatcaaaatccacgatcaaatcgaaataatgaatgtctcgacaagtacataaacgaataaagcaaaattaaaattgcccaaagaaaaacacttacatagatattaagttgtttcatgaagctagagaaattattgtgcttgaaatatttgagctaggagcaatcccaccacatatcctaaatgacaaagctttattagcggctccttaaatatgaaggcaaactaattggtaaattctacttagctctatagaagaaacaagaaccaaaagaaaataggaaaaataaaatcagcatttagtacttacctggtagatactacatcgtaagtatgacctaagtaacctcttcttctgaaagctccttaacctccttaacctcttcttctaaaagctgcccatctt

SEQ ID NO: 115082 - DNA, 3841 bp, Cannabis sativa
  modified_base (76)..(78): a, c, t, g, unknown or other
  modified_base (3315)..(3316): a, c, t, g, unknown or other
tcattgagtaaattctcaataattaccctaagcaagatcgtaatcttacttcgttaccaaaataattacatatttnnnaaaatatgtctatttaaatattatttatttttcgagatattacaccaatagtcccagaagtcatgtgtgcacttcagggaactgattgggcaggccacttttttggagtatctttccagcctatagaagccagtcttctccttgtgacccatcatggtttgagatttaatcttgtagaaatacaagatctcctcaattgttggtactgctttcttgtgccacgagcacacaatttaccatctagataggagacagtaaacctatggataaacttgaagggcacaaatccacctattgcacagaatttggcgaagtaactccttagcagaaggtgtgtacccatctccacataggcccaactccagatgtcgaagcctccatcaacacatttactttgtttctctacatggatggagagcctattcctatacaaccctagaacacttttaagtcctcgcattgtcttgtatttctgaagattaccataaagacgaggcattgagaatcatgtgcattgttcgagttaagagagatgtgatcaaagacatgaatgagatgttcttcatcagtgagtggaagaggattttggtgggcttgggaagaagacaccatgaacacaaagtgaaggttagaggggatatcagggatagagggtgtgatgctagaaaaagagggacaacacctaaaatataaattagttaaaggaaaaaacaggaagagatacctggagatgaaatgccatctagggtagtgggaaaattgtagctccatccttccagatcctctccagccaagtctgcacaagcctagatgcgtaatgattaacaattgatacctgaaggggcaaaaaatagcggttgcagttccatgttggtcgtggtggaagaggatctcaccataaaactcctgggttccaataaattttgacacaacaggcgccgtcaaaattaaatagagttgagagagagaaatgaggttgaagaggaaatgggtcttaagtaatcatcaaagtcacatataacatcaagggaaataaatgggtacggttggaagcaataaatgaaaattagaagtaagagaagaaaggagaaaacatgcatgcacctagaatgaactagaataagtctgaagaaaacttcaaagagaagacaaacaaaatgcgaggagatttttttaattgcacctgtaactttcataagaaaagaaagtacgtatgagttgacaatttttacgaaaaagatttatgtttaactcacacatatatgcatggcgttaatatcgcgtgataaaagaagcaaaattaaaatttttatattttaaagtatttttttttttgtattttataaaaatataacaacccacatagcaattaataaagtaacttaaattacaaattcatataataatccaaataacaattaccagagcaatctaaactgtcaaaatgaaaaaaaaaaaaaattacaataatagtatataattaagacgcacacatattacatgtagaattatgtaagttataaattatttccatttataaatgagtattgttatgaagtatccatagtatcgaatattacgataaaatgtcgttttataattggctaataaatttttataatatttatattgtagtaaaataagcggaatttgatattcaattacaccaataacaatattaaaagttatactaggcaccatatcctttcacatttttctttataaacaaacctcttcataaacaaacacaatttatttattctctttctttgggaaaagttttcttaaagtacttattctaattccatgcctcccctgtaaaagcatctaagtaacaactacttttgaccgtgacaaagaagaatatattggcaatatatagtagagagagtacgtgtgtgtgtgagaaagagaaaactcgtctttatcctttctttcaagtactttgatatattttttctaaaaaaaaaaattgatctagatttatccaatggagataaatacgcatatatccttgtaaaatattatataaatatatatttattcaattacatatgccattaaaccgagtaatttacgtagggccactctaaaccatgatgatttatatgtacatataaatttaattgagaatatgttctacactcataaattttatatatggtcattaattgactaagtatttgaaaccaacatgctttatcatatatattatatatattagaaacacttctcatcacaatcccttatatgtgtggtcttttttgtttcgttgataaattactgtgaattggtgattgattgttaaataatatatataaactgaattattaatggatccaaagaaagttgtatatggcgataatgatgatgagtacggtgaaaaagagataagaaagggtcggtcatggacaaaagatgaggactctatactcgttaattatattaagaaacatggagagggtcgctggaactttcttgcctatgcttcaggtaattattataatattatatatatatatatattttttttcaattatatatatatgacaatccattatttagttactaaatattatagatatatagtagagggatacattgtattaacacttgttagaattattacaggtcttaaacgaacagggaaaagctgtagatatagatggttaaactacttgcaccccaacattcaacgtggaaattttaccctccaagagcagcttaagattcttcagttccaattctcgtggggtaaccggtaactaaatatatatcttatattattatattatatgatattacaaaagaaaatatattgaaattaacattcaaataatttgtaacgtacgtatttttctttacagaaattcatgtatgtatttgctttgcgcctatatagtatatgcgcctaccataatttcgtatcattacctaaattctcgaaagttttcatactcttgacttgactatattattaaatgtaatgcacatatgtttaattacacttttaattttatggttataaatacttttagttatgtaattaatcttattttacgttattgacattattttttattaaaaatatttaatttaagtgttatttttattttaaaaaaacataataatatttaaattttattgttaattataattttagtttaacaataatatttttaattttataatatttaatttttagaaatatcatactttttctctctctctctctcnntctttttttttttttttgtataaatataaattttttagtaactataataggtaacaacatcacatgaatagtgattcttttagagacataaataatttttatattttattgtttaaaaagaaaataatacaagaaaaatatttttttttaagatatgtggattgggtaaaaaatattaatagaaaaaaaattataactacaataactttaaatttgaatttcaatgtcaaaaatgtatagatatatatggtttatttgacacaacttttagaaaaactaaaaactaacttattgaaaaatttatggagaaattatagctaaaagctaaagctcttacgacctaactaataataaaagatcaactacaataaattattttttactaaaaatctatttaattgtttgctatatattacaaaaagaactatattttttttgaacgaaaaaaatatttaaaataaataaaatttaattttcttatttttatttgggaaatttgattttctatacttacatatacctaat

SEQ ID NO: 115083 - DNA, 2335 bp, Cannabis sativa
ggggggggggggtgaattccaagcggttacagacattgtcaatcaaagtgccattgctttccaacactcttgcccccatacttcagaacaaaatggaagggcttagcgtaagcatcgacatatagtcgaaactggcctcacccttccagcacaggcacacatgcctctgaggtactagacagatgcatttcatactgcagtacaccttattaatcgtctccctactggtgtacaccatggaaaatctccatatgaagtcattttctccacaaaacccgactataagtccctaaaaatctttggttcatcatgttttccctgtctgcgttcttaccaaacgcacaagtttcagttttattctacgaagtgtatcaatctttgctatagtgaagcacataaaggctataagttcctcagtccgcatggtcgtatctacatctccaagcatatcatttttaatgaacaaaagttcccatgtgaacatggtttctttaataactatcaacctgaaaaaattgtcactcttgacactcctcactcatggatcacacttctcactggcacccgcgactctcctaatgaatccacaccagatacctctttttcgacaaacacaaacgacaggtctcccgctgcagaaccacttacacagtcccagatcaatcacaacagcaggtaaatgctccgttaattcataatgatattatcctctcaccacactatcagtctccttctgttatttcacaggctcaagacactccagcttccactcatagctcatcactactaaactcccctgctgcagtgtcacctttgaggccctctcatcctatgattactagggccaaggtgggcattttcaagccaaaagtgtatctcaaccatgccaaatttgatctctcgcttcatgaaccatactcactcgaagatgcacttcggcatgaggggtggaaccgtgctatgggtgaagaaatgacagctctacgtcgtaaccgcacttggatacttattgacccaaatgtcgtccatgttccacatatagttggctgcaaatgggttcacaaaatcaagcttaatcctgatggcagcttccaacgcttcaaagcgcgtcttgttgccaaaggtttccacaaacgtcctggagtcgactttggtgaaaccttcaatcccgtgatcaaagtcgctactattcgtgttgtcttgacaattacagtctctcacaactgggaaatccgacagctagatgtcaataacgccttcctcaatggagtacttgaagaagatgtatacacgatgcaaccaccaggctttgaagatgctacaaaacctcaccatgtctgtaagttaaagaagtccatttatgtgctgcgacaagcccctcggtctcgttatgatcagcttaaaaggactttgcttaactgaaaatttgttagctctaaggccaactcatctctattcatgctgaagactcaaaagtttgttattatggtcctaatttacgtggatgatatcataataacaggaaacaactccaaggaaatcgggccgtttgttgacagacttaacaaggtattttcacttaaggacttgggtgacttgaactacttccttgggatagaggtgtttagggatcacactggaatttatctatcccaaaggaaatacatagcagaggtattgtagaagtacaaaatggagaatgtcaagccaagcccgacaccaatgacagcagggagagttatctcaattaatgatggagttcaactcgaaaatccatctctttacaaaagtataattggtgccttgcaatatctgagtcacactcggccttacatctccttcaccgttaataagctgagccgatttcttaagagtctaacctcagtccattgggggctgccaaaagagtgttaagataccttaagggcaccatgcatcatggaattaatattgcactgagtgacaatctgagcttacaaggcttttcagacgcagattgggcgtgttgcctcgatgatcggaggtcagttgctggatattgtgtgttccttggtgagtctataatctcttggtcgtcgaagaagcaaactgtggttgcacggtatagcactgagtcagaatatagatcgttggtacatcttgctgctgaactgacttggttgaaagaacttctgaaagaaatgaagtatgaaatgccaacaacaccaataatttggtgtgacaacatgagtgctagtgccctggcttctaacccagtgtaccacgtgcgtacaaaacacatagaacttgggtggcgtttggttggaggtaatgaaatggaatggaatggaaagga

SEQ ID NO: 115084 - DNA, 3419 bp, Cannabis sativa
  modified_base (86)..(108): a, c, t, g, unknown or other
aatcaacatccaatccgcacaaatgcggattttgaattttccaatccaatcctatccgcactttgtggattggattggattggatnnnnnnnnnnnnnnnnnnnnnnntattttatgaacacccctaaatagtatcattctttagaagtactaaatatttctacatcagttaaacatataatattttattttatttttctttcaaattatttttgacacgcttacttttaaaaatactacaatagtgtagcacctttcactaatactataattacaatctcacacattattatatataaaaaaaattctttattaaattattgtatatattttacttttaatttttttatttaaaaaaatataacatcaatatcattatgtaacatcaatataaattttaagaataacattcttttatctctaatgttatagtatttttatattttatcaaacatcctccacaatataatcattggagatgctcttacatgtcactccaacaaaatcgtaattacaattaataaagaaggaaaaaaaaattaaaaaagtcaataataataataataataataataataataatagtgagtgagtgcctcaaacttttgctcccttataattggcatagtttaccatttgctaagttattttattgtgagatcttgacactcagacatatcgcggttactccgggatgagactttgttgggtttggtagcgtgattcgtgacagtgcaggggttgtttgggtggcttggggtgatggtaattttagtgttgtggttgcagaacttttggctctccgtctgggccttcgttggctatttgagttggggtttaagatttcaaaagctgaaatagattctttatgtgtttgtaattaggtgaattatctaagttctaattttgctttcaaatatattattaatgaaattgttttttttttaactactattagtggtagttcgtgtcaagttatttcgtgtaatatagatggcgtggctcacacactaataaaatctattactagcttgataacagttattgtttgagttgatatttgtcctaaatttattaatgctattgtaacagttatttggttcgttaataaaatgatactttctttaaaaaagaaaatgttcacaagtggtagtagtatggcctatattactaaacgggtgcttctattttgaaaacaattttgtaaatacggatcgaattgctccatttatacacctttaactaaaattagttaataatgcttctcctttattatttttttattaaattattattaatgttgtgagtaaaaatttaaataactttatttacatttaatcttattaattttttttcctcatacctgttgcatgtaagtgtagggtaagtcaccgtctaaacgaaaataaatatctcatatatcacataaaatgaaaacacgtggcataatttaattgagagaaaccgaaggttgtgagacaataaaaaatagtgatgatgaggatacaatatctagacatcaccttttatcattagttagttattatatttatgaaacttattatattatataaatacaattataaaaatggatacttagttatagtaattaacatatgaaatttaggagaatattagtatttctcaattttaattggtacacgaatccatccactgctgtgctgcagcttaatgcttatcgtttggaccaagacccaaaatttggataagttgagttgtgataaaggtaaggataagagaaattaatacccccattttggtaatttaaggtcccatacttataccagaaaccatttccaagaaaagaagaagatataatgacttataatttgcggcaataacacgcactactactactagtattgtactcttcgtttgcttaaattttaaccaaaccaaacctttctttttcgttttccttaaatacccctaccacggacctatttacttattgccaaagacaaattaagttaattaattaattagtactacatatttactctgctctgcagtgattgattatatatggcggtttctgatgcggtggtggcgaacttgacgacgatttacgtgatagttatcgcgttaataaagggttatggtataatactggggcggagcttcagtggtgtgattgttctgattgtatccacagtgttagtgatattgattctaataggaacgcttacttgggatatgtcacgcaaagcggccacctacgctttctccactcatcatcatcctcatcatcatgttcatgagatttgcaagggtggaatctgctggcacggcgtagccgtacaatcgccggcttctcagctccggtttaggctaccccaccaactacctacttatcccaattaatttgtaaactatatacatataagaagaaagagaagaggcatggattttcagaaagatttggttttcattttaattcacacgctgcaatatatgtatgtatatagtatagatataatttgtaggtttgggcttcatgtgtttgattttatgactgtgagagtaaggtgtgactctctgcaaatgaaaatagaaataaaaatattgtacataatactactgttctgtttttttttttgtttagttatgaattgttttcatatgtaaaaaataatatttatacacactgttaacttttaaggattaattaattggctagttaattgggaaactagggaagcatacactcaagctagctaggaatataagttggttaccaaattaaattaattataagttctcaaagaaatattttatatttgtgtaaaactcttcttcttcttcttcatttggccaaaagaaactctttctttttataaattgtaaaccttctgatcttttctttttaaaagatagaaatgactgtaacactgtaacactaacttttctttaaagatagctctcagtctcacttggtcctcgggacgggactgtctatgctactaaggagtggggcaaggattttattcccaattttcttcataagaaatgtaactttttttattaaaaaaaatgtttagtaataatgacaacgttaagaaaaatctattaaatagaaacaagagaaaattttactatgagattttaaaagttatttatttaaatatggcacttttaagtttgattaatttatatggtattttttttatttttatggtatttaatatgccataaatatgcaaattaggttttcaaatcccatatttaatgtttttatttgtttagacagttttatttgtcactgatgccgaaaaagtcgccagtgtttgttgctggtgtcggaaaaattaccagagtagctgtcgatgccggaaaagttatcgaaattgctgcttatactaaaaaaatcgttggaattggcattgttgccagaaaaa

SEQ ID NO: 115085 - DNA, 934 bp, Cannabis sativa
gtaaaataatttccaacagtgcaaactctaaggaaccagaggtaattggatttgtcgactcaaactatgctggtgacttagatacacgaatatcacaacccgaaattgtgttcgggatcaatgattgtgccataagctagaaagctaagttgcggtcatcaatagcactatcaaatattgaagtcgagtataaggcttgcattaaagtagttaaggaggacctatggctaaaaggtttaactagagagaggcctataatagaaaaagtttaaccattttccgtgacagctaaagtgctttgcacctcaataagaaccaagtctatcataaaaggataaagcacattgatgttaagtttcacttcattcgtgacataataccaaatggtagagtcaagctagagacaggtttcaacaaatgaaaactcctctaatctactcaccaaggcactaccatttgccaagttcaaccactgcttacaactgttatctgtcatgacagataaaaatagctcaatttgtccaaattcttgaagattagctgaactaaagttcaaggtggagatttgttagttagtgaatgttagttcagtttaatctaagtggttgacagttgactgtcaagtaaactaactgtattatgttagtagtatgtagttcttagtttgttcttacaactaataggcttagctactcaattgtaataatgcctataaaaggccattgtgttatattcttttagttagattgtccatattacattcaacacatttaaggagctagttcatttattactctatgttatgattgctcgaatggtgatgtgaattgaatcaaaacttgcattgattcctaacagcaccctaatgaagtgatatcctataaataattaatagttttttataatcattattgaagtaaattaagtgagactc

SEQ ID NO: 115086 - DNA, 2695 bp, Cannabis sativa
tattaaataaataatcttacatatcaaatcctattaccaaagaattatatactaattaatataagtggagctatatgagatattatgccaaaaattagcatcatataataatataatttttttttaggaataatatagactcttaacttatgcaaaggaaaaaaaattaagtaataaattaaatttaaacgagaattatgtttattgtccataaaatataaatacatacattatattttaaaaataaaagaaaattattaacttatttagattttaagttttttaaaaaatcttttttaaaattattaaaatatttaagagtaaatttaatttaatatacatataattcatatattacgtgcttagcacgcgaaactacactagtagaattagatgaaccaaaaatggtataaacatcattctctctcttcaacctcttctctctttttggccctaagaagaaccaataacccaagttgtaatttcagagctaattcaactttccagaaaggaattcatgttaaacttaaggatgaattggatggaagagcaaggtacccctagactcttttgttttgttagttttggaaagaaaaagtttggttttatgtgagttttggtgattttgattctatatgagtttggggatattagaaattgtttgtaagctgattataaggttgtttgaagttaattttgtaagctaatagcagttgtatgttggtttgagtgagtttgagtttttgaactcagacttagcactctaatggtggattttcattgaggggtttattgttgtgtttgattgttggattatgtttagaacttgatgttaaagtgttttgaaaagtttagtgtggtttggttaagatttgagcttaagaactcgaggtttggggatttctgctatgaaacggtccaccatttctgtagaaatggtcaaccgtttcccaagccaggaccccaataaacgattcactgtttggggattcagtccaccagttggggtggtttttaggtacctcaatttttgtgttttctagatatttagtgtaacgccctatttacttaagcaagttacagtgattttttacttactgtgcaggcctttgctaattaaagggtttctcgaaaatcgtatcaaatttaaacttttaactaaactctagacttttataaatatttaaccgtacataaaagttgggatcccattttaaaagtttatgaccatattcaaaatacattttataaacatgtcgctccatgactacaaaataaaggcccaagtcgtgtcgaaaccaaactctccaggtctaccatcctgatatgtacaaccatcctcgagctctgcactcactggtgatcaaccttagcctttcctttaactacacacgcaaataatgtctgtgagttgacaaactcagtaagaaaagcacaaaacatataacataataccgacttgtatctaggtgcccatgtgtctcaagaaacccacttggtttagccataattcacatttgaaaaatttagcatacatctttttctctcagagacgctgtaaaactttctttacgtgttcttcatgctcttctagactacgtcagtaaatgaatatgtcattgatatatatgatcacaaacttatctaagaactcagcaagcactctatgcatgagatccatgaaagatacatgtgcgttaataagtccaaatgacattaccgggaactcatagtgactataacaggttcgaaacatcgctttagggatatcaacctctctgattttcaactgataataactagttcttaaatcaatctttgaaaatactacgactccttataattggtcaaataaatcgtcgatcctaagtaagggatatcatttttttaatcattaccttatttagttcacgataatcgatatacattctcatggaaccattattctttttcacaaataaaaatggagcttcccacagagaatgactcggtttgatgatactcttgttaaagtagtcctaaagttgcgctggtaactcctttaacttcgtcgatgtcattcagtatggggccttagagataggtgtaatccctggtatgaattctattaccaactgtattccctatccagaggcattcctaatagatcttttagaaatacatttggaaaattagacaccagtctaatattcaatggttatttcttgctctctttacttttatccataacagtagctagaaatttgacacatccaaaaaataagagagagagatatgagtaatgtgctggagaaaaataaatgagaggtatattttaagaaaaaattaaaagaataatatatttcttagagcactcacatcattttttctattttattctttaaaataatttaattaaaatttcaatttttttatttacctcacacatttacattaccatacatcaaactaggaaacggcccgcgcttcgggtgcggtataaaaaagttggatttactttatgtaggagtgacaaaactatcatcgtgttgtgttcatattatattttatttaacatgcttctatatatttcgtgtcagatgtgtcaactgttagacaatttatatgtataaactgaaacatacatgattatgaataaagtgcggaattaataaatcatatatgcactataaataaggatcgaaatacctccagc

SEQ ID NO: 115087 - DNA, 4225 bp, Cannabis sativa
gttgagttgagtgtttattttttctttcttttataaatatatttacaattatataatttttttatagatataaaaaatatttttgtataattttttaataaattaagtatatcttttatataagataaatagtttgtattttcaagtaaaataattctaaattataaacataaaaaactaataaattagttattattaaaaaatcacataattattaaagtgttcgttttcagctcttttttccatggcgaaaaagaagagaatgatacgaaagcctgctatcaaactgaatagcgtgaatcccccttcaatccaagacaatgtgaatgattcaatggaattggctgacttgaatggtgttgatttggtagagaaggcgttgcaatctgaagacattatagaggcagttcaaagtctaccttcagatactgaggaggctctcgaggagaaagcgaactcagtggatgaggttggcatggaggatttgctctcaaattcccaataaaagtagaagaaattcactgaaggtaagctttcgttctctgaacctaaactaacctacactgaaccgatccagaaaaataggaaaaaaatagcacaggttgatttggaggaggttaaggaccaagctgcgatctggagtgttgttgtagtgtgtatggtcctagaagcaaaacctccatttactatctttgagggatttatcaaacgcaaatggggaaaacttgggattcagcagattgttagaatgaatgggggattcactattgtgaaatttaataatgtagtgactcaagacttagctttggaataaggagttccccaatttaatcgaaaaccagtcattgttcgcccatggacgactgatcttacagcccttcgccttgtaaaatcggtttcgttatggatatgtctacatgatctagggttacacttctaggggttatatttgcatccttaattcatatagaagaatattttctaagaatatgttaatataatttcaagctcctaatttttaattataaaatttattatttgataagtgtagtcattaaattctattaacaaaacatgctcaagttagattttggagttttttgtatgttccatgatatgcattcacaagcccatatgaggcctaaatcacgacaacaatgagctatgattcctgacctaaattcaaaagtttaagaaaaaagattattaattgggatttcccatcttttatattttaccgacatctaaaataattatcattttatcttaatcacaatttatttaaaataatgcatatgtataattatcatggtaaatatttgacaaaaattaattacgaagaatatatatttttctaatggaatgcatgcattcaactaaacatcattacaagaaaatagcaagtcatgcctcagtaaatgacgagtacaagaagttcaactctaatccacaaagtactagcattgataaacaatgcataattgactaaacaatgggccacttgattagcatttttgcgaatatacattagacaagtaacactttttgtcgcaacagctgtcggaccttctgaacaagattatttgtatcatagcagccttcatcctccttcaataatagttgtacagccaccgaacaatcagtttccaccttgaatctctccaaccttcgttgtattctagtctgcagactgtctctaatggcttcgagttttgctgccaatggtgagggtcaaccagttcttacttgagatgatgcaatactcacaatacctctgtgatcacgcacagctatgcccctacatacctttgatgctttgcccatgcacctgcatcaatattaaaagtatgcattccttgtacaagtggctactaattttcttcagtttgaagttgattgttgtctttccctttaatattgctgtcgagatagtctttcaagaatttactacaccattctagatgtctcctgccttgggtttacacccacaatggtttatactattcaagaactgaaaattgtcctttgtccaaattgttagtaatttttccaaaaaaatatcgtattaggcacccaaaattttttaatatcctcccataagctacaacgttttcacacctccatactcactagacagctccacaacccgtaaaaattagttacatctttacaactggaacaactcctgcaagatggattgatggcccttccacgttgagatagagtcaaatttatcggaaaccaagagcggcaaaccttccaaaaaaatgtttgatttggagggactttttttttgtaatatttcgaaaaatattataatatttaattggatatattttattaaatatgtgattatgttgatactggggtgagattatgatcttacctaaactaattgtgtgataattagtgtaaatttaatatgtgattaattaaagtgtaatttattaattacggagatttatttagatgatgtgggtattgtggatactatttttgaaataaaatgttttcaggctcggcgaccgcagaaactcgacggagtggtcagaaatgtcatgacaaaaaaagatgaaacgaattggaagtataccggactagtttagaattttaagttgttggtttgtcgaattagttagaaattaccaaaattctcctagggtatgtttagcttagtttttgagagaggggtaaattagtcattatgcgtgcctttgttttatttgagttttcgctgattgttatttaagtttatgctagaaagaattaaaaaaaaaaaaaggataatgatcaaaaattaagagaaaaataatttagcttttttcctcctctctttcaaccatagaaggggatcagatttttccttcacaattcagctcaaattttgctagaaaatttaccctagttgctgtccaattcttgaggtaagctccttactatgttatttatggattttttttttcaagttttaggctagtttttattagggttttcatcgctgtgtatttagactaggttcagagtttgttttggtttcaattttaagattttttaggtttcaattgatgtgaattcgtggctatttggtttagaatgggaaattttgactaaagaacctaattttggtatcaacatggtgaaattggtatttggatgaattattaagaattgatgctttaaatatattgaatttgtggtattatattaatctggagcagttggatgaatttaaggtggttttggcttgattttggaagagggaaacatagaatttcttgcctgccagaatctgtcgactggttggttctggtattacagaaccgatcgaccggttggtctgcagggtagattctagggttttctcctcaaatctgatttttgtttggggtgttttcaggacctggtttagggtatttgagaattgtctagcctattttgaagctattagaagttagggtttgtctggttacgggaattagggttagttcttggagttttgatttaaggtattaaacaaattttgttgtcgtgacataggacccagaatcgtcaagctctgtattcactcaggtcgacccgcatgcctgatattggattgaggtaagaaaagctttatgcatctttaaatggttagacaagaaacgattataatcgttagtgcctcgattatgatcgagttattaatatttatttgtgtgcctcgattatgatcgagggattagaaacggccatcaccgttatgagtagttactcgtttgaaaccacaaataggtttcttacttatcttgcactttaccttgcaacaatattgacatacgcagctcgtagataatgagtggtaagggtgctttataaggcacctgcattgtctcgttttgtgaatgtttaattgatcatgcattgttgaatatatatgttgaatgataagtatgtatgttatatcaagatgtaattgcttgaactttatcattgtatgtgatttattagcttttcttgctgagtctctatgacttacgggtgtttcgtgatgcaggtaaagggaagggtaaagctgagcaaccgtgagtttgagattttccagtaatgaacatatcaaccatggtgccacggctccagtggacaggatctaccctgtaacgccccctcttcaagcctctattgggtccttacacccacggaatgatggctcttatacacgagtgtgtcactctggctgcttcatgga

SEQ ID NO: 115088 - DNA, 1774 bp, Cannabis sativa
atactaattgacagtaatgtgcgtgttgtttgttagccttgcctttgtcttgtttggtgttctaaagcataactcacgccctttcttgtagtggtaaaaaatcacttttagcacttaactaagttaccctttgtgaccactctttcaaaaaaaaaaaaacaagaacaagttaatacaccaagaagttagtcgatttcaatgtcaatcacttccttatagttttattaaattaaatatcatagaagatctagaatcaatcccaaatacccttttttttccattaaaaaaaacaagtctaaaagaatgcaaatgcatgatatgttgatggatcaagttaatagaaacaagcaaaatgttacatgaagaagtcaattgatagggtgaaaattgactggtttcatactaatggtaaattacacaacgaattctgaaacccaaatcctatccccagtccacaaaaggaagacttggatatccaccctctggaggaggctttaacgatggaggtagattgccccatgatatccccattctatctctgaccgtatcacctggcaaaacccaataagggaagcacaactgtctcatcaagcaggtaaaagaaataccaaacaatggaatagtagaagaaatagcaaacagacaagagaaaaggttgtattattgaatgaaaaagaaacaaacagtgtaaagatcccttaggacctctgttctgcaatgcagaaagaaagacttaaatcatgcataacactactctccccttactcacctacatatactatcctattcccacattcaataactaccctcaatacaatgactcgtacacctttttgtttgctcccttctatcttgtgttctactcatcatggggtctaaaaactagccaatataaaatgatggcaactgactgttgatgagtctaagcaacatcttacttagattgtgttcttaccagacatagagttggttccaataacttgatttccttgaaaaataggtgactgattactaccaacgaaacctgccaacacataataacatcaaaactataagctaataatgctcttaaccacccctatcaaagttagaacaataaaattccaaaattatttggccaagcaaagaaaaagagaaatagtaaagtataattttttacctggcctcccttgagaattgttcaaattttggactgtgttctttggatgcaaatacttgcaagaatccccatattggcaaattccctataacccaccccccaaaaaaattaaaaaaaaaaaaaagttaagaatataatttgggataatcgaagaaaaacgcaaattctagcacaaacccattattcagagagcaattgaaaaaagaagtagaaagtagaagaaaacgcaactgttttaacgaagcggttacagacaccatttccgaaaccttctgcgtaaacttgattttggtctgcaatcaatctcaaaccaaataaataagtatatagaaattacacatacatagcataaatatagtagatatatacctttgaaggagtcgtaccagagagctttggctctaaggtgttgaagaccttgaagatggcgtttcctagcgaaaggactgtcctgaaattccttgtcgcaatagtcgcagtgatacttacccaacggcatctttccctcttcctcctcctttaagggttttcaatttataggtttgcacaagtttgaacttttaattttatttattattatattttttttgaataaattttatttattattattat

SEQ ID NO: 115089 - DNA, 1722 bp, Cannabis sativa
atccgatccaattggatttttaaaatttgcatccaatccgatccaattatgattggatatccgattctattagatcggatcggttgggattgaatcagtcggttggaattggatcggatgactttctgcacacccttaattgtaattagtagtttgattcagcaataacctttttttattcctttctccgcatatactaatcattaatcagtacaaaagtaaaaaatcactacatttatttatttcacacattctagccattgttgaggttgaatctcttggaaaacaaagtcgtaattgtcgtatctttaatcgaatattcttctttaactatagaaagaatttttttaacggagtttaagcattttctaataaaaatgaataaataaaagacaggaaaaaaaaaaatccgacctaccggattcgaaccagtgacctaaggatatctatttgggattaccaactacagtcctccgctctgccaactgagctaaggtcggtttgtgctagttattctcataacaaattaatataataagtcaaaaatacaggtcttcctttactgaaaggtacatgtttttttttgaaaggtacatgttaatacctctctttttttttttgatttgatgttaatacctctcattttacaaattttcttatatataggttttcccactggtacggagggaggcagcatacgtatataaagagggatgtactcgtcccttcttaaaatcaaggcttattagctgttctgcactcaaaaacctcaacctgctccttctttgacactaaggtccccaatctctatatttttgcatttaagcccctaactcaattagttattagcatcagtgatatcatctagctagttaacctttcaattgcaaacacaaataacacggtcctttaaaagatctaaattactttcattttggggggtttttaatttttttggagagaatcaaaagagagtgaaccatatacttgaaaaatgggtgagtccttgttttcaagagtgatgatggaaacaccaccttctatttacatcaagggcttatcattggtgaccttaatggcaatggccctgttggggttgcttgaagtggctggaaatcatttagggtattctaaattttccgacttcagctcacaaaagcgacccaagatgtcgagcagagccggtatgttgttgctctacacgcctgcctttctcgccggccttgcttccttgattctccttgtgccccatactaacgatctaaggttccttttcctcaccttagctctcaccattcatttcttcaagagggttttcgaggtaattaaacatattattattattatacaaaataaatcttttttccttttcttttctgaatcgttattacattttcttttcctaaattaatttttgctttgagttgaaattctaacaaggctaacattgaaattgtgtttttttaaatatgaaaaaatagttgttctcaaaaaaaatgaaaaaatggaaaagaataagaagctacatatttaatataggtagatgacattaattaatgcgttgcacatgtatatatggatacgatcatacgagtaacgatatctgtaaataggaacgttgactagttatgttatgtacattggttactgtactgtacatatcgggcaacttccatcataaaacttaaattaaccaacactaacataaaaaaaaaaaaaaaa

SEQ ID NO: 115090 - DNA, 2726 bp, Cannabis sativa
  modified_base (26)..(43): a, c, t, g, unknown or other
ctctttctctcttcatcttcttcttnnnnnnnnnnnnnnnnnntatattattttatattatttcataacaattagttattttttgcaacaatttaaatctatatatagttgtaaatctttgtaacctgaatgcgtgagagacaagatttgtttgagtaaaaatcgagatagtgtaaggtagaatctaaactaaagagagaaatttcctcttataatctctgataagtttgtaaagattcttgtaactttttaaacgctgataataataaaagatatgattgttgttgttctaaccgagatgtagagcattgcataaggttcaaactcgttaaattaatctagtgtttttttttctgttttactacttaattctttatatcttcaattcttgagattttttagtataatattttttaattgtgttacgtatttattgatactatgataaatgactaaaaatatcgtctattaagttattaaaactatctatcacatttttttgaactacaatactcttgctaccagttattgggacaaagctaagttttttattccgtttgatcaaatcagcaactttcgatcattgtgttgaccatttgttcaacaattatgatgatgatgtttcttgtcgtgttgtcatggtttgttgggaaatatagaaggcgcggaatgcactggttttgaacagcaaagcctcttctccaacacaggtttttgtttcagtaaggattacacttgaccattggcgcaaagctcaagataagaacaatttattatcattgtctctccaacaaaatgataataaattgagcaatggactaaacctgaattaaacacggtcaagatcaatgttgatagagcctcttttgagaaagaaaatgcttacagttttgtgtggttgctcgtgattcatctaggcatcttgttgatctcacatccaaataccaagtcggttcatatgcggctgaggtgatcaaaacacttggggttaaggaggctattagttggttaaaaggcaaaggctggaataaagtcgaggtggagactgatagtatggttacagttcaagcaatctttagtaaacaacaaatgacttctgtttttgggttggttattaatgattgtaaatttttattatcatctctacaaaatgttagtcttcgtttcattagacgatcagctaaccgagtcgctcactttgtggctaggtggtctcagtttttctctgatcgtagcattcattagaatattgtccatgatgatcttcaaacactcttgtatgatgaatgctaaattttaatgaagttaataatttcatgttcaaaaaaagaaaagttattaaaactaaatattgtcgatgtagaattatttaaagctgtaaaaattattagtgcatcagtttctacatgtgatgagtagttttagctgtaattttttttagggataatttgttaagttactttaattttttttataatgagaaactaaacttcataaaaccagaactgattttctaatctttagctactttcctttcattgcagtatcttacttatgattgtggaaatattataaaagagcaaataaaaagaaaacttaaagattaggaaaaataactagttcaagtttgtttttttaatttttttttatttacaattttatgacttaaaatttttatttttaaaaatacacttttaaagttaaaaattaacgagtaatcaaatttacgacaactataaaataatcagaacttcaagacaaatatatatataaaaaaacagtttattattttgactgagagtgtattttggaaataaaaatatataagtgtacaaataaaaaaaatcatgatgtatttttgtaaaaaaaattcaaataaatagaaaacctaaagattaggaaaaatagctagaataagtttgttttttttaaggggaatttttaaaaaaaatactaatttttattttttctatgtttttttttataatttattttttatttataaaaatatgcttttaaatttttaaattataaaaatacgatttttttcaataataaataagaaaataactaaaaaataacgataaataaatttcacgacaattataaatcaattataaataaactataaaacaaccagaacctcaaaacaaccataactactataaataaaccataaaataataaaaaaaacagtttattatctttatgtatttttgtaaatggaaagattcaaagtgtaaaaatgaaaatttttcagtgttgatgtatttttataattttttttcaaatttttgttctatgtaattttttttttatacatatataaatataacacgtaactagattaagtttagtgtgatttatcaaaaagaaacaaaagtttgaatgcatgaagttggaatttctggaaactgatattttattcattagtatgggcgaagtttgaaaattttatgtcgaagtttgaatatcattccaatactttaaaatgcaactgaacaaaggaatggaataaaaattatttccttttcattttattccatttcattacctctaaccaaacgccacttaagttttaataataaaacaaatacatgtgaataacctaatcaagattcaataaacttggctaaattataaagtaagtaacaacagatcaatcaataacaattaataaaaaataaaataattaatcataataaacaacaaaaaaagaaaataat

SEQ ID NO: 115091 - DNA, 2848 bp, Cannabis sativa
  modified_base (553)..(558): a, c, t, g, unknown or other
ttaatttcaacatacttaactacaatccctgtgggatcaacctcactcctggtgagtttactacttgtaacgatacgtacacttgcatgtgcaaaatatcacaacaactagcaggctgagtaggttgaaattcttattggtggtccatggcgttttcttcatttgaggggaccttagtgtcttcttcttcataattcatccgcctcgtgcttaccatggccacaagtggagatcgacgcttgcattcactgctctaaatgaaaacaccaaattgtaaacgcaatttgtcatcaacgaacctaagaagatcctaaatgagcaaaatgaacacaagtgaatgttgttcaaaagtaaactggtttacgaaatgaatttgacaatgatgagcaatgaatttttatagtggttcgtcccctttcagcggtaatagcctaatccactttggtcaagagaactatacctacttccttccttgatgtcgatttgatagagatagcttaggtctttgtagcagaagagaacgtagactcaaccgaggggccgaagtggtttnnnnnnatgtgagactacttagcaaaaaagggatattttcacaagataagaatgaagagtattattgatctcaatgcttgagaagagttctcgagacttatgttctctaagagttcaatcctcaagtgagtttttaagagtgaaaacaacgtaagtttgagagagtgagagctattccctttacaattaacttcataacttttaaataggtttacatctagggtttaaggtttcttaaccagacacatttttttttctaactaaagttaagttaaatttaaaatataaattaataataaaatactattttaaaacaaatatctcaaaacatgatagttgttgtagatattcttggactagctttggtggcatgtgcctagcacaaaagtaccccttcacgtagactcaacttcgtatgagtcacttaaacttcagaggtagaccttgtatggagcactgagtgtcaatccaacatggagccctgaaggtcgtcggtcacgtgtcctcataactgtagctctagaggtagttggtcacatgtcctcatgtgttttcacgaggggtggaaaaacgggttttgacacggtacatgaacacaaacacgacatgattttacaggctagggtccgaaaaattagatgcggatcgaaaaatgggtcgacacgacttaacacgaaataaaaacgggtcaaatatgacacgatccgcttaacacgaatttgacacgtttgacacaatttttttttttaaatataataaaataaaaattatatataataatataatcatataaaaatatatatttaatgattcaaagttaagttaatatttttaatttattttttaacatgaaattaaaaatattttaatttttattatatatttaacaaactatatatatacataaatatatataagttttcttatggaatctaaatctattatttttctctataattctaacttcaataacagcaaaataggtcacagtaggtcgacacgaacacgacacagttttttacgggtcgggttagggttaaaaatattagacatgagtcaaaaataggtcgacacgcttgacacaaaatatagaagtgggtcacataaaatatgacacgaacacgatacgatgacacgttttgccacttctagtttttacgactctagctacaataaccaatattctcgatgaccttttcgatatccaaaagaagaatccacacccttctccttaaattattgagggataacaaaaaataaaaagttaagtaatttattttttgttttattctttctttctttttacttgttcgcagatcataagttaaaaaaaactctttattaaataaaaaagataaaaactcaaaagacaaaaaagtctgcttctattttccatgtttgaagaagacgagaaaaaaacaaacagaaaaaaaaaactagatctaaaggaccaacccaacttccatttccgtcgtcgtagcttcgccttattctgtctatccatcttcatttacttgcatcgttgtagctttgcctagaaccagcatcgtctctcccccatggtcctttttcctttccttgctaccattaatggtgagccaccgacggtgacctgaatcccagctcattttcctcaaatctctctctcacctcagctcatcttctttgaagaacgacaaagaagattttgtctaaacctttagagcttcgattggggttggcaaactagagacgaggcagttgtactgtcgtctttgagggtcttcgtcgatgaggacgactacatcttgcatcgttgaactatggaaggttcgattaggaccctttgaaccattggtaggcttgccatctatctttttttgttagatttgtttgtgatggtgttgtaacaaagagaggagttggggaaaaaagttattattttgaattttttaatttgtaaaataaatttgtttatttttaataatttttttaattttcaaatgatttatttatgttttttaaataattatattaagtgtaccaatatatatgtgccacgtgtacaagagtgtacacacataatcagtctatgttggcacttaattgagataaatggatgacacctgaagtttattaatggttagtagtttggagaattttaccactaaaatttgaacttgcaaagttaagtacaagtaaaattatagttagaagggtttagtcgccaaaaactcttttaaaaaacaattatattgttggattatgttttaccaggatctagatttactagcatgtatgttatttaacatcctaa

SEQ ID NO: 115092 - DNA, 1864 bp, Cannabis sativa
taataaaataatatatggggtaatttttttttcattttaattcatcttttaatttatattaaagtaaaattattaattcttgttgacaaaaccaaactcttaatattttttaaataatcaaagtagtctagaaaagcatatgttataagctaattagtatttacatgtgtgtgtatatatatgtctctcttgataaatatcttattcttcatgtagcaaaagaattgtgggtgtgagttgcccctcatcacaaaaatttccaatagaagcatatctttgaacaaagtattattatggaaatttatccgtacatataattataccatataacatctcatgattttagtccacaaatgtcccaatcaccaactctaatatataatcacagacaaaatattatataatttgtgattgaactattataacatagatataataacacctagagaaagttggcagttaggttagttttttttttttttctctattatatctccttatagtgaagaaaacaaaaaatgcaaatcttatgaagactaattgatagaataaagttttgttatgacataataaatatgtatataatatgaagagaattgtcaaccacatacttggatatataattagtttggactttgaagtagtgagatgaggatatgaatctaattattattattatgtatttttgtatgatcgccaattaaggggaaatgatagtaaatatattatttccacacatgggttatgtgttatgggttaatataataataattgttctttattacacaaataatatatagttatattaaaaataaaatctataataataataaattgaagtctgatctgtcggtttggtggagttcgccagctccacatgtcaaatccaactcaccaatatttgcaagttcaaacctaaagcttacaaagttactacaataataaaaatgataattagcaattaattactatccatgtcacaaaacttcagccaaagcacataaatccagcccattaagaataacaacacataataatttgggatttttttcctaattaataaaaaaattattgtacagaattttaaatattattataattcttttttactattaattcatatattgttaacttttcatgttgtttttatattgcttttatattgtttttatgttatttttatatgactataaaattataattacaaaaataaaaactctaaaattaaaaaaaaaatgtaaaaatataaaaatgtaatatatatgtatatatattattattattgaccataaattgtgccaaaaattacattttgtgtaaaaatccctaattttatgtttttttagatgggaatttcattaataataattattagtatttaaaatttgtgacaccacacacaatatcacataatttaaaaaccacataaaataaatatatttgagtacatttaatttttctaggaacacgtttaaaaaatgattaaaagtgttattttggagtcaacatacttaacttaatgatatgtatgtgtaaaatatggtgtgtcgtaagtcacaataaatttactaatattttaattctaatactttcaattattttagtataattataagtaagggtcgatctcacgagaactgtgtttatttaattactcaagaattagcgacaaacattagaaaggggattttgaagtttagagtaaaatagcataaacaaaaaaaaaagtaaaaataaattaaaattaagaatacgatatgagaaattggttagaggttatccgtcaccctcaacaatcattcataattcttattaatgaatgtaatatcaatttccaatcaaactattaatcccgcaaataagg

SEQ ID NO: 115093 - DNA, 1896 bp, Cannabis sativa
  modified_base (333)..(337): a, c, t, g, unknown or other
aaaaaaaaaaaaaactgacaaaaaatacagtttataacaaattaaaacaaactacaaaaatatctaagtgaaactaattataaaaatgtatatttaatttaagtacatctcataagtattaattaaaataattaattacttctcttaattgtttgttatgaaaagttcaaaggaactcatctcaattctcacctgacaatgatgtcatcaatacacttctcttctctgcctcagtagagcaacacaacagtagttgaagaaataaggaaacaaaaatgtccaataattatgcacaccaaaccctagcacaaatggaagaagaagaagaagaannnnnaggaggaggaggaggagttgtacacagaagctctgataacgatgacaacagtgacctatcacacgagtgggccaccatggctcgagcttggctctgtgccttcgcccaagccaaagctgtgtccatggccgaagtcgaggcatggattgactctaatcttgattctattcctgaaggcattaaatcaatgcctcgtcctgatctctgtcaaagacttatttctattcaaaattgcataagactccccgttgctcccacccccattcaggtatctctttttctttatttcttttttgaaatttcaaatttgttgttgttattctgggaatctgattattcttaggtgaattgggttatgtgagttgtttcacttgcttcattgagacctgaaatgaagctaaatatggtaatttttgtgttcttcttcgtctagcaggaaaaagaagataatcaagctgatatcccacacgctagatttcaacgaactgatcagtggagaccagtttattcgtggctggaatctttagacaaagatgaggtggttaaatctaaagatattattgactggcttactgagaacccagaagtccaggaacagttatgctctagacattctaggtaccatttgatgcattacataaaaaagtgccatatgaagatcctcaagaggaaggataagaggaaggtgaggatagtattttcaatatagttcattatgagtgttcaatggagacttcaaattttagtttctggtgcattaaattaaatgatcactgtcttataaacttctgttatgtgtatttctttcaaactgattcttactatagtgtgtgatttttatgaacaggggagtcagcagactgataaaccagcatctcaaaaggttagtgaaaatgggcagctgaattttcagtctatagttcattagtgcaccactaaatgatcgttttcttaaaaatgtacttcttttatgtgtaaattatgaagctgctaattaaagcttgttaattctgtatgaacaggggttgcagcagtctgagaaaccagtgtctctaaaggttaacaaagatgtggtgatgaaacaaccaacccgtccagtcgtgcatctaagtatggctatctgcattgttactttaaatgttgcaggtcatgtttgaatgattattttagtaatagatattacatttaattttttccgtaacacaaaaggccatgtgcagccactggttcactttcttacacacacctctctgttaattttgggtttggagtaagattcttttgctaaaaaataaagaaattgatatgtacagtacacatatataaacattatttgtcaatgattttgtgtgttatgtgtcccacctttgattagccgtagaaactttttgcttgctgtctatctatcctttcgtaagtacagttggtttcaagtgattgtatatccccaactacaaaggtctgattgattctttatctagcctatgaactctgtgttgttgtactcaagttaaaattatagtcgtgtttatgaatacttagcagggggtacttaatta

SEQ ID NO: 115094 - DNA, 1126 bp, Cannabis sativa
ggaaagcttggttcatttctttggattttcggaagcccaaaccccctagggatttggggaggcagagtttgtcccaggcagatttggggaggcagagtttgtccaagacttcccacaaacacatatcctcttatatttctatgaccattgttgaggtagattttattgttactattaattagttatttgttattaaaatattttagttattggttattagagttataaagttattaaattattcaagttattaattatttgaagtagtttgtgttcaagatctactgctggaatcaattgtatttgacaaaattaattttcttatttttcatataaaataattattgttactatttatcaatattgttttttatagtttccaacaatgtttatttatttaattattatttggtgattcttatatttctattagtctcatagttcatattgtgaatgtctttttacaattgttatcgctatgattaatcatttacttattattatttattttagattaaataatgggattttaatatctcaattttcattgggaagctcattagcacgtagtcattgatagatgaattatgtcacatgttcatttaattttgaagcctagtatatttcacacttttttgatgcttgactgttagtggcttattagattccaagttgagattattgttatggttgtcttccatgcatgttattgtaaaatgtaaacgacttcgtatgcctaatttttatgatttcattatttcaattatgtccgatttttttttttgaacaatcaattatgttcgatttagctattaatgatatctttttgttaaaaaaaaaaaatgtttatggaaaatttatacttttaataaattgtcttatttttttatctaacaaaaatgagtggtcatatttgacaatattctatatgaaatttataacttgaagcttaattaaagatttagaccctttatttattttgtttttttcaagaaaaaaggttaggaaaggtagatagaataatgcataagagcatctccaaagaaacaccaaatttgttgtgacactatcaccaaatttagtgtcaaaaagtatttctactccaaccacaacaccaaaaattaca

SEQ ID NO: 115095 - DNA, 3324 bp, Cannabis sativa
  modified_base (547)..(547): a, c, t, g, unknown or other
  modified_base (974)..(975): a, c, t, g, unknown or other
  modified_base (3281)..(3290): a, c, t, g, unknown or other
tatgaggtggtaattacatatgaattcataatatcttgtttggcaaaatagttagtaattatatggataaataagattttttagtagctaatgtttaatatggaaagtttttaataattacacattgtaattacatctaattctcatgggggtcatgagaattggagagtgtaattcgaacccctcaattacttccaattacacagttacagtgtaattacatggttagacaaacatgccaaattatgtaattacctccaattaaatacaaatctaattacattgtggctttccaaacgcaccctaataaaacagatatcttttcattagtaatcatatcttttggttattttcctctaaaaataagcaatcgcaatattaatcgaaccagaaacaaacatatatcaatatacacatataaatgattaaccagaaatatatatattaatatatataaatggttgcaaataattaatttcatagaagaccaataataccatacattcttaagaattaattcagagatgctcttgataccacatgttangaacactgtaaaacttaatttagccataattaattcatgagaattaaacaatagaataatagaatagcagaagcataccgaagtccatagaatcgattttgaatggtataatcttccaatttttgcatcaaagttttctctctagatcctgagttttcttgatgatggggattcaagaaaaaagacacgatatgtgaagcaatgcaaaaatggggaccaatacctgtttattaataactgaaaaaacattaattaattctttttgactatttctaatttggcccctcatcaaactagaaattgtccttatggcatccacttattaaaatcatgacaatcatgcccttaagtcataaactttatttcaaaatagaccacataaatttgacttatttatttgatgacacaacacacattttatatatannattgtgaccccaataaatttctaacactttgtagattcaagatgagttggtttgaagatcatttcttatttgaagtggtttttgttcttttcgaagtctccttagtggaacccgaggcttcatttgttgaagtttctcactttttggatctcttattgataagagtaaggctattgagcatgtcttgcagatcaaggtctatatctgcgagaagagaaataaatcaacacttatccaaaataaacaatgaaaaggtagggaataaactcccacttagagaaatttactatagttatcaagcgatgaggaagaaggactataataactactaaactccctagagcctgtgatcgtatatatgtcataagggtttattggagataaatcccaatctgaatccagatggctcgccctatccaaattattaccacattgcttggcaattccgaagtagaaactattgcgactaagttggacatgaaacttaggataccaactatcaaatcaatttggtatgcgatctatatataaatcatcccaagtataaaacttatactgtctatccttgaaagtgactatcgaagtacactcagtcctaagtattattacctcgggatgctcgtctttaacttcccgaggggctactttattgaggaagtggatgctagccacataatctctatcttcctcatcgggtggaattgggacttgctgccacttagaaaattttagattcttatagttgcaggtggattgctcggtatcgagaagattgaggtttatgacgttcaaccatctccggagtaagaattagtcttctcgtgattgttatcaacacaataagcaaaataaataaatgttgcgttgatgggggaaagaccgattgtcctaaagaattcatccttgaattctgtcttattaggtaacctcacaatgatcctacaatcgtttgtgtgggtactgaggtaataaaaacctcctgacctcgcttccttgtaggacggcttttacagaataaaaatttacaatttcgaggggaatgggacacccccacctcataatttgatattagacctttaaacaagccaggattctgtaagaactcggaattaattgaaaagggacagttccgagataattacagaattctttaaagtactctctcagggggagtactgctccatccctgatgtgttggatgctccaagtacatattccagatgagccactgctactagtcctacactcttcttgaattactctttctggttggaaatagctaaattcccctaaggtgacggacctaaggcgacatcctttcttgtatttgataccacaagcctttaatatattacccacaaagggagctatagatctgactttggattcaatcaattctaccttgaaggtagttgttggatcttgaggggtctttgatttacgagcttgagtggtcatgatttaaaaatttaagtcacctagagaaaaagcaacagtgactcgaggtaaaaataaaggtcttgctaaagaatagaagataaagactggggtttgggccaagctgcgtctcacaaataacaacatttaccctcggttatttcttgcaaaaatcacctatagcgactgcaaatttcggcttgactggtttttagtaaatgatccctaattttgacatcgtttatctcaagtaaggatttagatatgtgagttttggattcaaatggaagtgctaaattttcagggcatacaatttctaggaattctggggttaaaattttagagatgaattaagtcatatttgcaaatgagaataatcctaatttttggaagaaataaattcaacctaacccagaaatctgtgaatctagtaagcctaaaaattttccttgaccctaaaattatcgagaaacacaaaacaaaaattacctaaaataaccaaacacatcaaataaatgaagcaataaattacgaagacaagactacaaaatcaaaaaagaaaaaatggtggaaacaagagaatgagtcacttactgttttgatgaagatttctgggtagtgaaaaactttacgattggggtttcaacgactgaaacgatgaattctgatattctttgagattggagaggtaatcaaatgaaatacgtaagaaataagttaaagacagtgagggcatgcaagtttaaaggaaagtgatcgcaagttgtaggggaaatttggaggtctgaaattcaaaagtggtgaaatagactgatatttttaatatttataccctattgagcaacaccgtgttggaaattattttaccnnnnnnnnnnatctactcacaagtatgttaattaacaccctaaa

SEQ ID NO: 115096 - DNA, 817 bp, Cannabis sativa
  modified_base (761)..(776): a, c, t, g, unknown or other
gccccgccccatttacatccctagggtggggtcaagtgtcgacttcctcaggtcaatctcgttagtggaagttcatgtggttaattccagcgccgcccaaagtaaaaaattctatttggaaagtagggcttaatttcttgccttgttacgccattttgtaacatcgtggtttgaatgttgtcaaagtatgtctaatatactttcaaaatattgagactactttgtatcttctatggttatattcttctcttaaaggactaagacaaaggtggatgttgaaaggtttggatgctcttaagccgacctctagtttttatgagttattagttgactatatggatatttttctacataggagatggaagaattttttgttctctgttggaggatttggcacaagaggaaaacatttgttcatcatcataagttactctctgatgatatggtgagccaatggtctttaagtttcccttggcgctatcaagatgctcagggttcttcttctaagacggtaatgccaaattattcaaggttgattggcctatctaatactaatgggaaatgtaaacctatttgttgacactggtattaataccgatgactcgatgattggtcttggggctttggtgatgagtcggtcaagtaaggttttctacttaggggcggtgccagtaatggtagcctatgaacctcatgtggcagaggtagtagctttgttgcaagggttgattctgttggaattatatttatccaggatcttnnnnnnnnnnnnnnnnatgttgatttaacaacctaatattgaacttctaaaacgatg

SEQ ID NO: 115097 - DNA, 2389 bp, Cannabis sativa
aaataaactatataattagtaagatgactcttgccatcggttagtaataattcataaaaattattatattaaaataaataaaatcctataaattaacaacaatagaaacggtgcctttattatttctcaaaattatattgtattaatgagagacttaccagaatacgaatatccctttaacgtgtagggtctctgagtggtccacgagttaatgggcaagatctcctcgtggcacggcgttgttatcactgagtttatgttcaactcgtttattatatgttcgggcttgtaccaccatgctgcaaaaatattgtaaacaaatgatattttatttatttatttattgtaactacttgactgaaaagtcccggaacatgaagcattaattgcccaaaataattttatttttgttatgttttttttttatatatatatatatatatatataagagaaacaaagaatctagtgaaatatcaaagagaaattaactatctattattgtgtattcttttaaagcacttttactttaaagggaaatataactaggttagttatatatatttttcttgttttttaagaactaaaaaaataatgtaaaaatcctttcaaaaaaaataaaataataaataaagtcaaaatgaaaaactcacattctgcgttagcgagctcagcatcaacatgagaaggaagaactctattatccttgaaatggtagtggttgtcagattctggagtagtaacaataatcctcttgagccattttaccatacggcccccaataaaaccaggtataatcatcctcaccggaaaaccgtggtccggagccaaaagctcaccgttctgcatgtaagccagtattatatctctagaagggtccatggccatctctttctttatactcgtaccgtacttggagccaccaccgccgggaaggtcctccgcaccctcgaagcacacgttgagggccccattcttacgggtcatgataccacaccgcttcaacaaagcgcgtagcggcacgccccgccaaacagaggtcgagatgccagccgccccccagttgaatccaattgtctgctttacaaggttctgctcctttcggcggttcccggcacagaccagggaagcaccgaattcccgactagggaactcgttgaccagttggtccatggtgaaacgggtcggcctcttgaccaaccctgtcacctcgacggaccagtcggcccagttggccttgggtacggccccgtggttacggacgtagtggagcgggactggggtaatgaaaccgtagtgcatgagtcgggtcaggggtggctcagagttgaaagggtgcttccccgtgagacggaccatgctggggttgcgatcgatccagctgtcagacgtaccatcatctctgggatcattgatcgacggctccacttcgttcttgcccctaacgatcaaatcctggtactccttttgggtttcgctctcgtcctcctcatcactggacgaatcgtctattgccacgtgtttctttggaaagttggtatgtacggtgtacccgcgaaccggggagtcggacctgtggctaggtccggacttgaacgaccgaacgacgccgttcctggcgggttcgaggtgagtatactgacgattttccactgacgccgccatgatgaatgaaaaatcacctaaaagacttcaaataagaagaaagagatgtaaattgaattaccaatattgacttatttctctctcttttcgttttttcctcttctttttccctttcaaaagagatagggagatgttatgtatctgtttatggttatctgggttcagtggagagagtgagacggatgtacaaggtcttatataggcctgcaaaggaggagtggagtgctcctgggacccacttgattttgtgttgattttaatttttttctttaatattatttctatttttttctattgttattattttgtctattattagagagttttagtgaagagaaaaatacttgtcacgtaacataatccatcagcctcatggatgagttcagaagagagagcaatccagctggtttcgagttgtcggcgcagcatttgagccgtggcttcaagtggtcaatgtggcttcacaacccaatccaatcaactggctagagccacacaaatgttacacggtccatctaaactagatctctaccaccaccaccacttgttattaatttttgttcttttgtgttttatgaattatttctcttctctttttcactcgttattgataattataatttatatatttatttttcccggtctaggacattatgataataaattttttatcacattaggatagtgctaaaggagaaatacaatatctcaaaaaaaaaaaaaaaa

SEQ ID NO: 115098 - DNA, 1770 bp, Cannabis sativa
aaaacgtaatggtgggagttgaaaaaaaaaattgaagaacaaaaagaagaggaaaaatgaagttgggattgtggagatgaaagtgttcagctatggaggttactattttttttaaaaaaaaaaactgaaaagaaatggaaaataaaaggaaaaagaagagaaaagagagagaaatgatgtatagagcgattgatgtaatacatcaatcactgacgtgtcaaaaaggttgaattgtgtgtgcatgtggtaaaatagtaataaaatatagaagatgagtaaaaaagttagtttagccgtgtataggtatttatgtaataaatttatcattttggatttttggtgtaaaaatttcttattatttttgtccctatgatatgaaagttttcgtagccatatataatagatctgatatagatttaatggtcataaataaatagatgtacgataataattaatatttgggttgcattagattatttattatatttttaataataatttttttaaaatatttatttataaaataattaaatattatttattttctctttcttttctcatttcctctgattatttgtttactttttttttaagcttaaaccatgagtttctaattttttttttttttttgataaaaaccctgaaactttcattaagatgaaacatttagtgcaaactaatcaagataagcaggaaggtagagaaccattcaagatatactcattgtctaatcctaatcgcaccctaccatagttatgtgtaattctattactttctctagggacaaacaccactgaaagaccaggattaaacaacaatgagttacaaatactagtaataagatcacttagaatagaattattacaatacgcactataaaccttatctactatgcttttacaatctgtttcaatgatataaacaggtagcttaaccgcttgaatctaatgtagagcaaaaaagaatagcctttgcctcagcaacctctagagaaacattaccaaagataggagtaatcacacctgctctcaatgtaccacaaccagcccttgccactatccctaaactatgtttcctcaaagccctgtccaaggcagcatcagtgttaactttcatcatgccttgaacaaattaagcaggctaccgagtatcaccctaattatgttgcctttgtttaattgccacctgctgagctttctcaaattcctgtaaataagtggctgcatgatcataaagaagcacaggagtcaaacacgtcctgttatggaaaatattatttctctaattccaaagcatccataagaaacaaaagaaaatagccaaggtatacttgtcaaaactttcaaaagctttagtgatattagcattgatactaagtaatttatttgcaacataataattgtaaaaaagtgagtgcttccaagcaatttttgctctagaacattcaaggaaagcatgtgtcacaattttaaattaacatgacaaagtagacaaatgggagaaggaattatatgcctggaagagagtttaacatctacaggtacaaaattagaaagcacacgccaaactgaatgcttcactttagggggtgcaaaagaagaccaaagcttagaccaaaaatgtgtattatcactgaaagagatgaagagggaatatctctagagctcacaacaagaagataaatagtttttgttgggaatattttacaggatctagatttactaacaagtagggttgtacatcgatcggtttagtcggtttatactacat

SEQ ID NO: 115099 - DNA, 4499 bp, Cannabis sativa
  modified_base (4376)..(4384): a, c, t, g, unknown or other
gtttaattttaaatatattttttattattttattttatttaaaataccgaaaaatttaaataaaataatgccttgcaatacacgtagctatcatccgcgaagagcatatgggaaactcttggagcacctctagcaactttacacccagttaaccaatgatgcctctcatactttctcaaaagagccgaaaagccctcagcacaaataaggaacaaatatggtgataattgatctccttgacgcaagtctctaccgggacaaataagacccatagagtgacccccatgagtgacactataagttacagtagaaacacagaacataatcaactccactatccttctatcaaaccccatccgaagcaagagagtctcaataaattcccattccacacgatcataggctttactcatatcgagtttgaccgccataaagccctccttcccaatcctctttcgtttcaagtaatgcattatttcaaaagacaccattacattatctgatatcaatcatcccggaataaaagcactttgattatccgaaataacattaggcaattctccttttaaccgattagccaacaccttagatatgatcttataaagcacattgcataaggagatagggcgaagatcagtcattacctcaggttgtttcttctttgggattaacactatgtttgtgtgatttaattccttcagaaagataccactcgtgaaaaactgcttgacaaaagtcacaatgtcatggctcaccatactccaacatttctggtagaatcccagagtcatgccatctgtggctgggggatttatctggatgcatatgaaagagtgctcttttgatttcctcatccaaaaccggttcaagaagcttactgttttgatcaaccgtgactgtactaggaacacaatcaaccacttcagcaaaattaacagctgaaggagtgaataaatcagtaaaataatcaaccacaacttgcgagagtcctccttaccaatcaacccactcacccgtagcaattctcagtctttgtattgcatttcgacgtctcctagctgtggcagtagcatgaaaatactttgaattattatctccttcacgaagccaaagttgtttactcctttgcttccaaaaaacttccttttgcagcagaatattgttcaatttattaacagcctgctgatacttcccaaccgaacccacatcacacccttttttccattgacaaatctctttcttacactcctttatacgccgagaaaaatcaccagaataatccttcccccatatcttaagagtctccccacaagcctttaatttctgaagaacaccttcactatgatacaacgaccagctatcagcaataatcttcaaacaaataggctcttttaaccaagagttttcaaaacgaaaattctgatttcttgcaacaacaacttgattaacagggagtaattgtatagggcaatggtcagatgttgaagcttctaaattcaaaagcttagccgaagggaaaagatctaaccatgattgactcgccaaagctcgatcaatgcgcacctccacccagtccgtagtgccacgacaaacgctcccaggtgtatggatgtccgaagagttccaagtcatgaagcccacattcaatcaaaacatcattaaacccctcaatcagccagtctgggtaaggattgttaccacgtttatcctcacttgaagtgatattgttgaggtcaccgatgatacaccaaggcaagctttgtttagtgttcagcacagttaataactcccaagtttttctccttaagtgtctttttggctctccatataatcctgttaatctccaatgaccataaaccccatcagtaataataacatcaatgtaatctctaccatactcaagcacccgaaccttctcctcaaatctctagaacaaagcaacaccaccactttttcccaaagggtcgacagatatagctccatcaaaaccaatagagaccctcactttctcaataatatcttttcgggctatagtttcacataagaacaagaaattgggtttcttttagatcacaagatcctttatgaattgatgagcccatgggttcccaagcccatggcaattccaagagataatgctcatgatgatgggtgggcctgaaaaccaaggcccaccttcaaaacgttttttgatccatctaaattttcattcagttggcccatattgacaccaggtacttcagattcagcataggccttctccatttcagttcgtctacacttattctccataatcaatagcaaatcttcttcattcaatactgccttggtcaaatttcctccattactgctatcaccagaatactcattattagtgccatctttgcccattaagacacttttatttttccctacaatcatggactcacggtcctcacgcacatcaacactgtcaatctccatgattttcggctgcataattgcaccatcttcagcctcactccgacgagcaaccccgcccccacctaccatctcctccgtctccatacccgaacaaagccactgtgctccaattaagtagttcttcttccttgtttgagcccgcattccattcccatacggctttacaatttgatcaagaggttgatcaaacgttttcagacaaaatctctcggaatgtccaatgattccgcaaacaaaacagaaagttggaacatgttcatatttgaaattcgcccaaatccagtctccatcctccttacatagtttcatatgacgttttagtggtttctctatgtttatcgaagcacgaacacgcaaatagtccctccatagaccattaaagttcttcagatctgctttaataaacttaccaacataagccccagcacttctcaccactcggtcaagcatatatcccgtcttcaaatcatgtatttgaacccacatatcaagggtgtacaatggtaccttcttaggatcctcccccctcttcaatctctgaaaaataagagggcacttgttgaacgtccatggactaccatcaataacagattaaacatccaactcgtgatagaattggaatagatacttatttgtatctaattccttaataaaaactcccttcccaggctgccatagagaggccgtcatatgcctcatagcatcaaagtccaacgttctccccgtcaaaaactttcctcctaagcaccaccggtcatcaaacaccacctcaggaaggtattatttagatacgtgtagtttgtttaaatttgaatcttaatgtttgaaaaaagataacactttctcttttataaccacatttaatataagaaagataaaaaaaaaatataattagtgagattataatttataatttgctataaatattaaagtaattaaatatacgtgacaatagtaaagaatactaattatcacattaagtacgaaattatcagactatctttaatgagtggtgtaaaatttgtgctaaagttggcccaaaaaatgagtcaatgttatatttggtcgaaattttactattgtgttccaatgcatcagagtaaattaactttatttttaaagtaaattgtggcaaaactctcaatactttcacatcgctagtatttagctccccaaatctaaattttaacgacaatatttctaaaaccacaatatctttaacaatttacagtttctatccaaatttggttgttaactatcatgttgaattgttcacatggacacagtgtacacacatcacaattttattggtccatataaataattttatattattttttgaaaaaaaataaaaaatcatacaaataaataattatattttttccttctaacatatcatattttcccttcaatttttcttcagttttcattctttttcttcttcagtctttagtgtcactaccaccaccatccatagcaaccgaaacaaccacccaccactaataaatcaccatcgaaaccaccaccatatccaatttttcaatccaaatcacacacaaaaaaattacacacaactcaaatcaaatttaaacaaattcaaatttaaatccaacaaacacacatgtatatgcacgaaaatttcagtcccaaaacctaaatttaaaacctaaactttttttttcccacaaccattatcttttctcatatctaaatccaaagaaaataaaaatatcctaataggattatttatacaaaaatatcaacaaaaaagaatccaagaaaatctaaaaaaaaccttcattgtctggcttttctcgattactggttttgaaaactctaaattgggactaaaagagagataggagattggaaagatagagagatggacaaatcaagagagagagagagagagnnnnnnnnngagagagagagagagaaatgtgaacggaattgtgagagatataggagattgggcctgtgatcaatcaggattggaagagaagaggagatccgggctgagagagagagagagagag

SEQ ID NO: 115100 - DNA, 4504 bp, Cannabis sativa
  modified_base (1201)..(1216): a, c, t, g, unknown or other
aagcacgcttaactgtggagttcattcgtgataggctaccgaaaaacaagaagcaccttgttgacgtagtaccaatcaatccatttaagccatctttaattgtgcggtcccatacttacatagtctcagaatcatcccacttgacctttcccaggtggtgtgggattgcacaacttacttggtatttctccttacggatcaggagactactgactgtcacaatcatccgggggaaataccgtgatccgtaaggggaaataccgggtaatcccatgatccgtaaggggaaggtcaagtgaaattacacaacttacccgacatttcccctacattatctttttcaaataatttgtcgcactcgtatctttttcattttatacgcatgtgaattagactgtgtgaacattaattactttcaatattgtaaattattcaaaattttgtaaaatatcttaaataataacaaccagtaacagtcctaaaattttactttgtggaggcttatttatcattaaaaaaatattcatacctacattataacactcttactagatttatttgatttgtggaaatttttctactattttgatctataattatcaaataaaaaaattacatttaatttttaaaagacaatatttttgttagtggaactatagccccaagttacacgaccataaaaagatttgaactaattttttttcctaaatatcaaaacagtaagggttcatcagtatatccaaaagtataccataaaagctttcacattatataaatatatatatatatatatatataactaagtgtgaatcctataaactataatatttttcaaaacaaaattttaatttataattatgtcttataaattaatgtattacttcttttatttatattagtggagtaagcaaactaaagcattcttaagttaatattagtgtacaaacaattttttcccctttcacaaattacaagtaaatttgatataattaaactgagtttctcagcattttattaaagcacaactcacatcaatttcattttaattcttgattcatatatgatattttcttctatgaacatgtcctgtatattaaaaaggttaattaggatttttgtcccttaaattttaatatgtaccaaattatatctctaaatttttctaaccgttaaaaattccccctaaactattgagattatnnnnnnnnnnnnnnnntgtctaatttcattcaattttacgatttcaatgattgtttatgtacaaaccatgctccttagactttgatatctatcaaatcatgtccctcgaactttgacatatactaaatcatgtctcctaaacttttacccatgttagactttctatactaaaattgggcaaaagttcttaaattcaacaattgcaatagtttagggggtatttttaacgaccttaaaagtccagagaacatgatttgatatatgtcaaagttcagggagttaaaatcctaattagcttattaaaaataaagttttagggtacactggtgtgattatccatattggcctcctccttactatttggttttagcttcgtctctggttgaagatatatatactcaaatttaatttttgatggtaataatatttaaattaggtttataaaattttcataagtatctaaccattaagtatcaagttattatccaagtgtcatttttattagtatattttaattaaattttaaataaaaaataaaaatttaataactaaaaccaatcagtaaatgtcacctattaacttgacacttaacaaataagtatttatttacagtcggagtgaaacttaaatatttatggttcaaattacttttatttttaaacaactaataagttattgctataattatactgtaccatgaattaccaaatcttgtgctaattttattattagtcttttagtgcatattgtatgcttgtccttaaattttatgtaatgttgtagcagatgatttttggtttaacgaaatctttcttccaaacaaaaataaaactttcttttaccaatattacaagatacaacacacacacacattccttaaaacatttgaagaggggtaaggaagattatgttgtcataaagcttgatatgagtaaagcctttaatagagttgaatcacattttattcaaagtatgatgactaatatgggttttgattcagcagttttagacctcattattcggtacatcaacagtgttacttacttattttcaattaatggttccatttaaggtcaagttactcctacctgtgatattcgccaaggtaatctgttgtccccttttctctttatcatctgcgctgaaggtctctctagattatttcagcatgaagaacaacgtggtaaccttcatggtcttcgaattgctcgcggagctcctatggtctctcatttatttttagcaaatgacaatcttgttctttgccgtgcaaatagaaggtcagctatggctatcaaacgttcccttgactactaatgtcgtgcgtcaggacagagcctaaatgatgagaagtcagtcttctctttctctcctaatacagtacctgccatccaaaccagtctacaacaaatcttgcaaatgactattaagacttgtcatgaaagatacttggggtcaccctcttacttgggcagggataagaaagtattatttggtgaaatcaaagaaaaattatggaatctcctttcaccttggcaagaaaaattattttcgattggtggcagagaaatactcctcaaagcggttgctcaatccataccaacttatgccatgagttgctttcggctttctaaatctcttattaaccaaatagagattatgtgcaataaattctggtggggatctaactcatcgccatctggaattaactaaaaagcctggaaagcacttactcaatcgaaagttgaaggaggaatgggtttcaaaagtttcgtccattatttcaatcaagcacttttggcgaagcaaacatggcttattttctccaatccaaactctcttcttagccgaatactcaagccaacgtacttcaagcattcttattttttaaatgcagacttgggttcttacccatccttaacttggagaggtattgtttggggaaaaaattgctatcaaaaggtcttcgatgaaaagttagtaatggtgctaatatcctttgtgcatcggacccttggctgccaggaatcacatcctttaaaccactggtgtttaggggtcatgacttgactatgaaagtatcaaatctcattttagattctcgccaatgggattatgaacaacttgtcaatttgtatcttacttcggatgttgcttaaattcaaagcatatcgttaacactatttgaacaataagacattttaatgtagcatcacaaatcgaatggtgtttatactgttaaatcaggttattccctagcaactaaacttgaagaacaccagcctactgtaaccgatatccaatctctacaatgatggaaaaaaatttgggcattgaaaatccctttaaaaatccatatttttttaggcgggctatccatggttgtcttcctgtcgctaatattcttcacactcaacacatttaagattcaacctcatgttctttatgtaagagagccaatgaaacaattactcacactctcttttactgtaagcgtgctagacatgtgtggcattgctttgcttttgagatacaagagttgctctcacaccacatgaatttaaagaaatttctacttcaagtctccactatatggtcatctttaaaatttgagcaatttgctacaattatttggagtatttggatgaaaggaataaagagaaacatggtaccaaacctaagccccatgatgttcttctatattatgcactcttttacctggaagaatatcatgcagctagagaaaaattgtttgttgttacctctgcatcagtagcagctttaagtacaacagcctcacgtgaagctcactagatgaacccctttcaggacgcctgaagctaaacacggatgcagctgttgatacaatgaatcaagtttctggttttggagcagttctacggaatagtacaggacaaattgtaactgctatgtctactccttttcgtggatgtttcgccagatattatggaagctttagctcttatgcatagtctacaatggctcaaagaccttcaactaccagtgcatttcatcaaaacggattctatcttagtagttaaaagattacattcatctaaactctgattttcattgtttgttaaacaacatttctcttttagttttcaattttcctagagctcaattctctcatgtgaatagatctgctaataatgctgctcatttgttggcaaggtttgctctttctgtggaagctaaatgttcatgaatggaggaaatgcctcttccaatgccaattgtgacattttgttttaatataatagtattttctcagaaaacagaa

SEQ ID NO: 115101 - DNA, 2716 bp, Cannabis sativa
atcattcatcaccacacacacacaatgacccattttaaaatgaaaaaatataaaaaattaaacctaattttttaattagtcggactactctagtctctacattaatttcataacttaaaaaaacttataccttacttagatcctataatgtcattttattcattaaaataatgcatgctccccacctatcaaaatggtaaggaccgttttaaagtgtgaagctgtaaaaaatggttatgggatcaatttaatattggtctctcttatactatcacttattagtaatttacaaattgtgaaagtttataaatatataattatgtaacctgagatatatggattgaaaaaataaaacttgttcaatttcggaaatttgtcctaatatcaaattctgagattgaggtggttacttaattactagtcattaacatttataattattaaattaaaataaataaagcttaacaaaaattaaaatgtataaaacttatattaaattttattatgacaccaacaatggctttggacacttttggcacccattaattcttaaaataaagaaaaagaaagaaagagcccatgtgtaaaacaaactcggcatatttttaaggaaaaagaaagaggataatactatcaataaatggaaaaaactgttccttaaactttcatgccaagaaaaaaaaaaactgttccttaaactatatttacaagattttgttttcgcctagtgtagtgtgtttacatgaattagtgggcctcaccctgtccctttctgtgcttttggactatgtttctcttcatactataaaaactatgtttgttatcgggaagtttttctacacccttgtacctgaatcaatcccttcgaaagtgtccaaaatagaagcaacctttttgtcttgaatgaaaattgctagacatacatggatttcatatgtgtggggcatatacccaattaagcttttttttttttttttttctttttaataattcataccaatattcatattgtcatcatatggaaatcttgactttccttatttgtaatttttgctctaacatatacataggttgattggaagaatattgtgtgaccatgtgtgatatttcataaacaggttgaagaagaggaagaaaaggcagtaataggattttggagtgcatttagttggttggttggtatgacagttatcatagccgtgttatctgaatatgttgtgggtactattgaggtaaatatattgaagcctttattttaagacttaattaataccatgtttattcattataaaattttgattgatcatatatatataattgctcaattaggctgcatcaaattcctggggcatctctgttagctttataagtatcattttgctacccattgttggaaatgcagcagaacacgctggctcaatcatttttgctctgaaaaacaagttggtacgtgacaaccacacattttagatttttttttctttttttaattttggctttaattatgtaatttggctttcataaacacaggatatatctttaggtgttgctttggggtctgcaactcaaatttctatgtttgtggtatgtttatatatatttatattaaagtcatttaatccaatcaaagatgttcattatagatcctatattatacttatctctataccaatttcaggttcctttgagtgtgattgttgcttggattatggacattcgtatggaccttgatttcaacatactcgaaactagctctctagcatttacaataatcataacagctttcactttacaggtttctttactttcttgaaactaataatatatgtagtgtaaacattaatttatatacatatatattaaaaaaaattaattaattttgtaggatggaacttcacattacatgaaaggagttattctcttcctatgctacataatcattgctgcatgcttttttgttcagaaaactcccttgagtaagtgcatatcttctatatgagtagtgatatatagaaacctatattacattatattattatgaaaaaacactgatcacacattttggtgtatatggatttttcatgatcctatagacaatgcagcattattcaactttggaccagagcttacaccatcctcctctggagtcttgactgcttgaccctatgctatatgtgcacaaagggaataatattattcccaaataaaacagaacattactgctgcaaaccaagttctatttcttatttaattcaaccattttccaaagaaaaagttgttcacttttaattttgtgctctcaaaattattcctaccccaaaagaggcctgagtaccaaaatcatgttcgataaatatgtaactttaaggtgggagcattgcaacagagcaaagaattttatcaactcggagggaaaaagaagtgtgtatacacaaactggcaacccctgctcttttcttatttatttatatatgcatgtaccctaataaggttttgttattcaagaaattttccctccattcaatccatattcctttcacttgtaatttaatttaataagttaatgtgttgatgaagcagagaagaatgtccattctagcttccttttatgtaataatattcactataataataaaagaaaactttggactcaaggaagtctagagtattaaagtatgtttggtattattttctgtttttttgtttttaaaaaatt

SEQ ID NO: 115102 - DNA, 1739 bp, Cannabis sativa
ttttcatgtcgtttctgtaaaacattgccgttttcttgatctgatatcgttttatgaaaatattattgtcttactgaaataatgtggtttgcatgagatgttgtcgttttcatgtcgtttcagcaaaacattgtcgttttcttgacctgacgtcgttttacgaaaatattgtcgttttacggaaataatgtcgttttctcgagatgtagtcgttttcttgatctgatgtcgttttcctaagcaaaagaagaaaaactaaaacggttattaatggccgtactgtactggtgttgacaagttcttcaaacccaaagttgtgaacagtacagataaaaaggaaaactgataagagaatcagagatgcttcttgcttcttcaatggccttcaaagtggcataatcacacaacttcaaacttcaatatcctttgtggtcacagaatctacaaaagagaaaactcatcaggtaataataatataagtcaaacaacaatgatacatagtgctaaataatattattctccacaaaagtttacatctttgcttaaattttccgcagcatctcactcaaattagatttcaataccataatcttgtagtgggcacttattatatttgtgtataaatataatttccttaattgggtttttattggattaattgcttgaagaacctctggttttcatttttcataatttttgagattcagaatcaaggttaggtgttgttatgtcttttaatggcttactggtccagaaactcaagtgggtttttgtataaatagcttttgattggacaatttagtgccttttcttttcacatggtcaaagttgctttgaatctattcgatgagatgaaatgtctgaatggaaaagcttgttcttttttatgcaaagaaccccttttgtctgtgtggttggttatctatatttcaatatgagtaaatattatagttttgactaaatttgggtactgattttgtgttgtctgatcaatttaaagagagagagagagagatgaaagcaaaggtggatgatgatgatgatgatgaacaacctgttttggcaaatgagaattcttcttccaattttcatgataatccaatgtctgtagattcattcattgatgatttgtggaagaatgccaggacatgtactcacactcacacttgtaatccacctggtcctgactcagctcacacacatacttgttaccatactcacactcaagttcttgcatctgaagaagatgatgatcatacaatcaagaaatcaagaaagtcttcaggcaaccgagaagctgttcgaaagtatagggagaaaaagaaggctcatgctgcttatttagaggaggaagttaagaaattgcgaatggtaaaccaacaattagttaagaaattgcagaggcagacagttcttgaagccgaagtcatgcggttgagaagtattttgattgatcttagaggaaagatcgatagcgaattgggttctttcccctttcaaaagttatgtaacaccactagtttctttaaggaaggtgattgtggtgagctgcagccttctaatggagtactcggcctacaatgtgagaccgattcgccatgttttcattcacatgttggatcttcctctcaggttaataatgctattgtgaataattgtcaaatggttgcaccatggaaagagaattgtcaagccaatataaatgagatttctatttctagtgctgatacacaagccat

SEQ ID NO: 115103 - DNA, 2665 bp, Cannabis sativa
tataagctctctctactttatatgaagcaagcaattttccatttaatttgctccagatacgcctgcttgggcagaagccttttctcaaagactcctccataacaagtgcagcattttcgagctgcccaatgttgcaaagtccactaataacatactcatacacttccatatctgaagaataaccgcattcttgcatgtcgttccataagcttaacatcattccacatttaccgaatctagaaagccgcataagcaatagcttgaaagcacttaaagagattctacagccaaccctctttgctttcctatacacgagcataacagcatgaggaggaccaaaactacacaaaggttccataaatgaagttatagtccctgtactgggaataattcctctactcaacattcgatcaaaaacctcaagtgcatcagctactttccgggctttcagaagaccaccaattaatttggtgtaagtatcaacatttggttcacagttacttctcaacataaagttataatacttcatatattcatcaaaattcccagaagatataaaattagaaatcatagcattgtaagcactagtgtctgggatcaaacatttctcttccatgctctgaaaaactttaactgcatcatcaatttgaccagctctcccaaaaccctcaataatataactaaacgtcaaactatcaggatcatttccatttgcaaccatcatttccaaaatcttctccatttcaccaactctaccaaattttgaccacccatttagaacaacattataagtagtaccatcaaacagtattttcccctttaatgaattaagtagagaatttgcagtaccaacataggatcgacgacatagacattgaagaagcacattcaaagtctctgtaccacattctaacccgatttcatccaaattccgaaacatttggattgctttggatacttgtctagccctaatgaaactgtccattacaatagaaacggtctccaagtttggactaaccccttgagtctttaactcatgtaaaacttcaaccataaaactaagaaattttcttctgcctaatgccttaaggattatatgataagtttgaatatttttgggaatggttggctgtcgaatagcccaattgaaaaacaagaccattttcctaccatctaagctgcctcgatttactactttcgcaacaatatcaagatccaaatccacacaaacactcgttaaagcactctctatagcagccttccctctcatattctgaagaaaaataccacgcagtttctcttcaggcaatagaaacccatcaactgctctaacgatctctttttttccctccgacttcgaagctaaagtattacttggtacgggaaatagatcagagagttggtcaagaacaaagctttcatctaaatgaggttggtttttgatatggtacccctcgtccaaaatagatgattgatcatctaagcttgaaaatggaaccggtgaacggaggtaggggaaaaagaacctggttttggtaatgtgagtggaataccctatggagtgctgcgcctgaaaccccaatacgcgccatgaagcacagagaaacgccatgaagttctgaaccaacaagaaatagagtttgaagtttgttcactatcattatttgtattctattcttcaaaataaaaatacaacaccaaaacccaatcttctttattttatctcaaactcttaaaatacatcatatataattttttctattataaagctacagaagtaatacactttaataatttttttacaattctctactctaaaataaataaaaagcacaattcggctaaatttctattttgctaatagctagaagtataaaatgaatataaattttaatttatttttaatatttggataactattatatcgatatttctttttttaagaaaaatatttttcaaaattttttgacatcattaaaaaaaaatcttttcggagtaaattagaaattatataaattattttaattttaaaaatagcttctcaaagtttttttttttagaaaaagctacaaatccttgcttcttccaaaaaaaaacttttgattttttatccaaacacctttagaatgacttttttcaattctaaaagctaaaaaagaacttatagaagctaagccaaacatggcaacatctaaccatgctctctaaacacactccttcgctaaaataaggagtgagatttcaaaaaatgaactccaaccattcaaaaaatgtctctataatagagaatggataagtagctctcaaaatgtcacgagctcatttcttttttggtaaacttttttaatagtattttaataaaaaaaaacaatattactttttcattatttataaaattaatttatatttaacaaattcaaattacaaaagattatttgttatcccagtttcatctactatattactaataggttgtacttcagttgcagttgatggcacaaaatcaacatcatcctcaaaattagaatcgatttgaccggacattctattttaatctacattaacaccatattctcatatttatcaattaatgcatgcaactgtttaaaaaatatgataaacatatctacgaaaaattagatagcattttccctattttattaac

SEQ ID NO: 115104 - DNA, 3537 bp, Cannabis sativa
ttatttattaacgggatatctattaacgggatatcaaatgtaatggttaaatttaacagaatattcttttattttttttaagtatattttgttataataaattgaattttttatttgaaatcttgaattataatgtttttaatatatataaagtgtgactacctatattttaagggaaatggttagtttaatggatttttaatacttttttttcattaatgttaacagtcgaaatttaaactgttacaaaaagtaaaattaattttttaaataaaactaacgaaacctcaattgtatatttgtgttatttatagggacgtggccacgtgggtatatattctttatttttttaaaaaaaaaaagtaagagcaaaattagaaaattcactttaaatgacagaatctatgtgcagctaaaatatggcttaaccatgtaatactggctataatttcttgatatgattctttacaatttttcctttttcattcaaattaacaaaaagaaaaagaaaaaccaaattatcaaagagacagacctaacattcaaggacagattataaaatataaagtaagagtggtagctgctttcattgttcataatggctgatgttaattcttggccattcatttaattgattaaaaatattgttgatattttattttacatcatgtaatgcttggttgtacagcgttcatgtcgacccattctatgaaatatcaccaaagtacatagctgatctgataggatgatattagtatacacttcagtactactgtatttgttttgaccattaatgagaaacaatcaaaggaacgccttagactcttgctccacacaataattcagtccaattaagcctctctcgctatatatatatatatatatatatattcacctaaagtcgtcattttgttttttatctgctcagtttatctatttcttttgcaacagtactagtttggaacggccccaaagacgtacccgtattatatataatacaaacaaataactaaatattttattattattagaagtaatagatatttttcattactctctctatctctagctagctagctagccagttagcactctctgttgagatatttcaatctatgtagctctacttgtacagtttctgtgactctttatttcctgtcgaaccgtctcatgtgaaaccgagtttgctgaggcttaagaaaactgagtactataaatgagacatcatgacccataagtgggtctcctcttcataaggtccacttacataataaatatttgtatatatagagtttcctttattatcaaggtatcatgaaggtgactcacatggttacttgagcttcatatccctgaacattttttaattgtcatccaacttacaagcaacgtctttttgtagtgagtgtaacatccaacacaatcacatgcaatataatagcattatcacgtgtctctttgcatgtcccttcgatatatctttgatttttggatcactaatcgtttgtatagtttattaattagcatcttcaaaaaccttattaattagttcatttaaagcacatgcgtgatctttttttgcattgttaagataaatgaatttaatttactcacgaatgtgtagacattaatttaattaaattaattcatgttattatagcaacatagcttgctgcactttgtctttgttgaccttgctttttacgaacgatattgactttttaaagcgataaaattaaatgatctacttataaaattattaaaataataaaacaataacaacacaagtattactctcttttctgttgtattactaatgagagagcaaaagtcccgagaggtgaggttcttgatattctccagaaagctacaagtattttagtagcgtaataacttttagaaagttggtgttgacttgagatttagccaactgacaacggagccttattaattgttgataatcaccaagtgtaaataagaataaaaaatagtaaaaataacacaggaatttatagaggttcgacccccttgtggaacgaataatgactacctactcctcttttagttgtattcactcttgagatgataccatacaaatcacatgttaaaacttaatgatttctatctatgactttcttcaatattacaattgtgagaacaatgtgttacagataaagaactggtgagatcttatgaagaacttatgaagaaacttgacctaatgtctaggaggcattaagaggcatgtgaggtttgaaagagagagaaatataagtgtgtcatacttagaattggagtcttttttcatgtgatctaatgccttttaaatagtgtagggcctcctttgtcggacagacctcgttggtcgaacaaccttccttggtcagataaccttccttggtcggacaaccttccttggtcggacaaccttccttggccatatagccttccttggtcgaatagctttcctggttggatagccttccttggtcggccatcctacctttgttggcaagccttccttggtcggacaactttccttggcaggctagtgtctaatgacttgcaatgttcttaacttggaagcgtcacggaatgtatgggatgttgttgataggttgtattctacatgtcttctgttttgactatgtatacatgccacgttggatgggcaaaaaataggataacatttgccacccaagtccctgttgcgacgtctatacggataaaggctttttagctcttattttgactataggagcctttaccgggcagccttgtctcgctagctattggactcttcagatgacttatttttatgagaaataatgactttatttccaatcattatataagggttttcccatatgtgaacttctaattttctctctcccatgtatgcctttactttcctcatcttctcttctttgacatttctctttttctttgagtctatcattgatgagtttcaagctttttaaagcttttaataactttttggttcccacattttagattagtctttctacaatagaatctgctcgatagctgtatgatgcataaggtatgactttaacatgaacaaaatcaagtcttggacatgtaccttaggtctgttagagaccccgtccgagtcttagattttgtctagaaactgtgtctggtacttagctcctgtctaggagctctatccattacttagatcatgcttgggaactttgtccagcacttagatcttgtctaagaactctgtccaacacttgagcccattgtagacccctttccgatacttagccccttttaggtgctctgtccggttcatgagtcttgattttgtactttgtagattattgactttgtatttcaaggatttctggttaatactctttgattttggccgcttaacccatttttgtctaagtcttttgatgttcttgttggattttgcgccctaaataaaactcatttccatataatcagatttactaattaataaaagatcagaaatcacttttacgttgcatggttcacatgatt

SEQ ID NO: 115105 - DNA, 3182 bp, Cannabis sativa
  modified_base (2275)..(2282): a, c, t, g, unknown or other
gggcataaaacccaacaaaaggtttatctaaatcaggccagatgtgatcttgctgtccacgaaccttactctcttgaagaggctctcaaacatgaagggtggaaccgagccatgggagatgaagttatcgctttaaaaagaaacaatacctgggttttgtttcatcctagtgaagcagattttattgttcgttgtaagtgggtgcacaagataaaatacaacttagatgggagctttcaacgactcaaagctacacttgtagcgaaaggttttcatcaacgtccaggagttgattttagcgagacatttagtcccgttattaaagatgcaactgttcgcatagtactgactctagctgctgcctactcatgggagattcgacaagttgatataaataatgccttcttgaatggcacacttgaggaagatgtgtacatggcacaaccaccgggatttgaagatgcttctaaaccagattatgtgtgcaagttaaagaaagctatctatggtcttcgacaagcaccgagatcgtggtatgacaaactcaagaaaacacttctcaattggaatttcacaaactcgaaagctgattcgtctctatttatgctgcaacatccgaaatatatactcatggtgctcatttatgttgatgatatcatagtgactggaagtgacagccatgagatcaaagtgttcattaataaactgaatgagactttcagcttgaaggacttaggatctctaagttattttcttgggatagaagtgtttcgtgacaacactggaatatacttgtctcaaggaaagtatatttcagagttacttcaaagatacaatatgatgaattcaaagccgagtcctactcccatgacagcaggaaagcccctttctctcacagatggtgttcctcttgaaaatccaactaactacagaagcataatcggagcattacaatacttgagtcacacaagacccgacatatctttttccgtcaacaagttgagccaattcctcaaagatcccactacggcacacctaagtgcaacaaaaagagttatgagatatctgaaaggaactattcatcatggaatacacatctcaccaagtgatcatctgaatcttgttggtttctccgatgccgattgggcttgctgcactgatgacaagagatcagtgggaggatactgtgtgttctttggtgaatcacttgtgtcgtggtcctctaagaagcagtcggttgttgcaaggtctagtacggaatctgagtacaggtcccttgctcaactagctgctgaattaacatggttgcaggaattactccaagaaatgagatttaagatggcagcaagacctgtaatatggtgcgataacatgagtgctagtgccttggtgcctaatcctgtctaccacgccagaaccaagcacattgaacttgatgttcactttgtgagagataaggtcttgcaaaaacaacttgaagtcagatttgttccttctcatgaccagatagcagattgtttgaccaaaggcctctcacacaccagatttcaatttcttgtaggcaagctgggactgatggaatcacccctacgcttgaggggtggtgtgaagaaaccatgaaaatcctggagggcaaatctgtttttgtgttctttccattctaatatcaacttagctgtaccaacctaattgccacgtttattttctctgcataattctgttagcatactttttattccttttgtaacaaacctgtatgtggcagccatctattggcttatcttgattctgtaatcattggctttgctctataaatggaaaatacagagtactcggctaattgagctgagatttcaatttattacttccctaaaatttctctctagcattcctcagcattcctctacaatatctacaaaatatctttaagaaaaatatattctttcttatttttattgtttaaatgggacaaaggttaaataatttgcaacaccacaaaaaaattattatataaatatagagattgtatattattttattaaataaagcaactaaatatattaattttcgtagtttaattattggttaggttattgattaataagttaatttcctacaatgttctagctatagctaggaagctatatgattatatgatgcatattttaatgtctcgggagggatcataaaggagtattgctattaggcactagtagtgcctagtaccttctcgacattgcgttgcgattggctaacgatactccctaaaagttannnnnnnnaattatatgagactcgatacttagttaaattaaatgcgatattgacacataagagggtgttaggcaccattagtgccctttagcatttttggatagtgtgtacataccaaatcgactatgccttaattatatgagcttaattaacatatttataacggccttttacgaacgactttaattcaattttacggtggaccgtggaaggttcccattttatttctagctacttggctgattttcacatgccctaattgctagttactgcatgcagtttcttaacgtacccacgtggcttataaataaaagttaattaaattacacctcatcaataaacaatactgttttattagaaaaaaaatataatatttaaggtatttctacaatatattttttaaaagagatttactaatctattatctttatttattttggtatctaaaaaaattttttagtctaatttttttttcatattcgtgtacgttctagttagttaagatatcttacaaaattttaaaaaaattagaataattacaatatagaatgtagtgttcaaaccgtctattttacacccgtataaaataaaatagtcgtgtatgcaatacactatttaaaccttattttcaacgtgctattttttttttttttttttgaattttctataattttgtaagatatcttaaataactataatgtacatgacaatgaaaaaaattgactgagaagttatttcagataccgaaatagatgagtgcattagagcatcccttttaaagttcatttcagtgattatttatgtactaaaccatgctatccagactttgatatctaccaaatcatgcccctcgaactttgacatatactaaatcatgtctcctgaattttcatctatgttagactttt

SEQ ID NO: 115106 - DNA, 1928 bp, Cannabis sativa
atggcatagagaagatggctcaaatttttgaccgaaggcaagtgatttcatcctctttcaatttttaatgaccttaaaagttcaagtggcatgatttggtacatgtcaaagtttaggggcctaatgtcaccttcatagtcaacaactcagccaattcatacatgctcctactacggttcactgggaagcttgcaagaggttattcagatatttaaaggagacaatccatgaagggttacatatcaggccaagtttgctaatgtgtttgcaagcatattcggatgttgactgggcaagttgccttgatgatcgaaagtctactggaggttatgctgtgctctttggtgggaaccttatttcatggtcaaccaagaagcaaccggttgttgctagaaacagtacagagagtgaattcaagtctttagccaatactgctgttgaagttcgatggttatgctcactgttctctgagctaaatgtgtctctaccagtaccaccaattatttgggttgacaaccaggaagctgcctctcttgcagccaatcctatttttcatgcacattctaaacatatcgaaatagacctccattttgttcgggactagatacttgctaaggaaattgaagtgagatatgttccctctatcgatcaaatcactgacattctcaccaaaccgctgagcaaagacagatttgcttatctcaaaagcaaactcaatgtatgttccacactctttcgtttaacggggatgataaagctagtcttttacctactgttagttagctcattcttgtaactacttttctgttattagttagttacatttcccttttctgttgtttccttcaattgttgtaagactcgtgcactgtaaataagagctttgtttctaagtcttccatcttttgcaagcttagctttcttctttttgtgcttgtattgattagatctttcactttaatattacaactctatattcattacactatctgatatgtatcgtctcttatgttacaaaaatatatacactatatatattattcacttaataatatatatcttacagcaatttttaatcacaatattatattatttatttaatatataaataatataacataattttggtctaatattatttctagttcgtcatttctttttttttttttttttgttttgttttttgctgtaaaaggatgggacattgtcaatttgtcattaatcgagttgataataaggtagttttgtacagatgaaacaagtaagaaaatgattgtgagctttaataattttgtaatcctacttcagatggtgattaagaaatggctgtggctccatccaattgccttatgtggctgaacttgaaattatgatgaatgatgatcacatggatcaatctaattatgtggtaataatcaggtcacgtccccacttttttctaaaccaagaaagtttgattgtgggatccatctttggacaagtactcataattataccacaacaaattttgttggaaaaaaaaaaatactaaccaaaatgacaatattttgtgatataacactgtgcccaccacactcacaaaaaattaatatgataaataaaagggaatatactcttggtattttgtgttttgttgaaaaataaatttataacactgtattttcaatgatattcatatggtattttatattttaaaattatacaattttttataccctaaactcaaattagatatataatttttataaatttaacataattgccttcacatataattattgagaaattatattaatcaaatttaaattcaaagtattaaatacacaccatttctgaaaaggaaaatttaattttctatacttaaaaaactaaaatattttatttttaaaccaatacattttaaactaacaaaaatatgacacttttct

SEQ ID NO: 115107 - DNA, 2290 bp, Cannabis sativa
ttttgtaatattgttactttttgggttaaaactgaaaaaagcccttaaaaaaactttattaattggtgacaaggttgtcgaatgaggtagtagttggttggaaatttcttccatgataacctagggcaattttagtcttcatgttcacaatgcaaaacactaaggctctgtccatgttttccaactcaaactgctttcccacagtggaaccccttctccgccccagttttcctaacctcagtggcagctctgctcgtcttcttcatgcttggagccagaacagctcaagctctattggtcgtggtaagaaagttatgacccatctacccaacactactataaaaataatttttcccgacgtttttaaacagtcgtttaaagtattcccattggtttctataactgtcgcctatacgaccgtcgcaaaacaggcaaaataggtaacagttaaaaactgtcactaaagtggacttcccgacggtttaaaactatcacttataacagggtataggcaacggctttaaactgtcgggtataagggcccaataaattcacgaattctaattaaaatcgtcgcctattcctgtaattaccgttataaatcgccatgatactaatttttcccgacggttttaaataattacttaatttttttagcgacggttaaaaaaaaaacgttttaagaccgtcacgaattctgacttttgtagtagtgtaacttcacatcaagtaattataaaaattttagaggtaatatcactctaaccccaatttttcttcctaatgttacctcttatctaatccttttaagttttttcatatttgcatctgatatagaccaaatatatagtaaaattaactctctttggggtgatttctcatggatattattgtggatcgctagtgtgaacatgacatatgccatttttaaccttgcttgtttgcttgagtcaaatagaaatttagggaatctgtcatctatgcacataaggtttatgaattgggttatttatgatcttggaagagatttctaacaaacccttcctcaaattaatgttttgccgatcattatggctataaatggtctttttgctgtgtttggaaaaacccatattgatgtttctgctcttaattttctctttctgaatttggctttctttgttctgttttctcactctttcttaccaaaaatggatgacttagttggttttctctctgttgccctcagtataacaaatacggagaatacagtccattcccttcaagatttctcaactcaaatcgatcctaacctccctgttctcaatatctttattgtggccaagttacatactaatacggtcgagtcttatagtaggaaacacttcagagaaacaatgacaagaaattgaaacaaactttgtcagttgttataactgagcgccctcaaatatttttttggtggagtttggatgtgatggggatagaagaagagtgatgattcaacaatcttggatttatctcaataatgttgtctgcatcgatattcctacttctttggaagttctcaatggggatagtctccactctatccttttctgggttcaagtgcataatacacacttcctcaagtgtaatgaagacttggcttgtttgattgcttctaaattgggccctctggttgaagttaataagctctcccttagggagacttggggcccatattttagagttcatgtcatgtttcatgtttctcaaccaatccctagaggaatccccgttgagtttcaaagtattaacagggtagtttgactcactttgaaatatgaacatcttcctgacatatgctttttctatagaaggatgggacatatctacaataatgactgctttgattacatgaaggcatgcgacgaatcatcatctcacccttacctttgttatgatgaaatgattagaggtaaggtttgggtttcacaaactctctcttggaaagctcaaaacacttgaactttgtttttccatttgttgttacttttatgtccacaaatcatgttagtggtttatgcgtgtcaagccaaatcagcccaaccagctcaatgcaacttcaattggaaaactttaaggccaatgtagcctcttcacatcaagctggtctttttatgtccacaagcgtcgttaattggactcaaagcaaccgttcacttgattctgacctaaactctaagaaccattgtcatcttttactgcccttctcaatgtcactatgagcaacctttcaggacaacactgttcgaaattattttaccag

SEQ ID NO: 115108 - DNA, 2704 bp, Cannabis sativa
  modified_base (2640)..(2673): a, c, t, g, unknown or other
catattaggatgttaatgaaacattcttgttagtaaatctagatcctagtaaaataattcccacaacaacaacacagttggacaagacaagatattgcaaattccaacagatgctaaagcaatgctatggcacaacagacttggacacatagtagagaagggattacagattgttagtgagcaacaattgttgtgaaaagacagagtgagcaaggtagaattttgtgaacactgcatacttggaaaacatcatagactgaaattcaaaataggtacacataaatctaaaggtatactagactatattcattcaaatttatggggtcctaacaaagatattcgtggaggtaacacttattttatgtcaattgttgatgatttttctagaaaagtatgggtgttttacttaaaaaaatgatgtctttcaaagatttaacactggaaaacacttgttgaaaacctcactaacagaaaaatcaaaaacgtaaggacagataatggtttggaattttacaagaatgaatttgacatattttgtagagaaacagggatacaaaggcacatgactgtcagactaacacccatagcaaaatgctgcgagtgagaaaataaatcaaaccattctgaataaagccatgtgtatgttaatacaatcttgtttgtcccatggtttttggggaaaagttgttatgacatctgcttatcttataaatagatgtccctctagtattattgaatttaaaacaccaaaggaaaggtggtctggtaaatcacctaatctattcaatctaggagtgtttggttgcagtgcttatgtgcaccaaagtataggcaaactagagcctagagccataaaaagagtttttctagggtatcccgaaggagtaaaagggtacagaatttggctaagggaaaaggttgttttaagactattattagcagagatgttaaattcaaggaaaatgaatttccatgtttacttaaaactaaccttgcaaatacttcagacagtaaccttgcaagaacaatacagtttgatcctattctatggaaactagaggatcaaggagaacctgatgtcaatcaggtgcaaccagctggaagagaacatgaactagatcaagttcaggtggaacacacagaaaatacaaacaaaaagagaacacatagagtaacaacaagaaaaggaaatagaagatacacaataaacatgggctcttaatgactaccaactgactagagacagagagaaaagaccatcaaaacctaatcctaagtacagtttcagcatcttgaatgaagacatagcttatgaattcatggcaaccatggagtcaatcaactcagaacctcaaacatataaagaagctatggaagtatctaatgctatgaaatggttcaaagctatggatgaagaaatagtgtcactaaagaagaataagacctggattatggtattaagacctaaaggaaaaagaatgatagcttgcaaatgggttacaagcataaggaagggaaatcaaagtgggaacctacaaggtttaaagctaggctgatagctaaggggtttacacaaaaagagggcatagactacacaaagatattttcacaagttgctaagtacaaaataattaaaattatgttgtctatagcaaaccagtttgatatagagattgactaaatagatgtaaccactgctttcttacatggagacctagaagaaaaaatctatatacatcagcctaaaggttatgaaatcaaattcaaagaagacaagatctgtaagttgattaagtctctttatggacttaaaaaggcccctaggcaatggaacaaaagtttgatgcctctatgataaaacatggttttaacaggagctatcatgacacctgcttatactacaaaggaagctctatacaagaagtcatctacctacttctgtatgtagatgagatgcttattataagttaggaaaggtctaaggtagatatggtcaaaaacttactcaaaatagagtttgtgatgaaggacttggtaatgctaccaagatccttgggatatctatcttaagagacagaaataagggaaaactattacttagacaggaagactatattgagaagatcatagataaattttctatgaaggatgccaaggttgttaaataacctataacaagtcagtaccctttctaaagaacaatgccctaaaatagagaaagaaactgagtttatgaaagatgtaccctattctaatacagtaggatctattatgtacctcatggtaagcacaaggcttgatctaggctatgcaatgactgtgcttagtaagtacatggaaaatctaggaaaagttcactagttggccatgaaatgggtgttcatatgcttacttgctacaactaaagtaggtttggtgtacaagagataaaatgcaagtgctataatagaaggctaaagtgactctgactatgcaggaaacacaaacaacagaaggtcagcaactgcctactttttcttactagggagaattgtgttagctggaaagtctagctacaatctgttgtggcgttctaaacaatagaagttgaatatgttaacacaatagaacctatcaaggaatctattgttggaaattatnnnnnnnnnnnnnnnnnnnnnnnnnnnnnnnnnnttattaacatcctaaataagaactttctaaa

SEQ ID NO: 115109 - DNA, 3542 bp, Cannabis sativa
actggtaacctggtaggcccttctgatcagcacggtggcttgcctggaacgattgtcaatggctacttgctgagccctcatgacttccatctctcgatccctccattatatgaattgatgtcttcgctcattgaaggcaaggttaataactgctaaaagatctacctgatcatgatgtaaagtgttgttatggcgtggcataagccctagtgcttctcgtagattttgatgttcagtgtcatctccagctagccttttagtgttattggtggatgggacctcggtgctaggagtggtttgatcagctaccgtactggtgttcccagtctcctatatgcctggtgtgaacccagcaagagaggaagttgctccatggcctaccgtgggtggttgtgtattaatttgttcgaggtttatccctggtggtcctctcgtgtttccaggagtttgcacgttcatatctatcaccattggatttccttggtcagtaaggcctccccttcgagtttgtacaacgatcttgttaacctatcaagattaagataaaagcttatatttttgctcttaatgaaagccccaaaatattgacctcgcttctagccaataatagtgagccaagataaagcaattagataaaataaataatagaaagtaaaaataataaggtaaaaagaacaccagattttatagaggttcgaccctgcaagaatggtaatagcctattccccttattgttgtatagacttgagaaaaaaaatgaagtgttcttcctctttaaagctcttacaatcaatgtctgagttattctgtctcttggatcacttttctctcttgagtatttttttggattaattttcctctctgttaatagtgagattatgccactacttataggagcttattacatgaagaatagtttctcttaatctataatgagtaaaataggaaactatattaattctataattacaatacaaggaatgggaaattaaggcatattgcctttattctctgacttaatgccacgaatgtaggtattatcttcgtgtcttggaagagacgagaattatctctaaaattgccaactcacatatcttgctcggtgcatatgagtttgtactttggtcggatgtctcttgattaccctgtttggacatcttgttgtaacacacattttgatcaaccatttatgggctgttaggaatacttccttctacccatgtaggataatataggacacgtgtcatccagctcattgtcacgtcacggtgtaaaaaataggataattaattggatcacacaccttaaatctaactgtatattttgtgatcacctccactacaaaagcttattaaatctaatttaatggcgaaaatgcctccccaaatgtttatcattggcttctccatgaatatgaaatattccaacaatcatggttggagtctcaaatgtgaaccctctatggtactccaaacgggactcccaaaggttgtgttattagttcatctgagataggatgtttgttttggtgcaaggaggtgtgggctttttttttttttgtttttttttccagtttaactttgtgtaatatcttgatttagtattaatctttagttcattactgagatgaatttttttagtggtggttcttagtttgtgatgtcttgagggtttgtttttgctgccttaagggtgggttgtatttgttgtagcctctagggctatcggttcggtgctttgcatcaatttggatgagtgctatggtcactctttatcttttgaaagagatgtgtttctgccatttcgatggttagactatttaagtcttgctcaaataaatttagtttcttctcattgtttgaggcttttaagtaggttttatctagatattagtgggagaaccaaatgagatttcttggttgagctttggagctctgtaacgactttgtgcatatgtccatctttttgaaagactatatttggactttgtcttttttattaattattgttatctgtatttttgggaacgtgacatgcgtaaggtccaacattctctattcttttgtgggcctatccataaggcccaaataagtcaacaactcggtccaagaataaaacgagattggggctcggattcaatcaagattgtgctatgggaaaagctagacagatgaatctggaagctttacacaaccaaatcatggaacatccgagggtgtgtaaacggatacccctagaagagtaatcaaagggagattgcgaagcatcaaccgattgggaccaatctgaggtggcatcacctctgacaccagatcccacagaggtgattttaaagaagtcgatatatagtataatataaaagtttaaggtcaaatagaaaaaatagagttttagtgatatattttgaaagataaaatagagaaattgattatttaaaggtgttctataaagagagcaaaacgtaatgtaaagattctctcatataaatatatataagggtgtgtacgtatgtacaacacaaaacttgagatgtgcattaatgcatgcttaattccccttaaatataagctgaaaaggaaatattcttaacttaaacaaaagaaatagaagaaaggaagaaatggtataatatacatatattacattgaaattaagatttaaatcacagagtgtgtataataaatatcaaaataaatatgtgatgaaattatagacaaagtaataatagacaagcatacttgtacaaatctgttaacatgctaattcggcctatatcttttatgttttttaaaatacgagttatattgtgatgagtcataatagaaaaatataagttgtgtcatatcatgtcataaaaaaatatggaccgtaccataccatgcaacaattttataaggtagatccgcgatacggtttgcaagtccagtaatttcgtgtcgtattttattcgtgtcggcctatttttcttaaatagactaacacatatttttttatacggacttaacttcgtgctccatatatatttttgccttttttttttcacaattgattgatgaactaaatactaaaacatcatgtgtattttacagttttaattatttttatattttttttttcaatatatagttacacataatcatataaaaaataattgtaattattgtaatttgaatgctactattattttgataaataaatatttatcattgttattattattaaattattggactttttaatgtctcatactttcaaactaatttatttttgcttatcatgcccgaccgcctcatcctctggccggccctgtgttatgtataaacctatattttttgtgtcgtacccaaacatatattttttcgtgtcgggtcaaaaaactcagctcatatttataacactacaagtataaaaaataaatacttattaatttaataatttctcagaaatataccaatagattgttatattatttattaaataatataatgtttaagattaaaattgtgatattatatataatataattgggaattatatacatg

SEQ ID NO: 115110 - DNA, 2762 bp, Cannabis sativa
  modified_base (2697)..(2704): a, c, t, g, unknown or other
aatacaatacattacaatacggtgtaccaaacgagccctaagtgatattgacttagaatagatatcacagtaagtttattatatatattctatcttcaatatcgattagtccaatgtaataaacctattcattcgatataattcttttttttacaattgtcctgaaaaacacataccacttacaatagtttaagcaggccacatcatcgattatcacatagaatttatatatatattaaacatataatcatgtaaataaacatgtgaaccaaatgattgataaagttaaaatatgattcctaataactttattgaaataaaatattattaaattaaatttagattttatttaggacataaaactcaacatgcacaatttacccaatctttctccttacggagcacaagactttgactgtcacaatttggcagtgacgtttgcgagaggagttgggttcgacgtgacaggtttgatgctatgaaaattgaattccaagctcaacagcagaataacacctagtccttagtccttcttccatctaaaaggaaagttatatggtgtaagttggtgttcaaactcaaaaagaatccagatggtacagtgaaaaaatataagattagattggttgccaaaagctttcttcaaaaagtatgagttttactttaaataaaccttcaattatgtggtcaagccaactactattcgatcttcactggttgctgtatcaaagaactagattattcatcaacttaagatatatgatgtcttttttaatagcactattacaaaaatagtttttcccgacgatcaatatcatgatttgtgtgtatcttggtcttaatttagtctattagcactcaaaaaaaaaaaatacatactatttctagatcaagtacaaaagcaaatttataagtatagattatggcttatttagctgctgaaatcacttgaattcagtctcttctatttaaaatctaagtgtctctcccttttactcccacaacctaatgtgataactaaagcacagtctacatagtttgacaatccactcttccatactagaactaaacatgtagagattgatctttatttattaaagagaaagttcttaacaaagagcaagctgggagttaagcatatgctttcatgtgatctggagtaaaatattcttctactctaagactgggatgggtgttaagagatagattgttagttatgtcaataaatagttggttactaatgcaaatacttacaactcatatagttagttacagtgacgaagtcaagatttgcagatactaggagggcaattttatttttataaaattaaaattgtactatatataatttgtaataattacattaaataaatataatataaacataataataataataattttgttaacaaaaagtgtgattaataattatatcaaattcgtaacttaaaaaaataaatttattttttgaacaatgcgtttggaaagacacaatgcaattagaattgagtgtaattcaaagtatttatgagatttagggtgtttgttcatctaggtaattacacaataatcatgtaattggatataatcacactctctaattctcatggccctacgtgataattgagtgtgattacattatgtaattacacaatatcactattttttagataattaatattattaaattgtgtaattgctaatttatttgccaatatgaaaataattaagaatccatatacaattattattttatatccaaacactcattttattttaaaatatagtgtaactactctcatgtatttattattctattaattacacagttgcatttaaatacaccttaagtaaatttagtctcacgttccttcgtagaagaaaactcatctataatggaatatgtactaaattttgtagcaatatctttcttaatacaaacagttaagcattcatttagaaatttattttcaatcttatttctaagctttgtcttgataaattttatgattcaaaatgcacattctgtcctcattgacacaagaagagttagaagcctaaggatacataattacttttcttgttttcaacaagtcttgactctaactagaattgggggaaaaggaaaagtcttgaagagattatttgtttgggcaagtgagttaatgtaatagtattagtgagatgagaattagaaaattcatgagcttagaaataaagtgaataagtttggtctattttggtagataaaataacatatgctatacaataataggccaccttggcgccccttgtctccgtcattggttagttaagtgtacagttactattataatgatgtaactaattgggataaatattattttagattttatgttttgcaaaagttactaattagactcgttgttttattaaatgacaaaacagattctatatttctaaaaatgaaataaataggacattgagttaaatttttgataattttttttaatataaccaacttaaaaacaattcctaacacgaacagatatagattaattaattatagttttgtcataacacctttaattcagattattattaaattttattttgacaaaaaattaattcagagtgtactattttgaaaaatacagtgttcattttgccatttaacaaatgaataattacataaggtactattttttgtaaaaaaannnnnnnntttacgtttaaagatttttttttagatatttacgattttccataaaaataacaagaaa

SEQ ID NO: 115111 - DNA, 2424 bp, Cannabis sativa
atatgtatatttatattttactcttatcaagatattgttaattttttaatatttgtatgttatgtttttatattgttttgatgttatttttatgtaatttcttttttatttttgtgttatttttataaaatactataaaaatgtaaaaaagaactttaaatgtaaaaatgtttaaattaaaagaaaaaaaaagtgttattttatgcaattatctctttacaaaatctcattgttcagataaaaaaaaaataaaatctcatcctgtttggttctctatcacatggagacttaaaaaaagctatattggtgtgcattcattttatacctacaaatatgagaacgtgattcagtctaaaagtgctcttttcataaccttttattatgttctatatccaaaaacattataaaatccatttgtttaaggatttttattttttttatgttattttggatttaaaacttcttttttttttaaccaatcattaatttgtttttgcatactaaatatatatcttataaaattaagtgatcttgtctatttctaactaaacaagttttgtgtcaatcctaaaagcatacccaacttaaatttaaacttttaagttataaaatccatgaccgaatggctataaacactggaaaatgcctaacttaaaatttgtttaattttttttaaaaaaaaattgtttgatattgatttacgttgcgaataaaaaacaaaatttatagaagttaaaacttaatttactgtcttttggctaagaattgtacaaaaatattgaacacaattaataataatatgcaaaagaataataacttttctgtttagtttcatagatgcaaaagaataataagtttttttaatgtttagttttatagatatatgtgaccatacgtgtaattgttgttaacaaaattaataaatgaaaaataaaacattaaattaaattaaagttaatggctggatgcaaaaacaaatagatgtcttcagtatatttgtgtaaattttgtatgtaaataaatatcattataatttatatataaattaaaataaataggaggaattgaagcattaactaatgaaaactgaaaaaatatgagtttattgaatcacaaatttatcatatatttcgcacattaattatgatgatgatgatcatcatcatcatcatctgtaacggaatgataactaagctccaaagaggccatacctccttgaaagaaaacaatagtcaaaaaaatatgaaaaacagcaaagaagaaatctgaagcagagactactaattgaagactagtctgataatgaaaatgatgaaataatatggaggcggactcattaaacgaaacccaaccaatacaaaccattacaagagccgatgcatttttaaaatagagctctctatgggcagtgacacccattattaataatctgttaaaattgacgatccttctaatctctaaaattcttttcagagaaaacatacacaaacttaagggtgcaatcatccacataaagaagatacatgctaatttcaatattggctgttgtagtaagccgcaacgtatacaaatctttaagaaaatagctgcattgaaaagagatacacaccaacatatcccacaaaaaccagccagcatccaccacttcaccaccttcaccacatcattattcttactattactgttaatattattactactcatcatcatatctcctctaaaaaaccacccccacaacatatcttcagtcatctcatgagtcttattattatgcgccattattatagaagaaggtatacagtgaaacagaaaacagaaagagaaagatagatgggtactagtgcgtaccaccagtttgtatttataggcgtagctcttataattcaaatttttaaattttaataaacatgcattctgttacagatcttattttaataatgaaataaaaaataacaaactttcaaataacctccacgtttctctcaaaacaataataaaagataaatatcgcaaatttaaactatagatgtatattagatactttattagatacttccgtaataccataaaaatattattatatatctatatttatttatctagattatttatacttagtattatatttttaatttgtatttttattatgtgtatttttttaaattttataaattaaacaaaaatacttattaattaattaaaataaatatattaatattatgtattgaacaatatttattaataaagaaaaaataattttcactagagtattgatcggaagcatatgtgtctgttaccttctccattttctttctctccgtccttctttgtctcgatctcctctaaccatcaaaccaggaagccttatgaagatcctttttgtaatacccggaattaaaaaaaggattagcaaagtcctaatta

SEQ ID NO: 115112 - DNA, 2388 bp, Cannabis sativa
ttattagttaatatatggcaacaacatgtattgtatatattataagcaataacataggtataatagcaatataaaatgcatgttttgtttaattttatttagagatattgttatttttttattaaaagattaattatcatataaattaatttcaaatagtgaaaaattataatatgtaataaagttaggttgtctatggtatatatatataagagttgacgaaaaaataataacagctagaactccatcctacctgcactcggtgtcacggttggagatggattttctttcaagaggaaggatgcaacgaacgaacttgcttataagttataattgagcgtaaatcttttcaaaaaagaaaaaattatcctccacaaaagtagaagtcctccactccatccaactctaggtgcttcaaggccattattaaaatttaaagactgtcaaaagcaagaaataaaattactactaagttttgtttccataaggaatagggtggggcacctattgttgaataagcaatcgaagatatctaaacgcacttgagttaattagattctgtgcataagttaagattttcataatgctttgtaggattgtaaagcaatcaccattgaatcatcatcagacccattagaatccatctccactgaggaaacttttaggtttggactcgctgcatttaatgaatgtggagcaagtgtaccaaaactttgaccgggagaatgcttaagcatttgtctcataaattgggcctcatagtgtcttttaaaaatcttttggagacacatttttcttatttgcattgactataccaatctcgaatgtagcaagagacggggtatggacatgacagggatagagacagtaagagagacacccggtggcaaggaacttggcaagtcaattgatgtcagagttgggggatacaaagcatgatggattggagggtgtgtagcagcaccaatatctggtatgaatatatgattcaaatctgaaatatcaagtgtgtcaagtgatacaaaggcagatgtgatcatatttgagtagcaatttggctaaagtgaattcacttttattgtgcaaagtgaaggtagttgaattattaatgaccataccatttggagcatcataattttgtgtggagtagttttgattattagaacattctccttcgaataaaacctgtggttgaggttgcgttcttattttcattgaactgaacacttctagccacatatattctaccactgggttgaaggcatctgtagcatttttgggtcatactataccctataaacagacactttgaagatctggaagacactttattagattggtagggtctgagtagagggaagcaagagcaaccaaattttttgacaagattgtaatcaggtgccactttgtataatttctcaaatggcgaaagataattgttgacaagggtggggagcctatttataagataggcagcagacacataagcttcccaccagaaagttagtggcatatcatctagagctaggagtgttaagcctacatcaactacatgtctatattttctctccactcttccttgttgttgatgtgtgtaaggattagagtttctaaggacaatccctgtagttagaaattggtgtttaagtggtgaaaactcttttcctagattagattggatacttttgatttttgtttgaaattatctttcaacaaaggcattaaattgtgtgaacaatgtggatacttcagattttgttttcataggaaagattcacacaaacctgctaaaatcatcaacaaaacttatgtagtacttataaccatccatagaagtatgaaaggaaacgcccctaacatctgtatgcactaattcaaatggaaaagttgttttatttttagtagttttaaaattgaattgatgcattttgcctatttgacaagcataaaaaaaggttacatttttacatttgagattaggactaacatgagcaagaactttggctaaaattggcttggctggatgaccaagcctataatgccaagtagaaactgcttttgacttatctaaggcaggattgctactggtggtgcaatttaagatagagggagaaatgctgacattagcttgaaaaaaatgaactttgatttgaggctgggttgagtgacttgcgggctgcacttgaagtttgtacaatccattactgagggaaccctttagaagaacttgcctcgttgtcttgtgcttaataagacaacaaacatcattaaattctaagatgacattattatctatagtatattgaaaaatactcaaaaaaaaatttgtgacatttggcacatgtaaaacatctttaagaataagaaattgtaacgtccccgcttcaa

SEQ ID NO: 115113 - DNA, 4981 bp, Cannabis sativa
gcggtgcgggtgcggtttgagaaattggaaaaactgcatgtgcgggttggtttgaaaaaatagtcaaaaattgcacaacccgcaccgcaaacacccctagtaggagtgataggttgctgaggagcaatattggtagtgtttgaaacaacagtttcaacaccagtaacaacagtgacatctggagcaacagtgatagagataggtgctgtgtttgtaagatttggtaagttggtagtatactgaacatgagcattaagcatgacagggtttggagtggaattgctgggagaattagaggagttgttagacatagatggtgaggtgaaatgtgtgatgtttttgtgatgcaaagactcagcatatggaaagcttaactcatgaagtacaacattgctcgacatgtatattcttttatctttagacatgcatttgaagcccttgtgagacatgctatagcctagaaagacacatggtgttgacctgtactacaatttatttttattgtatggtcttaggttaggatagcatagacatctaatgacttgaagtgcgatataatctggtgtagtgtggaacagtttctctaatggagaaaggtttttgattgtagcagtaggcattcgattaatgagatagacactggttctaaatgcttcatcccaaaaagacaaagggagagaggcttgggcaagcaaagtaagacctgtttcaactatatgcctatgcttcctttcaaccaccctatttttctcatgtgtgtgaggacaagctagtctatgaacaacaccacactgttctaacaaatttgtaaaggctctgaattcccaccccaataagattgtaatgttttgattttaaatccaagttgcagttacatttgagtcttaaattttgtaaatgttggtaaagcctcatctcttgttcttagcatgtatatctaagtgtacctagaataggcatccacaaaactaatgtaatatctatagtcattagtagaattcattggagtagggccccaaagatcagaatgtagaagttggagtggctcatgataagtagtagtggaaaataaaaaaggtaacttgtgatgttttccaagaaaataagctgaacataaatttgcattagtttacttaaaaattggtatattataagaggtgagagccaattttacaattttggcagtagggtggccaagcctactatgccataaggaaaaattggaattagaatgatgcaattgatgattaagatagtgagagacagatgatttgttcaactgtggtgagacattggatgggagatgagtgaaatttgtgggagtgaacttgtaaagctttttttcaagcttcctagccaacaagatcttcttggtaccctgttccataaccaaacaatgggaggggtgaaactcaaaaaagacattgttatttaaggcaaattgagagacatttagcatatttttgtgatcaagggaacatgaagaagattatttatggacaatgtatgctaggtgaaaggagagattaagaaggatttacctatgttgtcaatgttgagatcagtgccatttcccatgaaaacttattcaggaccagtataggtgctggtggaagcaagattggatgcatcaggtgttaggtgatgagttgctcctgtgtctggataccaactgtcatctgcaacaatttttgaagtggcaacataggcttgcattttaacaaaattggcagcaagtgacatttgattgaaagattcagggcttgtgaatgtgtttgtcaaacctgtaaaaacattattttgtagtgtgtcccatcttgtgacatagttgacattgaggcttggaatttgagggagtttgctgtccacgacaagtatgaaaatttccacgattttcttcgttattgttgccacgccctgggttgagcatccctcgattcatttgttgcatcattggttcatatgcttgaaattgagagcctcgattgaaaccaaatggcatttaagctccaaagtatggggttctatttggaaaaacaaattgggatggtctgatgtgagcaagattcgcctcacttttgctgatgtccaaagctttagcattcttgtctatgcgagcggattgagccattagtagagcctccatttctggtacggtgtatgcatctttcctggtagtaacagaagtcacaaacacatcgtattcagcaaggagaccattgaaaagggcctcgatgtgatcttgatgagattgtttgtgaccaattgtggcaagaagatcaaccaaacctttgatctttaacatataatcgcttaaggaacctgtcattttggtgtttccgagctgagtcttatacagaatgatgttcgcagcattaagagctgtgtagttttcattcaaggtggtccaaatccgagttgtggtgacgcatcctaccatgagatttgttgttttctcagacatggacgataaaagccaagacacaagaagattgtcatgctgttcccaatcttcaaattctggattgactttgtcttgagcttcatcatcagcagtgagatactgtgtgggagcttgagttgagtccaggaatttatgaagtttgcttcctttaatcgaggcaagaacttgatgtttccacgaaaagaagttgtgttcatcgagttttattgatagtgagtgtgtaaacgatacatgataggatcttggaagaaaagcttgcatttgattctgaccttgagcctggttgaatcttgaggctccaccatagttggccgtttggtgctccatggctgtgaacgactacaactctgataccatgttgagttgaagaagaatagagggaaagagagagaacgagagataagagaattcagttattattgattgaaagagcaagctttgctttatatacaatgtacaatgaaataatagaaactccaactaaccaagaagagttagttacaaacatttggtccctaaccaccttttgtatcagtaccctggacaaaatctcaaacatggaattaagcacaaatatagataaattcacaatcaagaaagaagaaataataattatcattaagttaagaaataataatgtcaataaacattcatcatctccccaatatgactttagttcataatctccataatcaaatttaaaacaaaaattaacatagaaatcaagagagataagaaagaattagtgtgtgatcttactctgggtagccacaagtgcttcctctgcctccttcttcagttttagggtacaattcctgagtatctttcttctaaaacacgagccccttcaatagaaattaagattgctatctctgaatgacgaaatttcaaaaatgcccaaaattctcatgtttagcccatagtcgtgacttcataaagcttagttgcgaccataggaaaaaccataaaaatgagctttttgtctatgcctcgtagtcgcaagcatagtcgcgacaatgagaaagtgtcgcgaccatgaaaaagggtggtcacgactactaaagcatacttgacaactttagcagatttttctctaatttgccccgtcttttcaacaattgatataatttgaactataatgcctcagagatttgaaacaagggaaatcaagcgtaaaactattccaaaagataacattaacaaaaaaaaaaaaattgtaaaattgacctgaaacttaggctaaaaatagcctaacatgtctcagtcttgcttttcttatattatgcaaggcatagtatgcgactagaacttgtcaaggtcgcatcatctcgcaagttcagatcaagcgaggctaagtctttgagactgctctcgagtttctaggcaaaaaattcgtactataacattaaaattttctaaattttaggagtgtgcataaattgatccaatttaataacaaccgaccaacctaaagcgattgttaaacattaaatatctaattgtgatcggatcaaattaaatgctatttttgaatatccatttagatcagattggatgttggatggagcgtctaaaaatccaatacatctaacatctaatcgaactaattaatatttttatttagtttgaatgagtaattaatattaattttttttttctttttggattggatagatccaattcaatctatagatactagaactaaaaattagatgaatttaatatccaataaataataagcctaaaatattaaataaatccaaattaaactaatagatattcatgaaatacatctagtgatagaactgatccaatccattggatgtttgatcgattggatgactgaaattaattgaatcgaactgaatggtaaaatcgaacatccaatatataattagatcagatttggatagacctaaaaacgttaaacgtggtccaataatcaaccatactaaatactaataaaaaatatattaaatacaattatcgtataattaatattataatcttttttttaataaataattataacttactataataattaaaattagaatatataattatagtaccgtcttataattaatattaaaatttattcacgtgggtaggaacctaaaatacatgtaatattcttacctgtaataaaagagcaatgctaatcttgcgctcacaattgattagcaatattttttaaaaattattttttattatatagaatgcaatacttaattacattaataacaatgacaaattaataggctgatttttaaatatagtaacaggtatgcgatagaatctctcgataagtttcaaaatctctctttcactctcaagccaaaaaccccaattaagaaatttccaaaattcatattaattattcttctacatcatctacccaagaaattttcaattagtatggattcagattcagatcattaccgaaggagaagattattgtattgatcttcttgattgatgccaaagtttttctcattctcacatcaacgtcttctt

SEQ ID NO: 115114 - DNA, 4755 bp, Cannabis sativa
  modified_base (4676)..(4713): a, c, t, g, unknown or other
gtttcatcttcttcttcctaaaatatatccaaccttgctactaagcttcagcattgcgctattaatctctcctagtggcaaaaaatggtaggacctccccttcctcgtcaaatcaaaaacatccagtctcaatttcagatcattcaaaacaacccccaatcttccaatactgagattcttcaatgcagccaacttcaaggggaccttgataggcttctctataaagaggaggcgtattggcaacagcgctcccccgttacttggcttaaactcggtgacaagaacacgcgctactttcatcaatttgcttcttgtcgacgagccaaaaacacgatttgttccctcacatgccaagatggctcgattgtcaccgatactcagagcattttaacaacaattgaacaacattttactcaactctttaccagccaacaacccactgatgtgcacatggactttgctcattctggaatctctaaatgactgcgaggtatcttcccaattcctcattagctagaggttttgataggatagaaggttaagctagttgtttctttaactcttggaaggaagcttcacactcctctgtccattcaaatttttaatttcctctaagcatgttgaaaaatggtacacatttatttgtgggctttgacatgaacccactaagtgctactatgcggccagttaagctttgcacttcttttatctttttgggcgacttcatgtccaaaagggcttaagtcttctctgaggtttcttctattccctggggatccactatgaagcaaaggaactttcctaagcctactctaaaagaacacttgaggtgattaagtttcatgttgtactcttgaaagatcttaaagcattcatttagacaacctatatgccctcaacatttttagacatgaaaagcatgtcatccatataaacttccatattctgaccgatcaggtctttgaacattttgcttactattaataagtagcccttgcatttttcagtcccaaaggcatgactttgtagctgtacagacctacatccatcaagatacttgtttgctctttgtctggtggatgcattttgatttgattatagcctaaataggcatccatgaaacttaggatttcatgaccagttgtagcatctactaggtgatcaattcttggcaggaggaaacagtcctttgaacaagctttgtttaggtcagtaaaatctatgcacactcgccacttgttttttattttgggtatcaagataggattggacaccctgagcgggtagaaagctttaatgatgaagtcattggtgcacaacattttgacttcatctttcaaaccttgggctcactcttcatttagtaacctccttttcttttgtataggtcagaagtttggatctatgttaagggcatgagaaattacttatggatcgatccccaccatttcttcatgcgactaagcaaagatatagaggtttaaccttagaaatcttataaatgctaattttatttctggtgctaaacctttcctgttttttaatttccttgtcggaagggtgggatagatctctaattcttctaatcctctattggtccaaagcattcgacaggatccccaaagcgaggatcaaagtctgcctcctccctttggcctaaacatcattgcccttgggtagactcttcactagagctcttgacatgcatcttttctttctaggctttagacaaagccatgttgtagcagtgttgggcagtctgttgatctccccttaggcaccctaccccatgccttgtttaccttggccaaccagctttaggcccggctaggatcttgccagctgttgtacatttctgtcttttagatgatattgttaataggtagaacctacttgtgtcaaccttgtggccatgatatcttgcaggatagaattttgcatggcggtaacctgtctggttagtgctgacttgttttcaatatgtcttctactttttgccaagtggaggtgccacgtcaggtggacaaaaattgcgataacaagaggcattcaaaaaaaatttgcacaactgagtagtttttgcatggtaaataaacattaagaaatgttgaggttactcccagtaaccgagtttcttaagacataaaatactatgcaagtgttagaggtcatgcggtaacagataaggtaaaaacaaaaaaaaaaatattagaataaattcctaatttaataggaataatttctaattaaattggaacaaattctaataacatttttgccatgtcatatcaaccccaaaataccgtgagggatgatcgaataacacactaaagttaaatgctaaaaaagaggactaagaccacaccctcaaaaaaaataacaactatctagttctgcagaagtgcttcgatttttgttgcagtcacttctggtgcatcttcgagttcaaccttgtctgggtgctcagagttgtaggcttcgtctttgttttcaataaccttctctttcacattaggtgaatgtctcatcgaatgaggattgttgggcacaaaagtgttctctttcctccttgacttctttggaggagctgaaaaagtcacgagctgcttatatgacctctcagacggaaggatcatgattcctcattacaggtttcgtccttttatagcaggaagccatagcagtgaggaaactcatcttttctggagaccaaaagaacaactggtttatatgtaagaaaatatgaaatacaaacaaataaattctcaatgactttgatgcattagcaacctgctgattctccaacttccccaaacacacaagcctccattgacctaaaggttcagtcttagcttcatcatcaatacaaactccatcatattcccacatttcttcaaatccaatgatagtgtcattctacccactctcctcatctttaagaggcattgtccaagagtcattatcgaagcgagaatcaacatatatttgctgacaagtcattattagacccctgcaacaaagattgacattagcaaaaaacatccttccatccttttctagtatgctaagataagacatcctagcatctactcttctcttcatgtaaattaatggagcaggccttttgaaaggaccagcttcttgtaaggtgacatgtcttgaagaaataacgggaatatagaagtactcttggtggtagaggccatagttactttaagtgatgttgtcaatgtacacactgaattgattgaagtggtagaagcaattattttttaattaggacttctttttaggtacataagaagttgatcttatgaggagttagaataggccaattttacaaaatccagtaaccattcaaatttatctgttaagggaagaccccaaagtaataagcaatcgacacaaaccccgggtaaagaggcaagaatgtacccacattcttatgaaaccttgaccatgcactacaacaaagatttttggaacaattaggaatcgttgtccttggttttctaatgaaagtctcaggtagtgagtacttaactcttaatagttcaaattagtgttaaacaagaggtcttagtttaaaggcttgatctctcgggtcctcacataaattagcagcagtgagtaactcagtggctatgacttttccaccatcggccttgtctagatctttagacattggcactgtgagatttgcacagatgaattgggttgtgtctcaatcatattcttcaatttttcttataattcttcacacatgaggcatgaatactctcaacttgaaacaactgaatatcaactcaattcagctcaaaatagtttttcctagcaaaaaaagacaaattgcacctcgtaggaaggaaaaagttcaactcaaacaactcacatgaaaatcaaatttttaatttttggagggcttcccaatgaagtttaaggatttctaacaagattcaaaatcctgaaattgagttttagaagaggagcagaagaaaaataaattgaaaaaacaaattgaaatgtttgaagaaattaccttaaaattgaagaacagctgaaaaatagatgaagcaaaagatcgaggcttacaattttactatgttgggcatgtggattgaatgagaaaagagaatgaaggagttctctctttatagctattgatctcctctattcttaggcacacaagtagtaaatttaattaaatataaaaagataagagagagagaaaatcgactatgttttcacttttctctcctttctttttatctataaattttgaattcccttgttccaaagggaagaggaattcaaaattccttgtttaactagaagacattaaagaatagaaacaactgtgtgagattgcaaaattgatgctcacttggtagtttctagagaaacagacttagttcacatcatcaagtcaacctcacacaagtagaaagttaacttgggggaaatttttgatcaaaaactgaccctatttacatgtacatcaatgtttgactcatgacaagaaagaaaaaatcctagagttgagtagtcccgagtcatagtagtcgacctaggaggggtcccaagccctacgtttacgttaactccaagaactcatgaatgggtgtttggatccctctaagttgttccggtcggaattaattttaccaggatcttannnnnnnnnnnnnnnnnnnnnnnnnnnnnnnnnnnnnntgaacttctaaaacgatgaataaaaacacataaaagttaaga

SEQ ID NO: 115115 - DNA, 2047 bp, Cannabis sativa
ttttatttttattatttattccatgtgtgcctcaggacaggaaataagtaaataaaaacagaagaagctttcacataaatagtaagtctttttataattctttcgttgtattgtaaaaagtgaccaagagtctagactctcaaatcacttgggggtagcatgtattaagtatctctttaaaattacaaaatatgaattattaataagtatgggagtagaaagcatcgcctgaaactgaagcctcaaggaatcagaagtaagttgctatcttacaatatttaaagttaataaattcattaagtcaatccatttagactgaacaatcacaaggaagttcaagcttcaaaaatagttaagccaaggttaattaactacaaaaaagttcaagcttcgagaaaaaaattaaaaaccaagaagaccaaacttttggaaccagaacctcagggatccagaagtaagtgatgtttgttaaattttgagaaacataatttgtcaaaattctaaggtccaggccattggaacaaggatcccaagaaattcaaaagtaaacaatttattaaagaattaaaagtctaagtacaaaagttgaaatcctatggcccgtgccgttaaaattaaaacctcaaggaattcaaaactagactgacttagcaaaaggaaattcatttaagctatgatatactaaatgagataaaaagtagaatgataaaatcagtctaagcctccagaaggttgaatatttacatacaaaaaaaggccctcgctgtaagagcacaataaattatttttgcgaatgtaaaaaagaggaacctagtccaccaaaaataaagttcaaaataaacaagagaatgattctactattttttctttggagagttgatctgaccttgcaatttccaagattttcttgaggaattcatctttctcttccctaataatatcctaactttatcaaccaattgcaaagttgacggagagtgactattagggaatgtgaaagttcttctcaatctctgccttggtttcgaacagctcctcctccacctatttcttctccccttctagtttctttagctctgcctttgcattttcgtcaaagtttttaagatcgcgctttgcctgtataagcttcgtagagaagttgcctccactaccgccagtatgttcttaactttaatcttggcaccctctgcttgagattgaagagtggtctgatgcaaaacactcttttctgggttatgaactttgatgatgttctcattagttactccaactcttaatgtttatccttgacatctttcacttgagactctagcgtgttaaacctagactgagatgttgtatatttctccttgtaatcatctccacgtttttgctccttcctagcctcttccttttaacttgccacaacattattgagggacgccttgaccttttcttggactagaggttttaccaaatcattagcctgagatttgtcttcgtagccaaggttgtccttcttctggtcagacatggctcgctccctcctaagattctccagctcaagagacatcttggataccaccatggagcacctcttcgtcaacaagttcacctagaagaatcaacaatgattaaaatacaaacacaagttttaaaaaaaaaacggactatcaagtgaggttaaagaaacttattccggctggttgatgtttaagacaatcaacgataaaggtcagatcctcattagtcacagtagcccatttctctgtgccaagtatgcaatatgtagaagcggtttgatctagaaggtcagatgaagagggcattagttcactgccaaccttagtgtaacaccaaactattataggcgtgttagcgtgattcttaacatactttgcagttggtagctaatcaacgaggtaattggaaattgtgaataattaaaatttctcttatttaattaaaacatggcatattatacttataaaattccaggatcccgtttacaaaatacagttacaaaagtaatttactattcatttacaaaatatttgtcgcctag

SEQ ID NO: 115116 - DNA, 1852 bp, Cannabis sativa
gtaaaacttaaggagtacaaagaaaaagaaaattgaatttgcagaggtgtcattgatgttactttttatgacaccgacagagttgttgttttgtgaaaacctatgtcgataacaacaacaataacaacagtggtctttgtctaagcccataacatgtttcaaccttctttgatacacttcaaggtaagaacttacaagggtgttacttttggccttggtgcacatgaaccaacaatagtcaaaaatagaaactttgttaacataaacaacagcaccataattgagggttttgttacctaaaaagaagagaattattcaaccttagaatcatgttcatgtccttagttgactttaccataccatctcataattatagagtaaataccactactaattttaagttaaattatttctagagttagaattagaaagatgaaagtttaatattagagtttcttttatgtactcaaaattattcaaacctcgaagggattgattttattaagcgtcatatcacttcttctgagtaaagactctaatatagagaaacaatccaagtggcccaaaagagatggacaactctgacatcattaagagaccccattagtgattttgatgccttgtctctcttctcttcatttggccaagttttgccgacaagtttgttttcacatgcaaaacaccaaacactcttttggggcctcatttctatttacaaaaccagaattatagatgaagaacttgatcatcaccaaacaaattaacaaataataaaaatggaaatctaccaaaattagccaatcaaattagcatcattggtattgcacacaactcatgtccatcaatctaaaaattaaggtgattaaggaaaggatatgttacatatcaagacagacagacagacatataccacatacccaaaactggtcctaagaatagtatatatatataatagggattttgaaaatgcaaaggagaaacaatttaacataccaaacacctatttaatgtaaatatgatctaatgcaaaaaaattaaaaatataggaacatgtccaatcacctcaggttattaagtaaaaactgaaagcaacttgtacaacctccaagatttgataaaatttctttcatgattctatagcaacaccagcagcttgtcgaactctacgctgatgaacatcccaattatacacccgagcaattgtgacctgcataattagagtccgataagttaaattggagtatcaaatacttttgtgcacatgcgtagacaagacaaagttaagatatgatttccttgtagaaaacacagatatacagtggttgtagaccagctcagaaacatgtgtttacgatcacaggctaaactgaattaatcgtaatgccagaaattaatgtttgggagattttattacctgggtaattgtcacctgatccctcaagaattgtaaatcagccacaagtacttctaaactagctttagcattatctaaattcttttgaagaagagcagtggcctgcacgagatagttatacgagatcttaacattgtgtctacttaatccagacaagctattccacaacagttttaaaagaggaagaatagtgtacctcttcacaagaatactccaacattacatttgctccaagccataagcacactgaatcggtatcctcaatacgagctcgggagtatattccctctgagacttcaaagtctgtaataagtgcctgcagccacaaaatacagataagagaaatagtctcagtaacgagaatctactttagagaaaacaactccaaattgcaaggcatatgaacttactaagtatcagcattacaaatattttgta

SEQ ID NO: 115117 - DNA, 3583 bp, Cannabis sativa
gctgctgagattcttttattatatggttaggcaaagttgggatttccctttgggagtttgatgagttaaacgtgccctgatatgcgggaggctgaaaatgtccagctccaccagttattggttttgatccaccctgaagtcaatgaaggcatagattgattattatgattctgtactaaagaagattagaatgtaatggccccaagagatatagaaattacagcattaggtatgtaggtacccaagaggtactcttgggtaggtcatttatccaatttcgagaaatggaattctaacaacagtaaactgacaaagaaactttcaattcgagtttgcatgcattcgtgaagaagggttttccctctaagggatggcagagtaggagaagaaaactgataattttttaagatattacaaaactatgtcaaataaagctcagagacagggtaattgcagggaatagaatcaactaatgaaatgtgtaaaaatagttgatagttactgatatatttattttagtgttgtgtgaatgaaaaaacatatagataatttgtgaaggtaccagcaaatcttcgtgtcttttactaagttcggcttcggcattagaagaatcccattccagattgtactctcgtgcaatctccttcaacactttgagtttcacctctggtgatggagcactaactgaaagcttttcgattatctgtagttgcaatatcaaacgaaatggaaacacatcaattttacaagtacaaacactaaacatatatattacaaagtggcaatgcattaaatttacttaacagtacggtttacgccggaatcaggacgaagctcagacacagatgagacaaatgcctttccatacttagtactaaacaaattcttgataagcaacaaatcagggacatctgaacatcgaggagcagcaaatattatacttgatatagcttcttgcagctctgttgggcactccctgttatgttactaatgattgtcaaaacgccttagatgacaaagaattcatgtaagtcctagttaaactaaaggacaatacaaagttttggggaaaaagggagagtgcaagaattaaaaatactattattattggtcatactagaacatatagcatacatttggaaaagcattcacaataacatatcctacactatgagcatattgtcctatcaaatttgattcataagagaatgttaaggaaaatacgatcccgaattctactcttatcaagtgtttgacattttctgtcgagtactttaaaacgacgtaacaaatttcttaattaaaaactttctattgcagtgtcttttgtataataatctctaagaaaaaggtataatagtagcacacaatacttagagagcttgaattcatcaagatgaatgctaagacagaaaccaacataataaatttatacagaaatagattggcacctccaaccgagacttataaaacataagagcaacctattgaaaagaaagcgtgtactacatattgaacattcacaaaatactagcttgtttcaaaaccttgcatatgtgatacaaaacatatggaacaagggttatccttcatttctattatctaagatgtatggtcatcttgtatatcaaatgtccaagaacggcatgcaacactcatctaaaatttaatttgaaaattgttaaataggtggcttcacttcgatcacattcaagtcttcctgtctttcatcagttcatttcctcaattacaaataccgcactctgcagcttgttcttcatcagttcatttcctctaaattgttcggtgtttaagcatctcgtaagggggcatctttacaaaatgataaacaaaggacaagtgggaagtaaagtttacagaaatttgtaatccaattgtttctcccttatttgtggaaacattagattacgttctttcagaaggacagccaattttacagtattatgttttggagtgatcaagattagacagttaggagataaatatatcaaaactattagaaattcttttgagctataacacaagccatgcaaatttcataaactgtccacaaaaaagaaatctctgataacaaatggatttacctctggctatcaatgatgggaacacgtgcaagaataaattcacagaagagctctaaaatctcataggcagcccatatattttgttctcttatgacatgctcaacctgatcaaaacaccaattgcagaagataccttaatttaaaacaacaaattcatatcaaaagccagtaaaatttaaagggttacaaagtattcaaggcatacccgaattcgagctatagcttcttggccagtctgcaaaaattgagctatctctttgcgcataagtttggtctgtgaatctctcttgttttgcaacaatttgatccgtgcaatcgccaaattcaaacatgttttgcttcaaaaaaaattcaaaacaatgtaaagaaaggaaatttctaaagacattgataagttgcacacaaaactaaactgaatttcgccaccaaatctgaaatcgaaagaaacccacatatccattgaagattacaaagtttttgaccaatcaaattgtaaaaacaaacccctaaatttgtttacagtgattcaaattcgcatcaaatgaattgattcattaatgaaaaaagagagaaaaatggaatgtaaaaactaaccattttgcaccaaatacacctctgttgaagagttggtttaggagagacattgaagactaaatcagagagagagagagatttgagttgaggcagtgtttactattctagtatgaatctctctgatctaccattgccaataaagattctcaacactcgagctgtgtgttgtgttgaagcaaaaacgaaggctttttccccacatttcagaagaaattatgtgtatatattttcaaataattttacaaaaataacgcaatggatttaaattacaaatatagcacattttttttagttaaatgagaatttttagtttataataaggatgcacaatatttctataggtacgacgctttttgggaaagagcccaaaaataagtatgtggaggtttaggcccaacgtaaataatattataccaatgtagagataggtgttgtccgatggtcctaacaaatggtatcagagcaagatctaaaaattagctatataaataaattctcaaaatgccaaacaaataagataagcctcagtccttacaagtactctagtagataggcagtgtgctctgaggagttggcctaagaaaagagcaagaactctcgaggtagagtatacaaatggaagatcgtttgaggtttgcctaagaaaagagcaagaactcttgaggtagagtggacaaatggaagatcgtttaaggttggcctgagaaaagagcaagaattctcgaggtagagtggacagatagaagatcatttaaggggaagcaatgtggtcctttgtttaaagggaggattgttagatatgtaaccaaagtcccacataggggtgttcatccgattcaatccgcacttttttggtcaaacaacatccaatccgcactaagtgc

SEQ ID NO: 115118 - DNA, 3295 bp, Cannabis sativa
ctcttcttcgagaaagtcattgttttaggctgctcatttatacgtttaggtgcatgtatagtacttgatattgttcatctttatgttagtaattagtaatgtactgtttaagtttgcatatttgtgagaactatactactcattctaggcttggtgtaatgaataaacatgagctgattaggttggaattaactatttgggcaagtttttggcgttgtgttttggatatgctccctagctgatgctggagagtggagatatacatggcttaggttttaatacaatatgctgatgctgcttctttctctgtatgtatgagtgtgtatgtatgtagtgctgatgagaagttcacatctttgatctttattgtttaaaaattgttaagctcttaaatttgtgagaactatactactctatgtacgcgtaggttgatgaataagcattagttgattggtttggaatcgacaatttgggcaagggctttggcattgtgtattgtacaagccccgtagttgatggtggagaaatggctttggtatgaataccatgtgcttgtttgagaattgacaatttaaacatggcttctgcattgtctgcgcccttggttgttgttggagacattaatgaattacgaatacttaatgcttgattgaataatgaacgtgcatagcttgtaacaataaaaatagtaattagtacaaactttatatgtaggcttatttcagtctcatatattgtttcttccttgtttggaaatgtgtgctttgctgtatttagctccctttgtttattaccaggtatcgtttgaggtccaaggttgagattgagaacgttggggaagacttctcttgctggcagcgttatgggggaagccttactaaaacttcctcagatgtagaagagccagaggctgctagcgttggctggggttccggcgttgatcggtctggggagtcagcttcccatgggaacaaacatggaacacagtggtacaaggatcctagattggactgccttggttttaggggaatcttcccatctaatacaacacgtgagattctgagcctgaggtgtttttcctatctgtgctagctttagaccattacagaagtttcaatgtgttgttaagctataatttactttgtcctgctacagcacctctggttgaagctgataaagaaactgatgaaaagaattacattttatggagagtagaaaatggagttgcagaaggctcaattgagattccaaaaggtgcatatctaatatctttttctttggctttcgtattacctaatctttacttacaaactgaaaagcgtgatttgtgtttgacatgttaaatcagttcttacattacaattcaagtggtttatgatgttgtacatatgaaataagaaaaatgaccgagtacgggtagctcaaaatgttcatgctcgtactttgttctcacaatgtagcaccggcatagtaattttgctacagtgtactggttcttaatatggttagacagagagcctagtttaaaaaagagcaaaatctgattctatcaattacttttctcaaagaaagttcttgtcatatacaggtgaggcaattcctcttgaatacaacctggtgggactaaacgcaataagctttgacaaaggatgttatgttggccaagagtttgtagcacggacccaccatcgtggggtcattcgcaagcgcttgcttcctttaagatttgttaatagccgtggagaaggcaatcatctcatctactacttcccatttgattttacttcatgagttgccctataacaatcttaactttgctgttctattctctgtggtctattcagaattggagcagaaaatctctcctggctcagaagtagttgataccgagacaggcaaaaaagtcggtgctataacgactgtgattggatgtcgagggctgggtgtcctgcgtctggaggaagccttcaaaagatcaagtgaattaaccatacaaggacaggaggatgtaaaagttgaggctacaaggccagaatggtggcctgctgaatggtttcaagaatatcaacaggacagggcagttgcttaagaaatttggtgttaccagtttcactgaatgaatatatatgagcttgtacttggttcgtttattcttttacatagatgaaagctgaaataatagaaagagtaccgggaaggaggtaataaaatattgaaggtgtacttgtatagattgatctcatgatttcttttttctttttttactgcttaccaatggtttttgggtaaggaaaggtaacaaatttttaagtagaaatcatggatttaaacctttaagaaaatgtcaaattgcaccttaaaaggcataaacagtaagagcactctatttgttttatatttatagaatattatttattactctaaacatattttattaatttttgaggttttaattttatttttttatatagagatatttgttaatattaatattatatatgtgaaataaataaaatatattaaaatttttttaaaaaaagaatagtgatgtattttaaaaattgtattgtggaatgtaatttaatataaatgaaaaaaaatggaattttagttatgtattttagaggataaaattgagaagctaatgagaatcctctaacatgttattatttggtgtaagtttagtgtagcatagtatttaggtgcctgaaatgagaagaaacaacacaatagtaatagtgaaaaagagtaaagctatttaaggggaaacgaggaaatattttatcaattttcttattaagttgccacaaatctttttattgaaaaaagtttcaacagcccagttcttcaaactaaggacctctataacttctgccgcatttgagttttaatctttttcataaccttaattaaggggtttttacaccataaattgattttttttttatatatatataatttttattgtagggtggaatttttttagaaaatattgtatttttgttcaaaaatgctgtgtaaattttatattttgtactgtgttaagtttttacggttgtttcacagttgttttgctttaattgttctgttttgttattttatggttgtttataacaaaatagtatttttgtaaaaaatttcgcgtaacagtaaaattgtaaatttttactcaaaatttagtatttttgtaaaaattatcttaattaacgcaagttagttcaagttctcccaacttagcagatttagagtcaacaaaattagattatttttattttttttttttattctttttttt

SEQ ID NO: 115119 - DNA, 2627 bp, Cannabis sativa
  modified_base (2600)..(2601): a, c, t, g, unknown or other
agaacttcatttcgacttttccatatatggtagattcactaaattgtagcaacaatggtcgtggcacagacctgctgctgaaatctggtgtgtcttgctcgtttgagcgttctcaagagctgaagtagaggggttgttgctgtgattctgcatccaagccagttgacagtagcttcaagatattttctactgaaatggtattcaaagaataagtgcaaattgctttcatatccttgctcacaaatcaagcatctcttatctgtggcaatgctaattaaagcaatctatcctttatttgtagtcgattaagtacaacaagccaaataaagaaacgatgtttaagattaaaaaatccccaaacctctccatagcagctttgatattcatatttcaggacaaccaacgagtatccttgctgcattgtgtacctatgttggagaaattgttgcatattgatatgatgttttaatctctttaacatgcacaatttgttgccagtaccagctgctttgggtggaactcctatagtcctaccaatcgcttccttttatgtatacattatgcacccatttgacccacaagttgtcctgctttgtggctactgcccaaacatatttacgaagggcaaccttgtgacactgttttagcaaaatcatgatttttcccaaataggaatgtattgctattaaaactagattgatgagtgttgttcttccagcaaagaaaatatgttgtgagctccaaattcgaatcatgagaaccatctttttaattaaactcgaacattcagcttgtgaaagtttccttgagaaaataggcaccccaaggtaccgaaatagaagttgacttcttgcaaagccagaggagtctaacacacattacacctccgattggttcattcctgagcagtatatgaaagacttctcaatactttgttttaagctagaagtttctagaataatttaagccattgaagtagtcaataaattgacttgtaatctccatggaaaaaaagcaacacgtcatccgcaaaacataaatggttgagcttgagttcctttcatcttccatgaaacttgaaatcttttttccttcctactttatccataatccttgataagtattccatatcaagaataaagataagcgaggacattggatctccttggcacagtcccttttttacttcaaaaaagccatggagttcaccattaatcattagactgaacttgggagtcttgacacaaatcataacaagttggatgaattcttgtggaaactcaaacacatggagaacttcttcaataaaatcccatttgacagtggcgtacaccttctttatgtctaatttgatcatgcaattagggctagagcttgctcttctataataccttacaagatcttggcaaaccagtatattgtaagcaatgtaacgtccttgaacaaagccactctgattttgtgatatcaaatctattaaaacagatctcaatttagaataaataagctttgttgcaattttataaataacattacaacatgctattggacggtactcacttacattagctggacatttggtcttaggcaccaaggtaaggactggtgtgctcaattcttttaaaagcttccctatttgtagaaaatcaatcactgcctcgctcacttccttcccaactagatcccaattgtcttggaataaatagcttctatatccattcggaccaggagctttaattctaggaatttgaaaaaccattttcttcacatctgcgtgtgtaaaagcagccattaaaatttgcctatgttggcttgtaacagtcagcccctgcttaataatactagatttcacagctcttcttctctccattttagaatttaaaaaatccctgtaaaacttgaggaaagatttactaacctcctctggtttcttagttcattcgccatccatatccataatagaatatattccatcaattatttttctagcacgaattgaagaatgaaaaatggcagtgctatcatctctatctttgagccatgttactttggctttttgatgaagaaaagatagcattgccttatgaatgacttgataattcttcatagatcttgcctctttttcaattaattcatcctgtaggggagaatcttgcaattctttttgacactcaatcatctcttgaaaggctttggcatcacgttgttgaatgccttagaaaccgattttgtttatgtcctaaagaattcttttcaacctttttaatttttgtacaagagaatatattaatgtccccccaattggcgtcttccaactaagtttaatcttttcttgaaaatctggggccttactccacattcgaaagtacttgaatggggttcttcccattctaatctcagggtgcaccattaaaactcccgaactatgatcaaaattccctcccggcaagaaaatcacttatgccaaactaaacttttgaagccataactggttccccataatcctgtcaatttttgaataaattctcccttctttctcttgtttgttattccaagtaaaaaagttgcctgggtatttaattgttaggttttatgccctnnataaaactctttacaatctgattagt

SEQ ID NO: 115120 - DNA, 2676 bp, Cannabis sativa
agaacatcaagccccttctcaatttttataagctcccaacaattagtttgagtaagattggcatcaactagagaaagttctttcttcttattaataatggccttcttgtggcggtggtgaatatttttaatccaagaactaagcttgttagccacgaccccaatgtattgagtgacattgaggagtgggtcagtgtgtttcagttgccattcactttgaatgatattgatacagtcatcttcacttgcccaagtgttctcgaagtggaaccaagaacgagaggaaagatttttgttcaaatttggtctagcagtagtggataaaacaataggtctatgatcggatccaataaaacatagatgagagacatgattatctggaaaaagattaaaccaggaatagttacaaacaaatctatccaattgtttttgaacaaatgaggaattataatgtttattacaccaagtgtattttggacctaagaaccccagatctaataaagaatagccagacaacactttgtaataattattcataagatacatgggtctaggggcgccaccttccttttccgtcatagacaaaattttgttccaatctcccctgtagacccaaggaagaaattattataatctactctttgaaggagtccaaaacgcatgacaaagtgaagcatcaggttgcccataaatcctagtaaaacgtgaatgggaaataccaaaagagaccaaaacttcaatatggcctctcaaaaaattgagcaaagtaacatccacatcaaacgaaggcagacacttctacccattctttcaacaaccaattttcataaaaaaaacccaaatgatcacgaagcaaatccatttgagttagagagccaatagtttttgacaagaataaaatattcggattgacattccagacattggtgtggagcactcaaaatgtcctttcattttccacgccttgagcgtcccacgccaacacattcataatgagagacggccctgcaaagcaggcaccgtcaatttgtaaaaaagccaccccattactaatatccaccttgtcgagtgttacaaggaaagaaaaacaatcataagacaaatattcaactgaagtaacagaaaaagaagagtcaataaccttcgccgtaattggagaagaactagcattcacatttttatctggaaccaccaaagttttaattaatggaggatgatcaggtgcttcccgcttagaaaaattttgcgtgtctaaagatgggatgaaatagtcaaaattgagagtcgtacattcttttcgaccttttctcttagtgttgcttgagaaaattgagatagggagcattctcctcttaataccaactttagaaccagtgtcaacttttcccacattaaagccatgaaaaccatcagaagtagtcattataaaggcattattgtccatcaaaagtgccatgcacttcatgcgaaaaatcacatggagttgggtcacaaaaaatgagtggattaatagcatgcccactactatctctaagcccataaccaatggatgaatgggttgtaagaccatcaggcaacttattactattaattggatccttaaaaattgataatgtacaatgtgctccctagattcaaataaaaaattatcataattcttaggttgactatcttatttataggagagccaataattaaattagaatccaaattgtcaacattcccattacaagaaatttgtaatttatccctaatttccttattaatatttttaagattaccttttttcaaaataattatttttcttttattttcctcaatcacaggcgtgatttttgcaccatcaaaatctggcttagatctatctgatgtcgagatccataaacaagaaccaccagtgttttttccagtaagacgaccgtgactactcgagccatcagattggttatcatttagagatcatttaacaggtatcagacgctaaaaaactgacgtagctttaatgttatcaccatatttccatctatggccactaaccacagtcgggggaagagaaatacattcccttataggatggccaactatcccgcagcaatagcaaagctccggaagtctttcgtatttgaatagtatattagattttagttctcttttaatcaaactgaccttaaggagttttggaaggagcttcgagatatcaatgccaacacgagcacgaatgaattttcctaaataatctctcgaagagttagtatcaattttggtaacaggacccatcaaaccactaaggactcttcccatatcctcaatcatacatcaaataggtaaaagataaaattgaatccagaattttacccgatcaaatgcaagtttcgtataaatgcctatgcccatgggaacctcaagagccaacaattgcttctccaccagccaaggaccaccaccaaagactttacgacgatctatcaagtcagaaaagcaagagaggaacgtgttattaccaacacactcaatcttaatcgtgtcgttgattttccagaagacactcatgctgttgatggttgtaattggcatgcataaattattttgactgttagttaagtgctaattatgatttcatgagctgtgttgtcggaagaatttagacaacactaaaataaataatataataaaaata

SEQ ID NO: 115121 - DNA, 927 bp, Cannabis sativa
catttcataccagcaagttttgttccccattttgaaccaaacctcgaaactcttacctccacttcacttctcagttcactgcccccacctccactcctgctttcggtttttcgtccaccacctccaccttgaaaacctttggtcttgttccctctcttaatcgtggacagcgatcctccaccatgaaaatcccaacaccacctccatcggaccactcgagaactcatccttttggtgatcgacctcctctcagcgtcaggtataagtttatatatattttcagattagaaaaaatatcaatagcttggcatatttttgttgggtttgatattgtgtttgggtttgattttgtgtttggggttcaaacttactcacatccttcaaatcttttttctttgcttgttaagacgtttccaatcccacaacgaaaaaaaaaataatagcaggaagtcctttctatggtaaaatttaatattttgatgattctctttatttattaagggatttcagtcttggaagttattgtttgagtttgcctccgcagattcagtgaagatgagattttttttattttactttttctttttatttttttgactgatttcaattttcatttattcatttaatatcatatttcatgtttcatgatgatgatgatgttactttgtacagagatttccttcagaactcatttctagagttagttactaccattttctggtaaaaaaaaaccaagttttttcctttggtattgcaggcatacaattggaactgaaggatatattacaccagaggttctttcacgtaagagtatggtggcaaagtaaattttcgttttcctctttttgataatttaacttttagtcggacagtataatatttatcatattcttagatttactaacaagtatgtttgattaacaacct

SEQ ID NO: 115122 - DNA, 1846 bp, Cannabis sativa
aattcaattaatattacaatggcatacaacagctcaatattgttgatcttcaagctattaatcttacaatatctctccgtcctttgtgtttcacaggataactttgatttcttctactttgtccaacaagtgagcatatatactaatgatcatatatactaatgatcataattactatttatatatgacataattatcttgttgcatacatatcattaaaactaattaataatgtcttttttaaaaaaataattaatattaattaataataacttcaaatctcgcttctggctatttttcgatctgcccccactacttgattttacttttttttttctcttaattttactattgttaaatagtaccatagctaatttctacatataagcaaatatgatactcattttagtgaacaatcaataatataaacatctatattattaataaatatgcagtggccaggagcatattgtgatacaaagcaacatagatgttgctacccaaaaacaggaaagccagcagcagattttggaattcatgggatgtggccaaactacaacgatggttcatggccatcaaactgtgatcccgacagcgtcttctctgttcatgaggtattatatataaatatgataaatatgcccggttttggcgcaagttattatatttataaattatagttattaataaccatgttatgtacatattaaatatttataaaatgtttatattattatacatagatatcagacttgatgggccgtctccaaaaggaatggccctctctaagctgccccagcagcaatggaaacagattctggtctcacgaatgggaaaaacacgggacttgttccgagcaacaactagaccagcatgattacttcgaagcaggtctcaagctcaaggaaaaggccaacctacttaatgtcctcagaactgctggtgtgtatatatataatttatcattaataatgtataatgttaattagtttttgtaaattgtggtataatgatcaattgattaaataatttgatgttgttacaggtattgagccaaatgacaatttttacagcttggagaaaatcgaagatgctataacagagggaattgggcatgccccaggaatagagtgcaacaaggattcagagggtaacagtcaactttaccaagtttatttgtgcgtcgacacctctggatcggacttcattgactgtcccaagcttccaagaggaagatgtgccacaaatgttcagttcgccaaattttaacaacaccatttcaacactactttctacttttatttgcttctctactacttttcttcttatcaaataaaaacatttttattttatttaatgattttgattacgtagaatcaataattttttattagcctcttcttaaattatactgttgttttcgttaacttggatcttgacctgactggtgtgtaatgggctcaacttcttttgggtttatcaaaccaaacagggagttttacttagcttagccctatgaaaaaaaataataaataaattttgatatatctgggtacaattttaatggatattaccctgagtgatattagaaaattttgaaattttatgattaaattttctatttaattagaaaaatttttcatttttacattatatgggttgagattgttccattagctgaaaaaaaaataataaaaaaaaagtttttcgacaaaaaagtgataaaaaaagttgaattagacttaaatatttttcatatgtaaatatatttttgatatagtgtaaaaagaggtattttttgatatagtgtaaaaagaggtattttttgatattttttttaattaag

SEQ ID NO: 115123 - DNA, 3918 bp, Cannabis sativa
aaaaaaaaaaaaaaattagagcgtctagaattaataatttttctattatatatctagtgagaataaagaaactcaaagtagacatagctctattactgtcgcgatacagggagtgaactactacaaattgttgtctctttatttacactcatatctctcatttttgtcaattagcaagccggtttggcttaggggtctgtgtcgagatttctcagtcaacaatactaaatatagtattgtattaaataatattaatacaatacaatataatataatacatataaggctataatatatgatataatacaatacaacacggtgtactaacaggtcctaaaaggtacatcttgcgccattttaatatatgctcaaatagttcatttggtatatcacattagatcgtattgtatattgtacgtatagtattatatattaggttatgctatatattatatttttatataatagtatatgttaaatttttaattatatatatccacatatattatatatatacatatataatttaatattaaacataatattatatttaagtatgatatgtaatacaatttaatatataatattatgtaatataatagcatattataaatagtaaattaggtatatatgcagtcgttaagagtgtaatttgagtatagtaaaatttactcttctggtgtagggtttatataattatattattattctttaagctatctattgaggatcaataacaaagtatacggtgataaaaacaatgtaataattaaaataagtacgtacgtacgtacccatatcatgttgtgcatgactaaaatctgtatcttttattacaataattatccactgttcaaattagtacagttgaagtggtcagaatataatgctaacaatattacaatggatgtcgtatgaacttttctaaatgatcaatcataaccgtctttggagaaatttaaatttagtgttaaattaacattaaaaaattactattttaacactaattttttttttcaattccaaccacaacactaaaatttacactaaattttattattttattaatataataaaaatattttaatactaaatatatataattatttaatttttttttcttaacagtattatttaattattaaaaacttttttttaaaaaaatagtgtgatctaccgtggtccaccaaattaaatttggtgagacaccgtagacaaatcaatttatgagtatagttttagttctcattagagtaaatatagtgtgaaactacactatatagatgtgggttggagatggcctaagatttgtgatttagctatacgtacgaatttctaaataaaataatgttgatttgactatatatcagattaatgtatccaacacgtaaaatattgtataattttcttcagtctatagagccaccatgcatatgaattatacatattactgctgtgtaccaaacctcaagcctagctagctataaatttataacaaaaccacccaattcaatcaaattgtattagcaagtttttgtaaaaattatatataaatatatatatgtataatattatattgtagtaacctaaaacgttcacgtatatcatcaaattaagtatattatatagtattgaaaagttcgatcagccacaatgaagattcaaatagtaatcttctttactgtcgccctagctttaatctttgctgcaggtaattaactttgtagatagatttatttataattacaatattttattttagaataattaaattttttgtccaaaaacttattaagaaaatcctacgtataccctcctagaagaggtgaatcagtgcacccctatatgattcctcattaaaaaatatttagtctaatttttttttattgttgtgtatatatgttgtaattattaaaaatatgttgcaaaattttgaaaaatttaaaaaaaattaacatgtaaaaaataaggctcaaatagtcacgactgactcttttattttataagtgtgtaaaataggctgattgaacgctattttctagctataatgtaaattattcaaaatttattttgcaagatgtattaaataaatataacgtatatttgtactaattttttttttcctaagtgccgacataaataaaaagtacatcaatatacccttttttgggagttgcattatagaatcaccaacataattgtgcacatgaaaaaatatataagccatattaataatgtttccttaaacataatgatgatgaataattagctttgttgtgcctaaactttaataaccaatactaaattgtgcttttttttttaattgaaattaaagataatttaaaaattctaattttctattaattatataatatcaaagaaaaatcactacaattccaatacaattatttttaaaattatttagaactctctcttttaaaaaaaataaaaaataaacgaaaaagttttttagtgttcaaaagcaaaattaaatttttcgaaaaaaataaaactcaaatttatttatatttataaactaattatctttaaattaaaataaaaactatcaacaatcaactcaattttcaaatcatttaaaatatattttaaataatttaaactatttcaaaagaactctattaaaaatgataaaattaattagtcaaactgatagagattggaactgcaatttagtctcaggtggttttgttactgtgcaggccaaaaaattggcagattgtaaattgtttgaatgaacaatataattaccttatttaccacgtcaaaaaaaaaaatataagaaattaattttgcctagacaaacattgatttgtccaaaaataaaaaacaaattaattcataaactttagaaatgaaaaataaataaaaatgatttaaaattaaattaaaataattgatttaaaattaaagtaaaatatttaaattaggcatatttgtttggttaaactaacttcttttttactttagttcaaacttattgattttatttctcggaaaatatagtaatagtaattattttttggacaacaattatatatgagtaaatattattttggaccttgtaatttgcaaaagttactaattggaccctctattttgttaaataataaaatagatcctgtattttttaaaattatacaaataggagtctaaattgattttttgttaaaataaaacttaataataatctgatctagagatgttatgaaaaaactggttacattttctgtatctgttcgtgttaaaaattatcttatagttgataattggttatattaaaaaataaaattattgaaaattgaactcagagtcctatttttactagctattttgaaaattatagagtctattttatcatttaacagaacagagaaagtctaattaataacttttacaaatactatttaccgattatatattattatatgagataattaaatttatacctttttttaatacgtccaaattaatagtagaagaataaaaatttatatttttcactcctatactctcctcttaactcatgtataattatccaacttcttaaaagtagtacaaatttagttattatcaaaatttacattgagaggtgaaactagggcggccggtcaaagtggttcaggagtttagggcaaaaaattaagattacgtcatttattaaaaaaaaaaaattatcaatcaataattcatataatttaattttcagaaaaaaaaaattataaattctaaaataggcaataattttaaagttatttgtattaggacacaagattttattaggtttttaagtgttaataagtgtatatttactattatgaatgtatattatacattataaaataatatatattataggggcttttttatttttatagttcaaaacagtttttttttttt

SEQ ID NO: 115124 - DNA, 2019 bp, Cannabis sativa
  modified_base (31)..(31): a, c, t, g, unknown or other
  modified_base (511)..(511): a, c, t, g, unknown or other
  modified_base (568)..(568): a, c, t, g, unknown or other
  modified_base (637)..(639): a, c, t, g, unknown or other
ttttatttcataattaattttaattattaantaaatagttttgacatttaaatgattgaaattggaaaatatggcatttgtgaaagaaaagaataaattgttgaatagaaatgtgaaaattttaatttagtagggcccatcttatgggcggccacttaaggtgaattttggccaatttttatcattattttaataccatataatttaaatctaaccctttgagaaatcctataaaaggaataagatggttctcattctatccaacttgttattctagttttcattctctgttagacaactagaaacctgaaaacctccttctatagaatttgaacccttttccctctcttcttcttcatattttcaagcctcatagtgaaagagtacatgcccacccatagcaagtctagtactcaatcatagtgtgtaagattgtgtagaatccaacacttgaaggagaatcgagctcagatcttgataatactttgcgacagaaagaaacaagggttanagatctgagtggaatgagacatataattccgatgcaatcaatgtaaggtttcttaantttatatgtgtttaaattccattattttagaagattcatatttgggatgttaaacaacatacatggtannnaatctagatcttggtaaaataatccccaataaaacattcatgataacaatgtgttaatacaggagatcatccattcgttcaaacaaaagaaaggaaaggaaggcttggttgtaataaaaatagatcttgttaagacctatgataaattaagttggcaattcattaatcacgtcctccaaagcttcaaagctccagaattattctgcaattgggtataccagagtatatctactacttccttcaacatttgtcttaatagaggcatagtggggaaaattgaccctaagtgtggtattagacaaggggaccccttttctccttatctcttccctcgtattttggaggatgctttagataaaggagaaattaagggtatcaagctgagtagaaatgggctcgtatttctcatctttttttttgcagatgacctcattctcgtgggacgagcaaacatactaatgtgaaaggtttttgggagagtcttgagaaattctgcgagtggttcagccaacatatcaataaattaaaaacatttaacttttttagcaacaataccagtgttgggataagtaaacggttgaaggagattttggggattgagggttctactagtaacattaactatttgggactccctctcttcataacccaacaaaaggatgcatacttcaattttgttttggataatctagtttcaaagctccagtgtgggaaagtgaaaactctctctaaagctggacgtgccactatgaaaaatcagttggcctcgctctcccaatctacacaatgcaaatgacaaaactctctaaaagaatggaatccatggtcgatgggttgattaaggatttctggtaggtctataagaaaggtaatcgaggtatttacctgaaggcatgggacaaagtgtgcctccccaaatctaggggttgtttaggctttcaaaaagttgcagagatgaattaagcttttttagctaaatggggttggcttctgacaaatgagaatcaatcgcgttgctgtagagttcttacggccaaatatatgaaaggtaatctcatttctaaaaatgagaaagataatccttatattttggtcccttgagccttcccaccgccctttaccctctctctaaccctttttgcatgaagttctttaattttgagaaaaaatggtgcaatttgaggaggatttaattgtggtgttgttcgtaagctttggaaaagattacttgaggtatttaaatctcttttctattaaattaatctcttaaaatcaatatgtgtaagttgaaatgcatgatattcttaaaatattatagttacgatgatcttagttgattcttcgatgttatatttgtaacgtccccgcttcaagcctcca

SEQ ID NO: 115125 - DNA, 1688 bp, Cannabis sativa
tccaatcaacccaagttttaataaaaccaataaaatttaatgtaagcccaaataaaagtctaacatgtcattgttttcaaaaaaaaaatgacttgtaacaatgtttctttattatactatagatataatgtgttcttgtattgtattgtaggtggtgaccaatggtaaatacaagagtgtacggcatagagctgtggtgaacaacacgaagacaaggatctccatagcagtgccacatggaccgtcggtggacacggtggttgtgccattgccggagctattagagagggaaggccaatctccggtgtactctggcatgtcgtacaaggactacatagaacttcagcaaagtagcaagtgctacatgaaatcctccattgatatgataacgatataaaatatgtactataaactattataatgtgttttgtttagtgattatgttgatggccactttgatccatactcaaatattttgttagtatttgtgttgtaatttcctttacggcttcctggcattgttgatatgttaaaggtcaatacatcattttatgtatgtgttttatgtgttgtcaatgtcaattaaatatgagttttaggccatttggcctttcttaattgttatgtaatgaatggttacatatgtattatgtaatatgtgcttaatttatcgatcaagattgttatttttgtcacatttgaaaaggcatagtgcttgaaatgacaaaataattcacatgactatatacagacaaatatggtagccggctcatgacgtttaatttctcttttttatatacttcaatgctgttctttaagattaaaaacaaagaaataaacttttggccaaaataaaagtaaagaagaatataaattttatattgatttgagctctcctatgaggggaaggggaagctatttattctgtactattgaagaacaagtttacattcagagacaaataacacaagaggtgattccaagtcacaactcaagacaacacttgactgtaaccaattaagtatcattttgtttcagacttttacagatcactttggttgaattaaacttaaatagacactgtaatatataagattctatcatgtcattttggacctaatttctcttttgctcttagatggttcctaaaacatataactatttggaaatctattgctagttgctgtctcaaaactcaaatattgaatttttggtttaaaagttcttttttaatacacggttgcttcctcggatagtttaaaagtaagagaaaaataaaaaatactctgtgaataggattcggtgaagaaagaatacaagctcttacaaaagttttcaacagcaaaaattttgttccaagctttaggggttatatactttggtattcgcagtgcgagttgtttttttttttccgaatcgtgactgtgagatcttaaaacaacaaaatttacactgcaaaaaaacggcatagtgcaatacggcttgaacggtttatactttatcattatcaaacgttataagaaattcaaaaattaatataataaaattgtaatgataaaaaaaattatttaaattttaatatcctaacatatatactaagggaaatttgaatttctatgcttacattaaggaataattttttccctaaacttaaaatggggaatattggtaaaatgggataacatttt

SEQ ID NO: 115126 - DNA, 4686 bp, Cannabis sativa
  modified_base (735)..(739): a, c, t, g, unknown or other
tttcaggacattggcaaagtatgctagtatcggatgtatggggtatacattggactgggactgatattgatcttggtaaagataatataatattattgttttgtgacagtcgtataggcgacggttatagaaactgatgggaatactttaaacgactgtttaaaaacgtcgagaaaaattatttttgcagtagtgtttgtatcgaagaatttttattttattttattttttttcaacaaaagagatatggtcaatttggatgtactgtgagaaaaaataactgtagctgtattatgagaaaatgtagctacaacaaaattgtgaaaaaagagcagaactatagaaaaaagctaagtagagtatttggtaaattatcaattttaaaatagagtactttgcggcataaccctcataagtgtttagtttattgcaactaatccccaattttaaaattttggtggtaaaacctcctaaactcatgttctgtcagcacttagccctttccatccatttttaggtgttaagtgccacgttgtactatccaggtgtacacactgtattgtctacgtggacaatatgtacacatggaacaattttattggtctacataaataaatattaaaaaaataaaaaattaattattttaaaaataaaaaataaaaaaagttctttttctttaaatttttcttttctttcctcagaatcttttcatattttttttctttttcttcttcnnnnncttcttcttcttcttcttctatcatgtcgccctcttcctccgacctcctcctccaccgactctgaagtcccacaacacgcaggcgccaactccgagtcatccatcgatctcagatctaccttctagcaaggatggagcttcgatatgggtgaatgattttccagatcaacgacgaggtggaggttctctatctgccattaaaggtcgcccaccaccaacaatctcttcttcatctatatcgatctctccctcttcttttttaattttttattcggttcatattctcagatctctcatcggccgtcattaatggctcttcatggtggtttgtttcttcaatgggagtggtttcaatgttgttgttgttgatgatgatgatgattctggagttttgtgtttctccctcttttttgacttttttttttttgtttcaggaattaatttattgaacaggtatgaactaagaaggaaacggaggaggatatactttataattcaaaagatttgatatattgattgtttttccaatgagctattcaatgtgggtttgttattattttggagggtttgcaatggggtatagtgggttgaatattagagttagagagagaatctctagaggaaagaagaagaagaccgagaaattttttttttattattttttatttttaaaataattaattttttcattttttttaaatatttatttaggtagaccaataaaattatttcatgtgtacacattgtcagcatagacaatataggatagtacaacgaggcacttaacagttaacacttaaaaatggatggaaaagactaagtgctaataaaacatgagtttaggggattttaccaccaaaatttgggaattgggggttagttgcaataaactaaacacttgttaacgcatatttttgttaactatattaaaacctaaaccgtgatatttttgcacataaaataatagcagaaaggaaagaagtaagaacacagagtttttacgtagttttgcagttaaaattcttcatagtccacgagtcaattttattagatttttgatacagttctaggaccttttcctagatgaattttccgtgctcctatttataattgcatatgagggcagctaattacagatttgactaatattttacaacaataatcccttgaaaccatgggatctgattacatcccacgtaaaataaatgcagttactatttaaaaatcacagctgtgattggtccgcttttaccgggtcaatgtgaacatgtattaaatacgttgtaacacatattgttctgggacatcttgctgggaacatagcaacaataaccctggtagcgagctaaaatttttcccatatctctccgaggttgataatgtaaacctcgtcgttttttcgcttaaaaacataactctccatttgacaatcgcggttcttggtgacaagatgaacttcagcagtcaacatcatttgaatgtcagcttctatctgagagagctcactcaacggagctatgaatctcattgaaagatgtttggagctgattagtgaaggtaccatgagcacgcttttctatagcgagatgggtgtctcaccattagttgtttggatttattcgactgttatacttagtttgtataatatgctttagccatcacatcttgtctacgtctctttatgtgtagcgaggttgatgcctcgctacgcatcaacctcgttaatacacgaggcaacagtttgtatatttttatctcgcgtaagactgtacagtcagcgagttgtaaatatactctgttttcaaatataattatcattacatttgttgattcgtattcttccagtttgacacgtgtcctcctctgacgtgctagccgaattttgggtataacaacacttatgagggttatgccgcaaattactcttctataatattgtgagttgttaagattctattataatgataataataatgataatattataatctagttcattacaatcacaaataaaatttatgttatattaaatttttattttttatatatttttaattattttctaccaaaagtataaatttatatgcatttgataaaaataaattatagtatttttaaattatatatatttttatcacatgtaaaaaaaaatcaaaaattcaaatatataaaaaactctaagttgatgtgaaatattattattaaaaatatataatataaaatattttttaagaaaaaataataaacaaaaagatttaaatattatttattttaaatatatatatatttttaatatataataaataagtaaatgtatttttattacaaataaaaaaggtatttttatctcaaaaaaatgtatttttattacaaataaatatattattgagttttaattaaatatattttttttaaaagttagattgtacaaactttatttttaatcgtatagcttattttctataaaattttcaataaattattttgaaactgtttaccaaatactttttcattataatttttttaaaaaataatttttaaatttttcaaaaactgtactaaacagactcatatcatattgatacaattttgaacaaatataaatatttattttcttcatatggttttcattaaatttattaattgcaccagtacttttagtaggtatatgataattattgaaattatttattataattttgatagtggtatatatcctaacacaaggttaggattagaggaaggaatgttctatgattttttttttttttttttgtaaggttcttgctatgatcttaataaatattatcttaagtcaataaaataaataaaaatcttatctaagagtaggtgaatcaattatgattgattttatctaaacttacctttccctattttttgcaaaaactaagcattaatttatatccactataaaactaatgtacctaacaattgttttttaatttttttttggtaaggtcaataaatattgttagtatttcctcaataaattaaatgcacccatttgaatgaatactataattagttactaatcatttattttacaaatcttataactatacgttaatatatcttcagcctcttgtttaaaaataaacaaaattaaagtttgtttaaattaggttgggctcacctgactttagtaccaaaaataacagtatgattatattttataagtaataatatatgcatacataaatttaatacatatatttcaatgaagaatattaactttttatttttcatcgacttatcttttttcgttgaatgtacatgagttgccttagagaaataaacatatttatttaagatgggtatacattaaaatttaatttgtatatatttctcaagttttatgtaatttatatgtatacaaatcactactcattttataaacattgtttttgcttctctctttaaattttataaaatagagttgcttcacttatacaagtcatcacttagtatatgagactgtaatataatataatattatattggcttatgtatgcatgccacttaaatatttgatttaattttgatattatgaatatctaatctttgatttttcacttaatttttgtttaaaaaaatatgtatttcttgaccaaaaaataagtatttaaatacaataattagattaactagctatctactatcaatatattaaaattaataattgcaacaaaaattaactatttatgtcgttaaaattaaaagagatttataagtacaacaaattcatacttccaggttaccaagtcttaataccataaaataaattttggtaaataaataaatattatgtttagtgattaaatctagggaaatttacatggtatactaatttttattatttttttacatttttttcttttttactgtatttttttataagtttcatactgtagtatactgtgttaagt

SEQ ID NO: 115127 - DNA, 1665 bp, Cannabis sativa
ccccttttccaagaaaaagtttcacaaaatattttggtattgattaaaattcataagtacagcacagcaacctgctcaaccctatcgatcatctaatcatctttagtcgtaacactttagaatctacttaaaaggtattcaatcgtacactttcataaacattgcattttgctaaaaatgaagactcaaactcattcgatgatattgcacaaaatgcagagtgaagtaataaactagctaaaaaaattctgtaactagcatttacaaaaataatttataaatttatttcaggtaattttgtaattgatttttgtattttaatttatgttttattattttaggtgatttatatatttgtttctgttttttcaattgattgtatttggtaactagtttctgtatttaagttttgattttgttatttatgtaattggattgtaagttttagcttatgatttagttctatcagttaattgattcttgtgtggtagtttttaatttagttgctttaagtaaatagttttgtcaatgttagatgttttttaattgattgtttaagtaactagtttttgtgataattttataaattatttgttaacaatttcatttgtggtatgtctatttttttaaaaaaaaagtttttcaatttattatatatatgttttgattgtttagttttattatgtagtatttgtttccctttttgagttggttgtattaggtaattacttttggtgtttcaatttaattgttttaagtgtagtatgtctttgtgtttatttgttggatttgttgtttaatgcaatcggccagtttcagtgtttgatttggctgtagctaatttttgtatgttagcttttaatttagttgtttcgcataattgattttcccgtgttagattttctagattttctattgaggtttttttttaaaaaaaaaaaaatttgttaattgtttgtttattgtagttattttttgtgatttaattttataagtcatttgttaagaattactttgtgtagctaatttttgtatgttagcttttaatttggttgtttcacataattgatttttctgtgttagattttttattattgaagttttttttttaaaaaaaattgttgttaattgtttgtttattgtagttaatttttgtgatttatttttataagttatttgttaagaattactctctggtgtagcttagttttttttaacaaaattaattgattattttaggtgtattatatttttctttcaattttttagttggttatatttagtaattgatttttgtatttaattgtcggttttattgttttatgtaattagtttttaagtttaagtttcttttttgattattttaagtaattagtttttgtgtggttgtttttaatttaattattttacgtaagtaatttttatatgtcagtttataattaattagttatttaatttacgtaattattttttgtagtttgattttatacaaccattgtccgtatatgtaatatttatatgaattacgatatatgggtaacagctagtattattttagggaaattaccttgtgtactattttttaacttttttttttaaatttacagtttgggtttctaaagtggttgcagtgctagttgcaataggagtttctatacgattttt

SEQ ID NO: 115128 - DNA, 1279 bp, Cannabis sativa
ataaattattagaatggcgatattcgtaataattacataaagattcataagaaaaagattgagaaatttgaagaagaagaatgaataatatagaataagaatatttaggagccatagattgaataaaggagctattagttattgattttcttttatttaggaaagaatttgattgtgtgttacgtattatattaattttgttggactttacaatgaggcggtttgacttatttgagagctttatttattttgtgtttaatgtttttgacaaaattactagatttaatatttaattaaattaaataaataatgtttgaggtcactggtgtattgtttaattattgataaaatatctataactatttaaatatatatataaataaatattgatctttatataatataagattttaaaataatattatgcatgatttaagggttagttggttagaaaagaaatcgtttaaaaaaaaattatattttttttagagaaaaaacctgaagagaaaaaagtgccaaaaggctaattaattaatcgtgccaaaaccaaattataaattatatttctaatatagtggaatcagattgtcaaaaattttactatacttaaacttctaaggaaaagcttatggctgagtttggtatcgtttcaattgatattttttgtatttgtaatattgttcatgtaattggttttaactattgtaatcgtttggataatagtatggttcatgttcttgccaaaattgctttttaactttggatcatactatagtttggtggtcggatctcctaagctttttgtgagtgactcttttttagactttttgctgtttaataaaattcaatcttttaacattatcgaccttgataaaaagttccatataagagttatgcaatatagtgttgtaaatacatgtgttggactggactcacctatatttttttatgatttttttaaaatataagtcatgtcgtgctataaaaaatatgagtcatctcgtgttgtgctaatatttttaaaatgtaggcaggggcggagccaggtttaaaagtgagggggccaaattcactaccaccaattaattatatatgtgttattttttaggggaattaccccatatacattttttaaaactttttttttttttcaaattttcggtttgggtttctatagtagttgcaacactagttgtaataggggtatctatatgatttttcgttgcaatttaggttgcaacgctagttgcaatagaagtttctatgtaaaattccgtaa

SEQ ID NO: 115129 - DNA, 2570 bp, Cannabis sativa
  modified_base (76)..(107): a, c, t, g, unknown or other
cacccaatgtaaggtttcctagactttgtacgtgtttatttcatcgttttagacagttcatatttagggtgttaannnnnnnnnnnnnnnnnnnnnnnnnnnnnnnngtaaaataattccaacagatcctttgtctccttatttatttttaatttgctttgaaggtctctctcggcttttgcaacatgaggaggctattggaatgctccaaggtctgtctatctctcgaagtgcaccatccatcactcacctattttttgctgaccatagtttacttttttgccgagctaatgatcgatcttgtggtgctattaagagagcattagacatttatgatcgagcctctggtcaacttttaaatgaagataagtcagtaatgtctttttcaccaaatagaccagctgttatgaagagttcctttagccaaatattgggtatgcctgttggtgagtgtcatgaaaaatatttgggctttcctgcatattctgagcatgataaaaagcatctttttgctgacattaaagaaagaatttggaagcttctgcatgcttagaatgacaaattgttctcaattggtggaaaagaaattcttctgaaagcggtagtccaatcaattcccacttatgctatgagttgttttaaactttcgaagagcttttgtaaccagttggatacaatgatggcacaattctggtggggttcaactgaagacaagaaaaagactcattgaaaaaagtggaaatttctttgcaaaacaaaaatggaaggaggtttgggttttcgttcttatgtccattttaaccaaggtttgctggctaaacaagcttggcggatctttctcaattcaaattctttgctgtcacgtatactaaaagcgagatattttttgaattgtaattttatgatggcaaacaagggtaataattcatcgctaacatggcatggtattgtttgggatcgtgagttgcttgttaaaggattgaggatgaaggtggggaatggattgcaaattcgttgttataatccttggattccaggtcaatcaatcttcacactagcattctattctggtttaccaaatgccaaagttgctgattatattaccaatgatcatgaatggaatttacaatcacttcaaatggatttttttgctgttgatattgataaaattctcactattccattgtccactactgctccatatgattgttgggtgtggaatcacacagttcatggggaatatacggttcaatcaggttatcactttgcatgctctttggaggttcaacattcctcttccacttcgaattcagcctcatcttggtggagtcatttttggggtttaaatatcccttcaaaagtgaagatcttcggctagaaaattatacagaattcccttccttctgctgctgctttataccagcaaaaaataatcacataagcaatgtgtagtttgtgttccaatgcttgtgaatttgtgggacatgccatgtttagttgtaagcatgctaaggcagtttggcgtttttcagattacacttgattttcaggctggaagtaggatgaaggatggagattttattatgtatctgtcaaaattatacaccaaatatgatatggaaaaaattttatgcactatgtggttcatttggtttgatagaaacaacattctccatgataaattggcgctccaacctgctgctattcatgctaaatcaatggcttatcttgccaatttccagcaggtacattttgtatcaattactcccacccctcttccatcagtagcacctcaccaaccgtggcaagcccctccccaaactcgattgaaaatgaatgtggatgcagcagtttcttcaacctgtaataaactggggtttggagcaataataagggactccaatggacatgttcgagcagctctttccgaaccagctgctggtaacttcaaagctcatgaaatggaggctaaggctctctaccatagtctaaattgggctcataacatgcatcttcaaatagatatggtggaatccgatttgttgatggtggttactgctttaaatggtttaacatccagaaatttagacttcaatgatcttatttcagatgttaaaaatcaattgtcttttctccctaatgtttgtgtatctcatgttcgtagagatgcgaaccaagctgctcatggcttagctaaacaagcgttagcgctagataatgattgtgtgtggtatgagaatatctcccctaccattttttctgttgttgtaaaagactccttaaatttataataacagattttttctcaaaaaaaaaaaaaaaactatttttgtgagtacactaatagaattttcataaattttatgcctttattttactttatatatatgcgtgtctcaattttttaaaaaatcataatcacttgcgtcatttttattcatcccaatttttgtttctactttttatacagtcatgtaaaatagcataatttgatgggaaattatagtaaatggccccaaatcataggactatgttagtttatgtcctcatttcaaaaaaatatagcaaat

SEQ ID NO: 115130 - DNA, 2101 bp, Cannabis sativa
tttttctctgcaacagcatcaaagcgggaattatcacaagccatgacacctccaacaactaagtccgcaacctcggttgtggtaatgtccaagacaccctgaacaaaaccatgaaaaacttgaacatataaacaagctgagctcttcgattccctgaagctagcaatggttatttaagtattattaagttgaaattcctaaatttgaacaacttcgtatgaacttatgaagagctcacaaatcatatttcagcaaattttcatttactccacaacccaagttcaaatctttttgataaactactaatgtcattgtgtaagactttattttggacttaaatacattctaaatattgtattaaaatatgaaatgatgaataattttttgctgtttaagcctgcataattagtgatctataggttgataagcttagcatctatgtgaagtttacctgaatcagaaatgtggactattctagttaactaaaacctttgataaggagaatcagtccagctaaagtttagttgttagatcctctcctaactcaaaaaatacaaaattgtcttataacagttgtatgcttttgttgatctgttgttctgcttcagtagacttacaccgaagatctattgatctatcagaattgtatgcttttgttgatttattgatctgcacaccgcagtgccaattttcattatttctcaattattttcatgaatcaatcatgtgtgttttctatatcattgaattactcgtagtgttgtatgcaatatagtatcctcgtgtttgataaatttctaacacattgtgcccaaaacaatttccaatcagaacaagattcctaagttaaacgaaacttaacaactccgaaaacagaactcaaacaaaatgaattaaaacaagtaaatagtaattacctgaataaatccctctctgaccagagattccatggctctgccaccaaccccagtggcatgaaaaaccagagtctcgtaaccttctttaaccagcctttctttgacagcattcgcgcatggggttgtaaccccaaacatggttattccaactgtcaatttctcatcaccacggccagactctctaggttttacaagccttcccgccaccattccggcaaaagcagcagcaccgttcgataaaaccactctactcacactgttaattccacaaatatctacaatagacggaagtagtaccaaatccgaagttccaatatacggttcagtctgaccactagcaacggtggagacgacgagcttagggattccaattgggagcgatcgcaacgcattagctatcaacgaagttccgccggatcctccgagaccaatagcaccagcaacgacaccgttttcattagctttcttcagaaaactctccaatgctttactcataacggtaatggcttctcctctgtcattcgggagccgaatcggagctccttcctccgatccggattgacaagagaggatttcgtttctcgtaacgaaagaaaaaccgtccaatctgtcggtggccgccgccgcctcagaggttgaaacatcaacaatggtgacttgcggtgtgttagccgatgaattattggaaaaggcgtggagattagatcgtactgaatcggagagaaatcgaagctcttgaagcttagtatcggccgttccgatacagaaaactcggggaagtttctgttgagaagccatttgtggaatcggaaactgagtaaaagcttcggagttggatagttacataaatgggagttagaaattcaatgcaggatgataaagaagttatagctaaagagttaggtaattgtgaactgtgttccatactagtgtattcagtctcctacacgaaaaagttatttaattaaataaatattatttattaattaattaattttaaacacctttttatattttcaacacaaaaattctctttttaaaatattacagagcaatatcattctgcacaaaaaatttcgagtacctaaaaatcaacttataagttactttttttttttggatagaaacttgttagttgctttctttttggcttgaaaacttattagtgcatgtttgacatcata

SEQ ID NO: 115131 - DNA, 2927 bp, Cannabis sativa
  modified_base (78)..(80): a, c, t, g, unknown or other
  modified_base (2078)..(2082): a, c, t, g, unknown or other
gggtccaaaatagaatttacccttattagttccatgattactcaactataaacatagaattgaactcttagtaattannnaattatatttattgagttttactgtagtgtccattgataaaataaattccagtgatttaacctccttctgtttgttcgtaattagttttggttaaattactattttaccattctaattacttctttatcctttagttctaataattcactggtcaaagtgtaatttagatccaatctaaatttgcctggaactttttaattctagaattaacacataaagggaaccaacattcgattcgttaaggaaagtcaggattctataattgtagattatgtttccagacatccacattattagattctcaaaacagaagttgtaagaatcatcttctttgagaaactttaacgagtgaatcaaagaaactaataacatggacatgagttcatgattactcagaatttaggccgatctactattgatcattgatataaattaggtctttatagcaaacaacatgtttgataaagacaacctatatacatatcgatcattgtcatagataatctctatcatatacaacactttcacttagaagttatgatacatcagtaatttgcactgaataacgaccatcaatgcaccacactagtaactgttgattaaagagtctaaaactttaatatgttgctgactgtttaattcatgattaagtgatcttaattctccatacaatacaagtcacaacctcatgtatgggtaagaatttttttgatatttatatataacaatattcaactcttatttataatcacaaaaaaattaaaaggtttttcaggacataaactctaacaatctctcacttgccctaaaagtaaattgggcatctcctttaatcccatattagttatataacccataaaagattttgctagtagcgtctttgtgaatagattttccaggttatgttttgatgcaatctttaagactgtcacatcacatctttctactatatctcttagaagatagtattttctctcaatgtgcttgcctctcttgtggcttcttggtagatcctgagggaaagagcctgtatgacacaagagttatgttgaaataaaactagattagatgtattgtcaataaatgcagtaatggaaaataggttgatattaaatgttagtacaaaaagcacgttagttagagtgatgtgtctgttgatttggacaataccaatgccttgaactgggattgtagtgccattaggtaaaagaacatgatgtggaaatgcaacagtaggtgtaaggaaagaaaaacaatgtttgttggagcacatatggtgtgtagctccactgtcaagtatctaagaaaaagatggaaaagaaaatgagttaccagccatgttggatgttgcagggacattgttgggatcatcttgtggtggtgcttgactcaattgttggctaaggagtgaaataagttgttgacattgggtagaaagatccaactgggaagtagcaacatcattttctgaatcagtgctggtggcaagattggtagcaactgttcctttgtcaattattttcttatctccaaagcctggtgggaaaccgtggagaactagcacttgtcaacgtagtggcctagttcatgatggttgaggtttctttgagcgtggaggatttgtggatgtggagggtcgaactaaagatgctaaagaaggcaaatcagatgaaccaaggattcgttgcctttcttcttggactatcatagcaaacagcctagacagattggggatatgttcaatcaaaagaatctgagcctgtacagaagcatacgactcattgagaccagttaaaaactgtaaaatttggttttgattgtagtaatcaagaaaaagcttcatagcaagacaagtgcaagtggtattgggttggaactcctttagttcatcccaaattgatttaaattttgtaaaataagaggtgacagattgatcaccttgctgcaactgagtaagttgagtttacagttgaagattcgaggtccattgccctcannnnntctttcttgaagatcatgccacatgtctctagcaagatcaaaatacatgatgctttgtgctatttcagaggacacagaattgatgagccaagacatgaccatattgttacaataaatccaagaattgaaaagaggattaccatttgcaggtcgaggtagagaaccatcaatgaagacagatttattttttgcagtcaacgccattgttatccttcttttccaagattgatagttagcactattaagaactattaaaaccagaaccaaaccaaggtgatctgcggtgttgaggaagaaaggactagaaacatcttcatctgctagacgatcgacagtcaagaacgacgtctaggaatcacagtttgacgaagatcactagcaggagggtctggagaagattggattggttcgacaatgtcctcgacgttttgagaacgtgatcttgaaggtggaatttttcgtggagcaacagaatcattgacgacgggagcaaaagtagcatcaagatgtgatttggcttgagtgtgctcatttgtggatggaggaacaccatcttgtgagcatgtggagggcctcaccattgatgcagtgagcgtgttttctactgataccatatgaggaagaacagagtaaagcagtaaaagcaattgagcttttattttattactatgtgttttgaatgttacaagtgaatgtatatacataggcacgaagaagctaagttagttagaggtaggggtgttcatcaaacgcccaaaccgctcaaactgcccgcaccgcaaaaaaaatgtggtttgaaattctttgcggtgcggtcgcggtttgaatttttcctaaaccgcgcg

SEQ ID NO: 115132 - DNA, 7921 bp, Cannabis sativa
  modified_base (7881)..(7889): a, c, t, g, unknown or other
ctatgttagttagggtgttagatgcacctattttatctttgtgggagacttcatgtttaaaagggcttggatcttctatatatgggttagcttctacttcccatgcattcactatgaagccaagtaacttgcctaagcctactccgaaagaacacttcaggggattgagtttcatgatgtactctcaaactatcttgaaacatctatttatgtcgtttatatgcccctaacctttttggacttgacaaacatgcctttcagatagacttctatgttatgacagatcaggtccttgagcattttatttacaagcctttgataagtagcccctatgtttttaagtacaaaaggcatgactttgtagcagtataggcctacatctgtcaaggaacttgtatgttcttgtcaggtggatggattttgatttgattataacctgaataggcatccatgaagcttaggatttcatgactagttgtagcatctaatagctagttgatccttggaattgggaaactgtcatttggacaagacttgttcaggtcaagaaaatctatggatactcgccacttactatttagtttggctacaaagataggattggaaacccagagcgggtagaaagcttcaatcatgaagtcattggcagttaactttttaacttcatcttttagagcttgtgctcgcttttatccattaacctccttttctactgtaaaggtcagaagtttggatatatgttcaaggcatgagaaattatggatggattgagtcccaccatctccatgcgaccaagcaaagatgtcgaggttttctcttaaaatttttatcaatggtgattttatttctggcactaaaccttttccaattgacaattttttggtcaaaagatttggatcaatctctacttcttctaattcctctacatgtccaaatctttctactaaatccctaaagcgaggatctaagtttgcctccttcctttgggctgaacttcattgcccttggtgagactcattgctagagctcttggtaggaacttttttattttttggctttggacaaaggtaaattgtacaagtgtcgagcagtctcttaatctccccttaggaaccctaccctatgccttgtcaggaaatgtttaagcataggtgataaattgatgtcacaactttcagttcgtatagggctggccgaccaatcattacattgaacaattatgtcacatcaatcactatgaattgaccattcattgttcttgtcatgggactttctccaactatcaaagataatcagatgtatcccaagggcaaaaggccttggaaaaagaacccttacattagatgtgcacagggtgcttgatttgtcaactgaagctacatcttctcataggttgacttgaaaagtatgtttgaagatgcttcattgtcgatcatgaacctggaaactgtcatgttcccgatctgtgctgttatgaggaaggggtcattatgagggagtctaaccttggcatcatctccctctatgaatgagatggtaggctcttcaagctttagctatttgggatctttttcctctacagctaggattttactattttgcgcacgatggagggtccgagcatagtgctccatagctttgtttgtttcacctgcaatatggggtccgccaatgatgatccttaattgactagccataggtggtgacattgggtctttattttgggaccttgtgcctgtgtctggtcatcttgtacatagtgatgcagatggggattgttcctcctaattaagagcacaatttctaactttaagtgcttgcactcgttggtaccatggcgaaaattgttgtgaaattgacaaaatttggaggtgtccctcttacttatgtctttccacatgggagaaggcttcccatacggaactatagactgtgtggtcatgtagactgttttaggagtttatgttaggagggtgaagcacgtaaatctctcctccttctcctttgagtcttatggcatagggggttattgaatttcctcttttttgttttccgcggccgtagttattgttgttatgctagcctccattattttgacttttggagggctggccgacattacccatgctggcaggtgtgttgggcgaaagtaagggctgccagcattcagggcctatctagcacgtgcctgtctcccagttttagcttgtcggatagttacttcaagcttaacaaagccttctccccgatcaaggaaatcaaccatgttttgagttgagtgtcgacgaatatccttccacaaatcactcaaaggtagtacgccactcatgatggcggtgacgttccttcttcccccagactattaactttggtagcctcagtcataaatctttggaggtagtcttttagaggttcccctagcctctgtttgacttcaactaagtcttctagcctataaggtgttttcttagaagatgagaattatgtgtagaactctcttgtgaaagagttccacgaatcaaacctcccaacaactagtttgaaaaaccactactgcgtaatttcaaacaaggttgccaggaaaattctacaacgggtatcaacctccacattttacaaatcaatctggatctcaaaatatttgatgtgagccaagggataatctttcattgtgtaaatcttccaagtgggtatcttaaacttggttggcaagggtagcgcagtgatgcgtgcagagaaaagctaccctcaggtcctgtccagctctaagtcgaacaatttttggccagacaagcctgtatcatgtttttgagctaatctagttgtgcctacactataggatcaacttcaaatggcctatgttcggctaggttttgtccccccaaccctttcccgaccagcttgggcggtgggttaaccaaaggtacactctctaggtttgccaactttggcccgttcttcccttgtttattaagtttttagggttgggacgtacgtatcccaagcatttcttcttcagttcaagctagctcaaagatctactcttacatgggggcctattctaacaaacacataatctgtgggtcaaaagtaagaatgtgttcgactgttctaaggtggaacgtcattattgtgccaagtattttgagttcctcgattagtgcactcaccacttgggtgactagtggcactatcctcattggaatcggggtaacactcacgactatgagacctactctggctttgaattattgggagatcttcccttctcccttcgtccctaggcaagccttgaaactggtcagtcctatcatatggtcttttaggcaagatctgaccatcattggactgataggatgacagccttgtttgggatgtagtcagtccacctggccgtgaggtttacccatgatccacaggacattgagtcccctctaagacatagggacgtttttcccaaaggggatcccttatgaggggtggctcttcaacctgagatccaactctcttattggacaatctaatcaagttgttagcttccctattccggggcttcatctctgcctattaggcttggaggattgcgatttgctgatccatccactcgtggaatttgcgtatctattgggagaaagcatcaccaatagcagcgcatgtttcttgttggtcatgatgaaagatattcatttgaccttgaacttatcttatggcctctcttagcatggaaagttcagtgtcatttcccaggtctatgtgggattaatcaatactaaggttgcaaaccaaggtcaagtctaaccagtataaacatgaggtccaacccccgtgctaggagctttagtcgttaatcgaacagtgggcccaataggaggttgttcacttggtcaaacctctctagttgaggtaccaggcagctggttgaaatgtggtggctgggcagccatgctcgagttaggtacaacaggtggcacttggacattaggatccgtgaccatagggtcttgtggttcagtagaattcccacatctcgcaacagccatgcacaatggaaattgagagcttttagaataagaattttaggctctcaatcaaagcaccaaaataaagactgtgaatttagccaaccaatgcagagtatgactagcatcgaacttcacctgtgactgtcatgtgcggtatgatactaaatataaagacacaaggatttatagaggttcgacccctttgataaggtaatgacctattccccttttagttgtattcactcatgagataataccaagcagattacgggcttgaaccatgtaatttctagctatggcgccctttagtattacaatgatgagaacgtgtgttgcaggagagaagattgagaaaagagagagagttctatgccttattacttatgagatcttaagtacaaaaaatgaatgaaggttgaggttaagattaatgttaagcgtccctttcatgtagggttaagaccctttagatagttttagggtttacaagttactttatataaaaaaataagtaaatatccctacaaaataggaaagttacattgtatatttgaaatacaatatagataactaataatcgctaaagaataggatttttatttgttgatgatgaatccctattttcgtgggcactctaaattgctccaaagttgtaggagagccgaggatgatttggaaggcttatggataaaaacacaagtgttggagcgtggcatgcatgcttggtggccaactatgtttggggggctgcccggtgcatgaggttgtctcccttgttcggcaaggtaaaagtctagcctagatcttaaagttgttgtatgtctctgtctttgctagtggttctgatataaggatgaacttgcttccaagccatgaagatgtggatcttgtaagtcatcatgttgttcatgtttatgtctactgtgcaatcatgggatcctaataaatagaaggttgcacgacactaacctggtcggttagtgaggacatgtctccaatgtgtcttttgctttttaccacgtggaggtgccatgtcaagtgagcaaaaatcgagataacattgtcagcatgggttgtttccaatcaagttcactgaaaaagtgttctgggtattttttttcatcgaattaatgaagattcagggagaaaactacaaagccaagaccctagaaatagggctgagagcccaagttgacctggtgctaggcccaacgccgaggttgaaaatcaacctgggacgctaccttcaattgctcaaatgctaaatctaattcgaccaataaatccaaaattgttaaaaatgcggctggaaacctcgtcctcaaggtcaagaacttcaaaagtatgaaaacgagatcctaggagcttgggaataggctacacagtgcctaggttgacaactgtactggtgcactgggttctacttatcaaattctgattttgttttgaccatccgtctaattttttacaataactaatatccatgaaatcgaagaagtcgaattcacaacttcacatttctcatttccaacatgggaaactctttcagaaatgaagagtttcgagtctcttatttctgcataacgacaacatctccgagaactggtgaccaactttgccagaacacaaaaacatgttaagtgatgtcaaaatatcactaaagcatcttaaagtacatccctatgatgtttttacacttaaccaacgtccaggttcacgtcatatgtcaaccaggcattgggatgtcaacttcggcactggatgtcaacttcggcccttggtcatgaactgccttcagtaaaacagctataagtcactaaatattaatctgattgacacaattcaacttgagcttcaaagttaattcaatgctctatcaagttatggctcacaatccaaccccaattctaaatctatcattgtcaaatttcaccctaagggatttacaaaaataattgtaggttacctggagcgggtcccgccgggctctaaaaaatggtcattaccagcataagctaattttcattgttagatcatcatctacggtcaaaattttctaattcatattgtttccctatttttgtgggcctccttcaattataagaggagagctcccttagctcatttttcacttttagaaaactacccataaggtcagagcttctctctctagaaattggagcttctgacacttagcctttttctgtaatactatctcgtggtaaataaaaaatcgatgtagacatagctacattaccatagcgacgtagggagtgatctactataaattttgtgtgtctctccaaattacttacttaaacttattattcatctcgtcaatctagcgagctagtgttggccactttttagcatcaacaaagagatttaataatctccattacaatattttctctcttagataacatggaaatattaataaattgatttatattcttaacaaccattttcacttggttatcaatatagaaatctgaacattagcgattcttgctgcaccacaccagatacgtaattacttccattatggaaatagcaagcacatcaaccgagttttttagcagcttcctttcccaaattagaacttctattaagctttcaagccaatcataggttccaaaccacatggtgatttcagcaaacacttttcctgtgaaatcacagctaaagaaaaggtgagaatgcgattcatttcccaaatcacatacagggcaccttaaagagccaatatccatgaaatttccaagtaaatctcaggttagtaaatggaaatttatgacatgccaaatgatgaacttatgttttagcacaacaattctattcgaaatcaaaatatggtagcttactctgtcattgtcaactagagaaaggtggaagagtttgaccttgaacttacatgtgcttccagcatccatcattgcatgtttgtcaatactctctctgagtttagaaagctttttgaagtaccaagttgcataagctattggccttaactccccagaaatgtgattgtttcataaacacaacattaatccatcaaatccgtaaacaatcttgcttagtggaaataacccaaacataattgattagtaaaaaccaactagcatcagctattggcctcaacgcccaaaaatcttattgtttcatatacacagcattgatccatcgaatccttaaaataatcttgcttagtggaaatagcccaaacatatttggtcatcaaatctatgttcaactttttcccttctctaaaaccaaaacctccataagcctttggtaaacaagcatgttcccaagagaaaatatgtaacttgtccctatttccattacaactccataaaaactctctacaaagtttgtcaatggcatctataacgttttgtggtagaataaaaatttccatccagtagtttctaataccccaagatagaatgaatgagttgagctttacccacaaaagagaagtgctaagaagccaacccatgtaattgatttataattctgctcactattccttcacaatccgtggcttcccatttggttagcctaagatgaattcttgaatacttcaacggatacaacactttagtcatctttgtgattcttaacatttcttgtttacatttattactaacaccactaaaatacattgcaaatttagcaatatatattagcgaaagacctctagttgcagaaaactcctaaagcaccttacaagtcacttttacagaggtagtaatacctttgcaaaaattaacatgatcatacaaacatacacaaaggctggaatctgaagcccatagagcaagaagtttgggataactgttgggttttatgcccnnnnnnnnnctcatttcatataatcagatttacgtattaat

SEQ ID NO: 115133 - DNA, 3454 bp, Cannabis sativa
tttttttaaaaaaattaaaataagggttagaatgcaaaaaaaaaaaaaaaaaaaaagtctaacaccaaattggtgttgattcaaaatttaacatcattaatggtgtagaatttagtgtacatcaatttggtgtataatttggtgtgccattagagtgaaattgtgagaaaattccacaccaatttagtaaaatggtacaccattagagatgctctaatagatctgcgaacatcatgttagcaagtcactgatatgtggcacctacatttatcaaaccaaaaggcattactttgtaacttgtgatgaagaaagtgtgcccatggtctggctcgtacattgggatctagttgtaccccgagtacgcatccatgaagctaagcagttcatgacctgtggttgcatctacaagttggtcaatgcttggcactggaaagttgtcgttcggacaagctttattcaaatttgtaaaatcgatgcaagtgtgccatgaaccattaggttttggaactaagacgagattggctaaccagtttgggtaaaatgactccttgatgaagccgcatgcgagtaggctatctacttcttcttttagcgcttggtacctcacggggtccattttacagcgcttttgtcgtactccttgctcatcaagatcaatgttcaatcaatgacacatgatcttaggaggtattccaaccatgtctaaatgcttccatgcaaaagcatctagattttatttgaggaaggtgactagcatttctcactactgcatagttagtttagaaatcaacttttaaaactttggaagtatcaaatggatcaatgggtacctcacttgtttcttcggtggcttgcactgtgttcatgtaaaggattctgggttgacatcgggcttctccacatgggaacctcctcgattctgaatgattaatgctgcgattgtggagcttcgagcatgtaaatcatgttacaagatttttttcttttctgtgatcttgaccacagtgttatagcattcacacgagttcgactggactcctctgactgatcccacacatgcgggtgtaatgaaattcatggtgagatgatagattaatgactatcttcatctcttttatgatgcgtcgaactatcactgcattgtaggcagaatacagatcagttactgcgaagttttccacagatttcgctactatatgtgttgctccgattgttatgggaaattgtatcattccctttagtttaattgtatctcaagtgaaactgtagatgcttaaggtgattggcttcaggtctttctcatgaagtcccatctacttaaatgcctgcagattcaaacgctttacaaaactaccattatctacaagaacacaatgtactttattaactccaatgttcacaactattactagtgcgtctgtatggggtggtgcacccatctcacatcgctttccatgaaggtgatgtcgtcgcagtttttcttaaacaatttttcatgtctgtcactcaagttgttaacattagtaagcggtttctcttgggtctcttttgcatatctttcttgggcttttctaaaatctccgccaatgtgggatcctttgataatggtcaaaatgttgtgaggagccttcgagccactcgcttcttcttcattgttccttccatccgctcggggatttcggtcttcaatctgtccatctttcttatattagttgaattttcctcgatgaattaattcttcgatttcgtcctgcaaaaaccaacattccagagtagtatgaccaatgtctttatgatacttacattactttcacatgtctccttttgcagttggccctaattagaggtggttttttggagattcctttatgttcctcgatagcacatatatgatcgtggggaacattcaattcagtgtaatttacaaatcaaggccctccttttcgctttgggaggctttcctttcttgctggtgactttgactagttttggactacgacgccttgttcgactgcataaccttgggttgtgcccccttgaacttctttgttgcggactccttgatcacgtccttggcactaggggttgtgtttctctttggttttctcgagttctgccatcgagttctcaattcacttatggagctcgaccatagctaaaaactcaaccaatgtctaaggacgtcgcgcttgcagttctttccgaaaatccattatccactaaaagacgtagcacattaacattggatagaattaaaccccactattagagcattttttagtgatcccatctgaattttttttctatatatataataaatgatataacagtaatcacagagatgcgaagcaatattttttatttatataaatggcgtaatggtaattatattgtaaagacattataaagttttcgaaacaaaatcaaacaatgaaattgcaccagttgattccattacgattacaccaacccaaacaagaccttagtttggatatgactcttgagtctttgagcaattcgcagcctctcctaatccaaactagatcattggaaaatgccagacatgttaggtagatggtaatctcacaaaggtgggggtcactcactcataaagctagatagatagacctgttcccaaagatttccttcacaaatctagtgacgcaacaaactaaaagtgaagccgcagacaggtcaagagtggaccaattcacacgaaagcaacaacttctcttgttggtttgttagtttgtcatattcaccattttttttactttagaaaatagtctcgacaacgactaaccttgttctcgtttagaatggaataggtacatttacatttaaacaagatcactcgtaccttcactcattcacctacccaacccaatccaacaactacgggagctcgcctcaactggctcttatttcaagtttgactaagtttcattatcaagctatgatcaaatcaactatgagaattctattattgtaggaagtaggaactaaaatgaatgcaaatcatttcttcacttgattcattgggatgaatttggtgagtgattatccgaacccaaatcttgtcagagtaattactaagggctattgaatataaataaaaatgacagaaacagcatattacacaaagtagataggagagaccatggattttttttttttttttcagttggagtctgagacaatgtatatgtgaacacataacatctacattaagtactattccaaattaaacgtggtgataaaaaaaaatctataactttgaagaacacataaaataactttttgagactggtttcttttctttctagtttgtttggaggcaaggagaaagaccaagtgataacataccatcaaaagaagcatattaagggtcagctaagcaaatagttaactaagttggtgtttggttaggaagaatgaaaatataggaatagga

SEQ ID NO: 115134 - DNA, 4517 bp, Cannabis sativa
ttaaacaagtttagactccctctaaatctgtgtcgcaatcctttgtaattcacttcacaaatctgatttcgacacaacactaaacaacgaacttccttcgtctttgatgtgtgagtgcttacttcctcctgaagtaaggtttgaactagtcttctcccaaagaactttctcttgttcaatcaagttgttcaacgggtcctaagagcagtataagaacaaaaacataaacactaaaatctaactgaacaactaggttctcacaaaaagaactctctcctcattaataagagaatatgcaaaaatgaaaattagaagaggtaaatcgtttgactgctctctaagttctatttatagaatagagcaaccttaaagatagctacaaaaataacttcatagttgtactacactttcctaagaaattcctgatttgcagcatcagaatcggactctgtagcagtagattaagacttgaaatgaaactttccaaaatggaccacgatcatgaatatggacttcaaatctgccaaatatattgtgtttaatctgatcttatcaagacacaactaaaaacattaaagagaaagaggaaagtcaaagtttccaaacatagacaactttccataaaagaactcattctcttaaaaaaattcctaaacaaaaaagagacggctaaaaagtaatctttccttagaagaaaatgagcaataaagacacgaaatcaatgtaatcaaatcagtttaattgtacaagaaaattacatattaaataaaaaaatattttgatacctaatttgccaaaaaaggactttagaatctcccactttagcacttaagataatcaaaatatttttaactaatatgtacctgcaaaacaaagttagcaaaatcatacaattaaactccccctaagaaacacatcattaaacttaaatagaattttaactttaaaccaacgtttaacacaaacaccaacctcaactccccctaaaaaagggtccagagttgagtatacaaaacaaaaaaataaaaccagtactccccctttttgtttatctataaagaccaaagacaagaacaaattaaaacaagtccaacaaataaacaccaaataagttaagtaaaggaaagagaacacaaaacttaagccccataaagcttgatcaaggtggacaattgtaaagaccgcttatgattaacactttggatcattaaataactaggatttattcatgagatttattttagttaatatatatttattatgctatttatgtaaatttctcatttatcggtgattgtgtttggtagcaatagaaagagacgttgggccattagagagtcacgttttgtatggtatgaaattattttaatagcgaggtgtcattgttaggcattagcggtatcgaaaattttcggggaaacttaatgactaatttgcccttgggagctattaatccttgaattatttaaggaggggcaaaaaggtcttttgtcaaagggggattctttgtcttatttgggcaataaattctgaaaatagatttatacaaataaataaaacttgttgactttggttagaggaaaaaagtgagaaaaacttagaaattacttcatctttctctccctccttctctcgaattgacaagaaccagcaccaagctggaattttctcagctcaaccagtaggtattagcaagaattggtgctttacttcaaggtatggaaccctagtttcttctttttatattttttttagttaaagaagggttttgatgcatgattttaggaattttgatgtgtggtaataattggtgattgaattagaattctggaacttgcttaaggttgtttagggtggattctaattgtctttttgggttgtgttaaggttttggcaaggttgagtttaagaactcaaaccttgacctctaatggtgatttcatattttgagctgtttgttgtgtttcaatgcttgaattgagtttagtatgatgaatacaggtactctagagaaaattgtgaagtttggggttaaattgcattgtagggttcattttttgggttcccaacacagaatcggtcgaccggttctgggagacccatagaaccggtcgaccggttggtgcccaggaaccagtctgccggttggggctttttccaaaaccctagtttttttttcgtttttgtgttgtttaaggtgttagcatcctatttatcgatagggttatccttagtttcaattttaaatccccaataagtattttagcgtgtctctcattgagttttgaacgttatggtttagagccctgtaaaacgtcaagctgcgtttccactcaggctgactggcacacttgagcacagaacgaggtaagatagcataataatgtgtatatgaatgtatgcttgttttaactatttacactactaacactaattgtttatgtgattttaagggtgttagtatagtgtaggtttttagagtagttacagtgttaccaacacgagtaccaaggggtatgtcgtgcatgtggtacaacattagtaactcccgggggtacaataatggctctaccttctcgagtatagggttggtacttcagtgcatttggtacagtggtcgtacttcccttaagaacgttcttaaccatttggtaggctcagttgttgagcttaggacggcttaagcattaagccggtctagcattgtttatatatatgttatgcatatcttactgagtctgttgactcattagtttgctaccttgtgtaggtaaaggaaaagctaagctggaggaacagtgagatggagctcggcagtgattgtacatattgcggcagtgcaacctggagggtttcgatctttcaatattttgagttatattttagttgcctgttgtttgtaaaaaaaaaattattactagtagactttgtgttagtaaaaaaaaaaatactcttatctgtgttttgaaaattcgagatcccgacccatgcagttataaaattataatactataaaattaacttttgagtttagtaatttcaagtacgggcgttacaacaattatttggacatttcttgctgaacctcatccatggtagccaagtgattgttcatcaaggtcacttcctgattgacttgttgcacatctatagaagtagaactggaacttgcaatagcaacaacagatggagttgcaccaacagaagccttggggcgcttagggaaacctctgccaaaatactctgtgggttgaaaaattatttagtgagaggaggctcaagattcttattcgaaaataccacattattctaagagaaaagaaccttaagattaggttagaaaaaataagcttggagtttcgttttttacctcgacaaaaggaaataatttgctccatgatgagagaagccaagttaatggttgcccctatagtgattcgaaaaagaagataagccaaatcttgagacaccattgtcttattggagttttgtagtgaattgctaggagcaaactgcattagtgagccatggccataagtaaagatgagtgatgcaaacactttgaccagcaagtcattcaacttgttcactagtgagttcagtaagaatacaaccacgatccgtagacacttcatcactcttaacaccttttggcagtttcaaggctttgggaatatcatcttcaatgaatgaaaaccaatggccgcaaacatagactttaccaaagaactcagattttttattaagcaattcatgagtcaaattagcataaaattccttaactatgtcatcaatataaccttcaaaaccagtcaaagtattctcccagtttctacattgaacacacttcacaatgccataaactctatgagcacttaaatcaaaattcctctcattttcaaatttacgggtaacatataaattccaatcacgctgattgtcattataaaaaaatcttgaatttacagcttgagaggaagagaggttataagagaaagagcccttcataggttgttttccctttgctgctgctaaagcagattgaggagttgctgctgcagattttggcaatgacgattcaggatccagatcaacaagttcttccccaattttagttgggacttcctcactttcaaaggagacaacatcatcttctacataaattgctttttcatatgaaaaagtctccgttttggaatcggattcctcaaaagacacttccatgggatattcttcttcatcatcactcaaggaggtcgaggaagtattaagcttgagcttttttagcagcaagaataggcctttcatgacacctttttatttgtgcttccttttcaagagaggcttctgggcatgggtccaagatgagggaccttttggggttgatgctgcagaagcatcaccaatagcagcatgtggtgactgagaaccacgagaaagagaccagtttcatcaacatcatcctaaaaaaaataatacaaaaaattataatctaaaaatgatacaaactttaaaaa

SEQ ID NO: 115135 - DNA, 2168 bp, Cannabis sativa
cagcatgcctaattctatttagaacaagctgttatagtttcattaaataattcaggagagaaatgatgaaagacataggtacagatacagtgacactgggttcattctttttttgtcttatttgaaaaagaccttgatccttgcatttcaataaattgatatttcctcaaaaatttgtgtcgaagctgctggttcttcttagaaatagggtttatggttcaattcaattaactaaaggttcttgtgacaaagtacaatcctagcagaactttgaaatgtaatctaatgaggtctccttagtgcatatatatgtcactaccatagtgttagtagatagagaaatttccagagtagttgtatttgacttctagtgtcaattctaagtacttgatgaatatttatgaagtatttgtctggacaaggaggatccatttgcttgcatttcaattcaaattccttcaataaatccaaatttgaagaataatgttgcctcttcaaacaattcaaatttgcttaaactaggtactttgcaaaagtacaataagatcaccggtctcataccaacaaagcaaaactgcataggttactttattttattgtttattgtaaaatatgcaattttttgtagatttcctctgctgtagccatggatataagtgtttgtcatggaatgtcctttatgctgcagcctggtgtaatgggataatagaaatagttcttcagttttcaataatagggatacaaacccttaataatatcatggcaataatcgtgacaatatttggaccaacctgaggaagtactatactttattgtaattctaatgcaactgtagtgtcggatgtacttgttagatgtaaaaataatatatgtatttgtcataggctttgccacacttttacatctctttgaacacctattattttagattgaactaataagcttaataattgctatatttgcaggttctcaagagtaacaccatttgaagtcctctgtgcatgtgtggtgacatccataaaacacattcttatacttccctcaaacttcgtacatataattgtcccaatatgtaatttagcaaccaaagagaatatttaattcatgtagagaaatcctctgcttactccatttcttaatctgtaggatactaggatgtttgttattgcctttgggcaagcagcggtggaaaacgccctctttgtgttcaagcgattcacttcctctggcgggtagctctctacatctatgcaactacctggtactctcttattgggttggtgtagtttagcttctacttgatggttggtgagaagagagatccacaatggcagatgaacaaagcctcattctctaattctaaatatagcatgaaatgatggtggaaataattttaccaattagtgcaagacaaggctattccatttcgttgtatataagcaataggtgggttttttttttattattacaattgggggttctcatcctgtggcaacatagtttaagaggacacatgttcaatgacaaaaattagtgctcctttaattttgtgtacagttctgattatgtcttttagtagcattaagttttaaagagctacgaaatctcattttgttttagtttggtacctacaccgaccacaatgtaagcaagattagttttaaggctgggttcaacaccggcatgagatcaagttcgggttgatacctaattgaggtaaagatttgggactcaataatatcaatgttaaataacttcatcatatattgaaaattaggataacctatagcataattgcacaaagcacaatataaagaaaatggaggatactgtatagtcgtgcacactccatagcattgccattcttcatgcatgattctaacttccaagacataacgactagggagaaaaaagttctatattttcaatcccataaatcaatatattatgtttgaaacactagtactaactgggatatatataggagaattttaagaaaatggttaggtgtacaagcggggacgcattctaaaagaaattatacttaatatgagattttaaaagttttttacttaaatataacaaatttaatttgcccattttttatggcatttttttttttttttgagtttttttatgggaaaaaaacaaaaaaatacaaaaaagga

SEQ ID NO: 115136 - DNA, 1627 bp, Cannabis sativa
tattcttattcccattcctattctcattcctatattttcattccttccaaccaaacgcttcctaaagggtaaccagttactttatatttttttttcttatttttttaactttttttattaatttttccaaaaaaataatttttttaataataaattatatttttgtaaacttataccttaaaacccataaaaataaaattctcatcttattttttttgatttcatatattttaatttaacaagtaatattgaaaaatattaattaaacatataataaatatgttgaataccttgatacttattaccctttgaaagagcaagtgtgttaagataaagatactaatctacaagcaccatgtttgttacagcctttaattttcctttatgcaattatataacctttttgaggtgagtgatggagtgagttaggcgagggtttttgttgctttaagcccacggaaaattggcaaaaactaatttgaagagtgtaaattacgtgctattaaagcaactttataattagaaagttacataaacaaaacagactaatattctaataagattcagatttcaattaaggaatgtatataatatgagggtgagtttgtcatcttataattctaagtatatataagatacacaacatttaattataaatcataatctattcattttttgcgtatggcaatgacatagccaccctctttggcaacatcaactaatttgtgttttattatcaaaaaaaaaaaaaaactaatttgtgttattgtgatgtaataactcaaaataaaaattatgagaaaatatatttcataaaaaatgtggaaatacttttagtcaccgtctagctaaaaatatcaattttaaaacatttatttacaatttcaacatatacccatggccggtcctaagtatagacaggttagatccgtgtttaggactcactcattttaagagctcaaataaaaaaaaaaacttttatgtatatttttttaataatttttaaaaatactatttatttttatagtaagggctcaaatttttttttcccttgcatataccacattgcatgtgcttaaccttaataaaattacaaatcattttaagcaatctttaacttttaattaagaaaaactaattaatgcttaattagaatactcatatacatgtgcaatgccagtttaataaattaatcacatcaagtccaaaataataggtgaatttttaaatactcttttatgtttatttacaatttgatgatctaaagtttttatttataaaagagaaattctatttaccatacgaaataataattacactttaatattttaaaaaataaagtttaaaataatttttaaaaattacttttaatatttttctcaaaaaaaaaaaattctcaaattattttgtgatgattttaatatttattttcataatttttgttaaccatgtataattttaataaatttcttataagtttttattttatttttttgttaaaatataatttatttttgttagatatattttttaagagtataaattaaaaaaaaaaaaaaaaaaactaacataattaaaaatatatattttttgtaaaataattttttttttttttgaaatagtaaaa

SEQ ID NO: 115137 - DNA, 13798 bp, Cannabis sativa
  modified_base (30)..(35): a, c, t, g, unknown or other
  modified_base (63)..(68): a, c, t, g, unknown or other
  modified_base (13748)..(13754): a, c, t, g, unknown or other
ttaaataatggagattacattgaaatagannnnnnatggagattacattgaaatagagttttnnnnnnggcataaaacccaacaatattagtatagtagatgcatatagatatatacatgtttatccatgttcaactgccatcagaataacatattagggtattggtaaaatgtacatagagttgcactgagataccgatagatatatgttaggaaaattgtaaagtccttagattagcatatcagggtattgctgtagtgtacatagagtttcactgagataccgacagatatattatcgacttttgtgaagaacctttgtgacctagttttaaacttatgagtaggtgtatgggcgcctagttacaggtatgttgtatatttatgcttcattgttttcttactgagtttgtcgactaatagttatgtttccatgtttaggtaaggcaaggcaaaggttgagcaacagtgagtttagagccagatgaagattgtacatattgagatgattaaacctgaagtgtttcgatctttagtacaacatgggctcatatttattttgattctcactgggcaatacttttgtatacttagtattttttttttttgtatttaaaagaatagaatataatactaaattgtgtaaactatatgtatgtacttatttatttagtaaatttatatttatttaaaagtcttagtttattacgtttttcaaataaatcctttgattagcaaaggagagcataataattaaaaaaagaaatgtaacacgcctaaactagcaaggtgttacaattttagtatcaaagccaccatattctccgaagacagttaagatatgtacaatcatcattagagaaaagcttgactcacgattcaataagcctttatgagttttagtagtttgatcagttatgcatgattagaaaagcatgataggaagagtgataggaatttgatagtagattaagagcatgttaagttctcatgtatgcgatagttagtttatagtttttgttgctgcctgacctacctgcattttgaatttgcagacacatcctatataatggaaacttatcaaaacatgagaggtcaaaacaatatggtcgaggctagtggcagtaaaggagatcagaatcccctcatccccgtggcaaaggtagaggtcgtggaagggcttacagaggtggctatgaaaatttaagataggctctacaagattgggagcaaaagattgcaaaaattcaagctagaatttagtttcaagacgaggaaaataagaggctgagactacagggaccttctgttgtacctccacctcaggtgcctatcacgccctactaggcaaggcacattattgtaatttcaatttacggtgaactcctttactaatcaaatggtttattgaaaaatatgaataatttaattttttataattaaactttaaacttaaatatataaatactttacataattcagaatcccattttaaaattacaatagttatacaaaatacttagttacaaaagtttttgcctagcgactaacaaaataaagcacgatgtcctgaagatggaatattgtaggtctaagcgcctcgatatatacaatattcattagctcgagctcatgaatgttcaaccttaactttgcccttacctacacatatgagcaaaatgtgtgagtcgatagactcaataagaaaaacataatcaaaacataaacataaattggataattaccaggcgcccatacatcaatcataaccctatcctacatccaacacgtactaagtatataatatatgtatgacagtacaattgaccataaagcctacaatcagtactctagtcgtactaatgtgatggcatcaacctgtactttgccaaacatatatctattagtattcaatgcaactctatgtacactaataccggtcaaatgttatattatctattaggaaattgtaaaacatgcacgctaaatatgtaaatgcttatgatacaattatactaatcttactttgattctgaattcaggtgtggcaatatacttgagtgaaaactcttgctcggaaatttacaggcccctaagtcacaatatatgaaaaactgataagtgatacgctaaaaaactgctctgggacataaactcaaaactaaaagttttcgtatcaataaatagcttggcaatacactaaatatcaagaaaatactgaaaaataagactttgggaaaaacaccacaaaatatggcatgccatttttttgggtccctgcatgctaaaaatggtaggtcatttctataaaaagggcctaccattttttactgcataaaaacaaagagtctcatttatcacacaattctaccctaaatcttacaaaatgctccaaaatgcctaattaggccataaataacataaaacaatagaaaattcattcatcaactaacaataacaaaaatcaccattaaacgctcaagcttgagcttaaaaactcaattcaagcctagaccttactacaggcaacaaaacctgctctaaaaaactcaaataaccttaaaataactactaaaaaaattccaaacaaccccaactcgtacgaaaccaaaatccctaaaacaagtaagttgaacctaactttttctcttgaaactcaaagaaaaggaacaagggagcttacctcacaacccatttgaattacaacagctaaaatccccttgatttaggtttgaattgctgaagaaaaagtttagttcttgggccttggttgtggccgaacaaagaaagagagaaagaaaggcttggttttcctagcttttgtgattttggctaagtatgacttaattattcactttcagcttattatctattgaattagcttacgttttactaagaaaatctgcccaaaaagaataatatttaacaagggtaaaataattataatacccttacttaatcaaaaatttattcagtcacataagagtaaaataatcctaaaccacgacccctaaaactcccagcatcccaatgtctaactattttgtcccgctattgtaagatactataccatatctaaatgacttaataggccaaaagtcgcattccactgttactatgcttaaaatatgacaatcataaaatttcatatataacataattgatacacctaaaattcaaatatatctccataattgcaaaaataataattaaaatctatttttaacaataagccataattatctactaattattaaaataaaaataaggggtcattttaattaatctcccattaaaatgatttcatctccaaaatctagcctgaataacgccagatactgaaccctcatatcagacttcaattctcaggtggcttcctccaccttgctgtttctccagagtactttgaccaacgctattggtcttgtttcataggactttatcctttttgtcaaggatttgtactagttgctccttgtatgataaatctggttggagctctagggtttcataactcaaaacatgtgttggatccgagacgtatttccttaacatggagacgtgaaatacattatgcactgatgataaatctggaggcaagactagatggtaagctacccatcaaaccttctcaagaatctgaaaaggccctgtatatttggggcacaacttgccctttttcccaaatattttacccctttcatagagatacctataggaagacatcatctcctatctgaaacattatatttatgtgtttcggatctgtataacttttctgtctactatgagaagtaaacattctggccttggttttctctataacctcattggtcccctaaactgactccagacctaggtatcttctttgtctgatttcatcctagtgaattggagatctaaatttcttgccatataacatctcataaggagcaatccctattatactctgatagctattgttgtatggaaactctatctgtggtaaatacctactctaaaagctttcaaaatctatcacaagctcgtaacatatcttccaatatctgaattgtcctctcagacttaccatttgtctgaggatgaaatgttgtactaatctccagctttgttcccatggctcgttggagactttctcaaaacttggaggtaaacttcagttctttatacgaaataatggatttcaaatccccatgaagtcgtactatttattttgcatatagttctgcatactggtctactgaatacattgttttcactggcagaaagtgtactaacttggtaaaccaatccataactgcccatatggaatcaaagatacctatggttcttgggtaaccaaacaaaatggtgacatcttcccatttccacttgagaagtgtcaaaggttgcaacaatccttcaggtctttgatgttcaacattaatttgcttacaagttaagcatctggttacataatctaccacgtctttcttcatatcgcaccaccagtaatagggttttaaatgttgataaattttggcggtactgggatgtactgaatcgggagtggtatgagcttcatccagactctattttctaagttgatttctacttggaatgcaaactcaggttttataaagtaacattccattacccaacacaatgaaatctttagcttggccaactaaaacttctcctcgaattttcactacttctaaatcaaccaactgagcatttttaatcctctcaaccaagtctgaatgcaaagtcaaattactaagttcgctgactacaaactcaatagctaatatacccatgtcatcgcccaactgaggtgagatcatagtcattgtgaatacttgcccaagccctatactggttatggcatcttccactacatgggctttcctaggatgatagagagtttcacaatcatagtctttaactaattccaaccatctcctctttctcatattcaagcctttcagagtaaagaaatttttgaggctcttgtgattagtgtaaatttcacacttatctccgtagagatggtgtcaccaaatctttagtgcatacacaactgcggaaagttctagatcatgagttgattatcgttgctcatactccttcaactgaagagaaggagaagaaataaccatattagcttgcaatagtacgcaccgcataccttgtctcgatgcatcaaaataaatgaaatttttttttttgatttgacagtaatgctaataatggagttgtgatcaatggctgcttcagctcttggaaacttgcttcacacttatctgtccatacaaactgccgattctttttagttaattctgttaagcgcattgagatcttggaaaacccttttacaaattgttggcaatacccagcaaaacttagaaagcttctgacttcactgattgacttcagccttagccaatccttgacggattcaatatctcctggatcaaccatgattccacccttattaacaatgtcctaaaaaggacactcaggatcgcaaaaattcacacattataaatttttcttagagcttatgttcttgtagtcattgtaaaactattcgtagatgttgctcatgctctgcttatgattgggagtacacaaggatatcatcgataaatactacaaaacaaatatcaaggaaatccttgaataccctattcatcagatccataaaagccacaagagcattggttagtccaaaagacataacttgaaatttgtaatggttatacctagtacaaaaggcagtctttggaatgtgctcctcttggattctcaactgatgatagcccgaatagagatctatcttagagaagactgtatttccctgaagttgattgaacaaatcatcaattctaggtagagggtacttgttcttgattttcaacttgtttagttcttcatagtcaatgcacgtacgaagtgatccatccttctttttaacgaacaacactagagctccccagggtgacacattaggtcaagaaaaccctaaatcaagcatcccctatggttgtaacttttatttcttaagatccacatgatccattctatagggcaccttagaaactgggtccgctccaggtgctaagttaattacaaaatttatttcccgctctagtggtaatctcagaagttcttctagaaacacatccaaaaactcttaaaccacattgatattttcatgccaaactaatccagcacgagtggtatctaacaccactgctagaaaccctatgcaccccttctgtaataaatctttggctttcaacaatgagatgactatgattcaagaaccctgaactgatcccatagatatgaatggttcttcaccctcaggttgaaaaatcaccatctttcgcttacaattaatgttagtggcatacttgcacataaaatccattcaaagtataatatcgaaatctgctaaacccaattccactaggtcagcgctcaacaccctatccttaatcctaattatcatagacctatgctaccttttggagataactaattctccgccaggtagtagggttccaaagcccgttccataacaatcacatgacctacccaatttatcaaatactcggactaccacataagaatatgtggctccaaagtcaaacaatatagagaaataagaatttttgattgaaagttaacttgtcacaacggaaggacaagctttagtatcagtctgggtaaggccaaacaccctagttggagcaggctttacctatgtcttctattcttcttttcttagctacagccagtctcctttgtaatgtccagttacaccacactagaaacatcctcgacccttacacttacctagatgatgctttttacaacttggtatttcgagtaagtgtaatgactctctgaaccaccttgtcgattaccatggccttggttctcttagaacctcttgttctgacttaagccaccagatgcagatggaactctcctcttctgattcgtggttgagtcactaccacccttaccaaaactaaaagtaggaggagcaatggctccactaacaatttgagtcctcaagactcttaaataaactcgactgcgcccccaacaggcagtgcctttctaccatattagcataggtagtttcttcatcagttgtaatcattagatcatgtttgatcttaggcttcaacccatctaaatacttttcctttttactaaaatcgattggcactattctcgaagctaacttggccaacctatcaaactgggtcgtgtactctagaactaaaatattttccctctagaccagctgaggaaattcttttctctttctactacagactgcctcattatagtacttggaaattaaaaattcttgaaatttttcccaggtgattctggtgacgtctccgtgagggataccatatcccactagactaaggcatccttctagaattagaaagtagcataagccatcctgtcgttgccagttactcccataaaattcaatactctattaataatcgttagccatttctcgaatttcataacatttggacctcccaaaaatactaaaggttcctacttacaaaacctttcttataatggttccatgcaattggcaacaacaaccggccccacttgcattataggggaaggagctatctgtaccttgggagcaagcatcgcaggagaaccctactgccttagatgttggatttcttcatcttgttcattaattcacgcttgcatttcaacaaatctttgatcccaatcctaggtagcatgcagtgggttaacattaccccgactatgtgccctacctctttgccctctacctcggccatagacactaggaggaaacaaaactccctgactgccactatacccaaccgagttaccctagcttctcgtgttttgcttggcgtccattgtattagaccagcctacaaaaccaagagctagccttgtcagatcgcgatcaagatcaagatttaattaacggttacttgagaaaatacaacatgcttcctatcaggcttttcttattacttactaataagtcatacaactacagcataaaaaggattactggaccgtgagtaaagcttatttctgatgatgattgtacatatcctaacgatcttcaaaagataatctagcaactttgatacaaaattgtctcaccctactagattgagcacgttatcgagattttaatttaatgtgcactcctttgctaattaaaaggtttatgaaaaacatgaataatttaaattcttacaaataaactttaaacttaaatatataagtactttacataatccaggatcctattttaaagttaaaatagttatacaaaaaacttagctacagaagtttttgcctagcgactaacaaaataaagcatgttgtctcgaagattgaacactccaggtctaactaacccgatatttacaatcttcattagctcgagctcatgaatgttcaaacttacctattcttttactacacatataaataatatctatgagtcgatagactcagtaagaaaagtataaatataaacataaactagcttataaacaggcgcctatacacccaattataatcctatcccgtgtccaatgtgtattaagtctgaaaaatttgtatgagagtacaattgaccataagatcagcctatactcaatactatagtcatactgatgtgatagcgtcaacctgtactttgccaaacatatatccattggtattcaatgtaactctttatacacttgtaccgcttttactaatatgttatctactagaaaatcataaaacttacacgctaaacatgtaaacgcgtatgatattattataataatcatacattgatatcaaatgcacgtgtactggtcaacctgagttgaaattgctacttggcaatttacaggcccgtaagtcacaatatgtaaaattgataagtgatacactaaattactcttcgaggatgtaaactcaaaactaaaatttttcctatcattaaatagcgtgcaaatactctaaatatcaagaaaatactgaaaaacaagactttgggaaaagtaccataaaagacagcaggtcgttttttttggttcgtacctgctaaaatcggcaggttgtttctcaaaaaatggcctaccattttttatggcagaaaaataaagagtctcatttctcacacaaagctaccccaaatcttacaaaattctccaaaacacctaattaggccataaatatcataaaacaactaaaaattccaacatcaactaatagtaacaaaaatcaccattaaaggttgaagcttgagcttgaaaactcaactcaagcttaaaccttattacaaccaacaaaacctgctctaaataactcaaataactatagaaaaaaaaattccaaatagccctaacttgcacaaaatcgaaatccctaaaataggcaagtaaatcctaactttttctcttgaaactcaaagaaaaggagcagaggagctgacctcacaacccacttgaattacaacagctaaaatccctttgatataggcctgaattattgaaagaaaagtttggttcttgtgtcttggttgtggccaaacaaagaaagagagaaagagaggcttcgatgttctagcttttgtgattttggctaagtatgatttaattacttactttcatcttattaattattgaattagcttagattttactaagaaaatccacccaaaaagaataataactagggtaaaataactattatacccttatttaatcaaaaagttatctactaacttaggggtaaaatagtcgtaaaccccaactccaaaaactcccaacattcaaatgtctaattattttttcccaatatttctaagatactataccatttctaagagactcaataggtcaaatatcgcattccactgttaccagacataaaatataaaaattataaatttcataaataacataattaatacacgtagaatttaaatatatctcaataattataaaaataatacttaaaacctatttctaactataagtcctaattatctgttaattctcaaaataaagctaagcaggcattactgtatcagttgctttcgctctagcattgcgagcaaaacaattggttgccaataaccgactagagcctttatatgagagatttaggaagcagagaccttcaatttttttaggaagcccaaatgtgacgaaggccatattgagattttatgtcctaaataaaattcttttcaatataatcttataagcttaacaatgaatgatatagaagtcaaactttatgtaacttgtttcacatgattatttcatgattacagttttaatatttaaattctattaaatctagaatttatggatgattataataattgtgttatctacatagtgaaaaataatcttgatcatatgcttcaaacatttagtctcatgaattatcagtgtacaagatttacactgatgtgataatatatgatggggttcgcttacacttagatatcgtaaacttaccgtaatatcttttctaagtaaatatcacttagtcgatcttagataaaagatcttaattttgaggtggttatgttctggcttaattgtattacatgtattttttgacttgttcgttacaagcttaccagaagatcaactcaatacttacatcttgggcacatggtagtggaattgagtgggagagctaattatagaaataaaatctatagcttctataaatagttagaagagaaatgataatttccttagagcttggctaacaaacataaatggaagagcttttatttcagtagttatattagtttactgaaatataatttataagaaactaagtgtttttaaagataaaataataatcttagtccctactttgtgtagatcatctatagaagatcattattatttagattgaaacaatggataacttatagcatatctattattggtgaatagagcattctatataaccatgagtgcaattttgaatctacagtggaataaggaggaattaataagatagaaaatttactcgataaattctagaactttttattgggagcatgattttatatgcccatagtccccacactagctcagataatattgttttgtagtctcaattaattagttttaattaatcaataagattcaaagtaaaactatgtcttttttatgaattttactaaggaagggtatttttgagaaaaaaaatagaatttagagtttgtttgttaattaagagaccttgaagggtttaattaataaatatatttaaatggtagtttttttttataatttattttaattattaaatagataaagttatcatttaaataattagaatagataaataacattattgaagaaaggaaagatagttttattatgaaaacaaaataataaaaaaaaaataaaactcattaaccttattgagggttcgactatgaggttaatttaaacgtcattattgtcttttatttagcccatttgattgtaaatataaccctagactcagtctataaatataacaatatagcttttgtcagacaatattatatatacatatgatatattagtatattatctttgtcaaacaaaaattatattttatattatatagatctcgaaaattatatttgaattcgtgtcccaaagtgctgaattattacccactcatatcaaggcaatactcaacatagtgtgaaagattatatagtctttcacatcttgaaggagaatgccggtttagttcctaccaactctgtaacagaatggaacaggtgtcgtagaaagatacaacggtaattttataatagatttaccaatatcaatagcggtcccagtctaatgtatactctatacatctgataccagcatactttgccaatgtcttggaaagaacataacacttatccaaggtataagtaaactttatcgctgactaccacatcagtgtaaatctagtgcactgatgaatcatgggacataagcttttgaagcatataatcacaattacctttcgctgtgttgacatcactataattgtgaattactatataatttggattaaacataattgtatattaaaccataaacaagaataatacatgtaagttaaatgacttctaatcttttattgataacaaataagactatattgaaatgagtttcatttaggacataaaatcccaacactctctttgggttctatcttgagccaactgataaccttctagaccggtttatttgaacccttctagcacctctatttggtcttcgttatcttgttcttctggcgccacaatagcttccatctacacattgtcttacagttccacactatctttagtatgtgaaccttcttctatgagcttttggcttttggtactccatttgcatacttgcagtgtctttgtttcctatttttcttgcatcacacaaggacacactacctttctttgaggtcaagtgcggatattccaactcattaaaaataaatttatagcaatcacaacgtttggtttacccttattagaaatgtagattttataccccttggttcctaaggcatgacctaagaaacttcatgaatctaggttccagcttgttaatggattggtgtacatatgttatacacctaaatattcttatatgcgttaggttggggattctgctataccacatttcataagttgttttttttaagtctatcactctgtttgggcttctatttatgaggtatgttgcgattgctagagcttccccccaaaatagtttctctaacccaggactgaacagtaaacatctaactttgttcaacaaggtctggttcatccattcagcattaccatttagctacgtgggtcttcactacggttctatgcctagagatcccattcttttgacacatcttgtcaaatttagagttgataaactctaacccattgcctattctaaggttcttaactttgagatcagtttttctacctgaattttccaaattctaaacttttccaggcaatcattcttagtagttagcaagtaggtccaaacacacctacaataatcattaactatagaaaggaaatattgcttactgaagtgagaaggcaccttgtatggtccccaaagatcagcgtgcacatatttgagtatctttttagttatgtgccttatcggagtgaacttcaacttttgttgtttccctaaaatacaagcttcacaaaatggtaagacacaagaatttaaatttttaattatatcttgtttgtgaagttctttgaggccttattcactgatatgtccaagtcagcgatgccacaacttcatatccgattatagccctttcaccatactagcttctccagttgggacagtttttccttggagaacatataaacaattgatctattcgcctttcatcaataccaaaaaacctttggtaatatcaagctttcgtgtatggacttgtatttgtatccttcatcttcaaacgcatctagggatatgagattttatttaaggtgtgggatgtgccttatattcgtcagcaccttgattctgccataatactatttgatggccaccttcccgtttccaatgaccttgcaagaatgctcattgtccattataactcttcctccatcaactaacttgtaatcaaaaaataactcttgttggatatattttaccagnnnnnnnatttactaacaagtatgtttcatactaatatgaattctaaaaca

SEQ ID NO: 115138 - DNA, 1562 bp, Cannabis sativa
  modified_base (1271)..(1271): a, c, t, g, unknown or other
gttacatgccaagtgttgataagtaactccaggagttggacgctgacaccctagattacttgatagccaacactctaaaaaatgttacctccgtaagttgtttacctgtctaactttgtgtatataacctttatgtacaacttctctaactttgtttcttttttattttaggccttgctggagtttagccatatccatgccagggataagggccctactaaagctttcaagaagaaacttgagagcaaggatgctaaactcaaggcaaaggagactgagcttgcagaggtgcaggatgatctagacatgacatcgactcgtatgagggaggtctaggatcagcatgagggtatgggtcaactacttggtattcgtaaccaagaggtgacaaatctggcagttaataactctatgctgaagaaggaactggagaaggagtaccatgagaagcaggtagctctccaagagaagcaggagtaccttgatgggcaacaggcaattagagacgagtatggatacttatccatggaggtcttttatgaggtatttctgcacaaccctaaggtcaatctgaagtacatggactttcccatttgtgagagatggcttgctagagagagggagttctatgagagtagataacagatagaccatgccgactagggtgagaaggtgttagctggccagacccctgaggcatctgctcgccagcctgcaagagcactagccaacaaacttatggatgtcgtacaactcagccaaccttccaccgactagactatagagcctacctcaaaagctccaaccttcaaggacttagttgacttgaacccgcctacttctgtgattattcctaaggatgttagagacttgttttttttgttttcatgcttttatttcacatactttattttttttttttgttcttgtatgacctataggccttttatttttgaacaatgttcgtgtatggccttagggccttttacttttatacagatggccgactagacagtctttaatcctgactttacttcttttgttaaacatataggtgttcaaacttacgctttttatgtctaatctaaagtatgtcattcacacttacttagctttcaaatttttgcttctaaaagctttaaattttgcttaagtttagcagtgtttgttcgatgttatacggtgtgggtgccccccaagtaatcgagcaaacttatggtctcttaaaaacttgaaattcaccaagtactattgtaacgccctaaataatnaggcacgctacccaagatacttacgaaaccctaatcccctaaatgggattactaataaaattagcgcataatttaagttttaataacaataggaatgaaaacaaacttataatacttttaaatttataaactaaaagttacagaagttgggatcccaaaaacatttacaaaatattttacaagtcttttcctttcagccggcctaagcggcaaaacagagtctcaaaaacacaacactagtagaccccaacccgcttggtctgatagggcccggacatgtacattcttcgt

SEQ ID NO: 115139 - DNA, 895 bp, Cannabis sativa
tttcaactgatggaccaatctcagcccatataatgtaaaaatgagaaaattttctaattaaatagaaaaattaatcataaaaactcaaaattttctaacattactcgtgggtattacccattaagagtccagccacctacatttcccttaatttttctcattcttttcttttcttgttgagtttctttatctctctctttatctttttctttcttatctcaaacttcaaaaaaatattttcggtaacactgcaactcggttgaggttaaaaatggtaccattataatttatttttcaatgtgattattttaagatatggaaagtatatgtatttttcgatgtttcaagaataaaaaaaaaaatataaagttgctcatggtacaaatgatatagtgatgagttaccattgtataatgtttttagtttagttataaggaataaaaattcaattttattttagaatttgattaattggattgcgttaccacttaccatatgataactaattagttctacaataaactaatgatacaaaaaatataacttaaataatattaagataccataatataactttaaaataattaagttgtaattatttagatgtctataatttttcctaataagttaagagatttattttactttattataacaaattagtgtcttaaataagatcaaaagtagcataactgttgttgctaaaaaaagtaatgtaaaaagttgccccacagggtttcatatttattagtcagaaaggtttcggcttttaatggctcctaaagctgatgtctcgaagaagagcattgctattaggcaccagtggtgcctagcacctttgcaacatgtcgcgttgcaattagctagctatactccttaaaagctattatattaa

SEQ ID NO: 115140 - DNA, 1927 bp, Cannabis sativa
  modified_base (1058)..(1059): a, c, t, g, unknown or other
gggagaatgatttgatatatatcaaaaaccataattactcttcaatctacatttcctttttattttccataagaataattacctaaatgaattatcaatccttggccttaaaatagatgaaggactactttgaggagattccaaacttgattctgaagctgtaaaatgatcttgaataatctttatcttcccaagaccatcgtccattaagcttgatttcactagcctatataattattaaacatgaacaccaactgtttgtgttatgatcccaaagaacatttcttgaaaattgaagtttttatcataaaaataccaagaaaatatatttaataaaactaaaaaaaacacaaacaaaaacccagaaaacattgcacacaacaacataaaaaaatatatatattttattagaacttcaagaaccaaactttaactgaaaccaattgcaaaaaataaaaaatttaaccataaactcaaaagggttttcttcaaaatcaaaactatgcacaaaaaaacagatcaaactgtaaaattccaagaaatgaaacttagttcaaaataattacataaagacaatcaataaagctgatcattttgtatgcaaacaactcagaaaaaatcatagaaatctattaaagtgaaaaagaaaagaaattaagacaaaaatgaaaagggaagatgtgatcgtacctgtagaaagagactttgtttttgcagaagataattttaaacaaagggtccttttgatcatggaaaaggctttgactgttcggtataatatagttgtgattaatatgaaaagacctttatgcccccactgtgtaaaaggtacatggaaagtgctcttagtgttagttaggggcatatttgtgatttcaagttataaaatttaataaagaaagtaaaaatgaaaactttatccagagtaattaaagtaaaaaacttatattttattttaatagcttgtgaaataaaaatagaggattgtaataaaaaattagtagtgtttaatatttttttttatgcagtgttttatgattagttagtgatattttttnnaaattattttttaaaattatataaaatttaatattcaattagacaccgaagaagatattaagtatcaatagtgtcttttaacaattttcataaaaaaatatttaagatgatgatgatgatgtgttgaggtaatttagcttagtctataagaaacaaagatagttggttagaagttagaactaatatttaataattatgataattattacttaactaaataaatggagtaaatattaaatcattaaagatggtaaatgtattcattaaacgtgtaacaatatgacacttagttacaatggcaacatttttttataataattaaaaaaaaagtcaagtcacaccaattaatgtcttttataaaaagttcatcatgtcaatgatctttttggaatcttatacacacaacacaaatacttagatataattatttatgaaaaatttgattatttgtcatgaacattatctaattaattatcatcccatgtcatatttatattgggtacacttggacacccacaagctatctttttcaatattaagaaaataaaataaaaggatatatttcactttaatgaataaatataactaaaaaaagaaggtgaataatctattggaattttgagctaataaacaaatattaggtctgtttaaaaaaaaagccaattagaatttttaccctcgaacttaaacatgtactaaatcataactcctgaatttttaaggtcattaaaaatgccccatgaactattgaaattattgagtttaaggacttttattcaattttagtaaaaaaagtctaacatagatgaaagtttagtggacataatttagtacatgtcaaagtttgaggggcgtgatttgatagata

SEQ ID NO: 115141 - DNA, 829 bp, Cannabis sativa
atataaaaatgagatattttttttaattagataaaaaaaaaattacacataaaaactcaaaattttctacttttactcattcatgtgtaagagtacactcattaaccgtccatatatatatatatatagacaactttttactctttagattagattatcatttttgttcctacaaataagagtatttttgtaatcttgtgttgtgggtatatctcatacaagattaatcacttttgttgttttatatattaaaacaaaaaaattacccacatagcgttagcaatatattgttattttattaatcacgtattctttttatttataataataatacataaagcaaaacaaactgtaacaatatattttttcccaactgcattttcttaaaatatttatcaatacacgatcatttttaacatagagttttctgggaaacccaccaactttcaaacttcatgttaatgtttgttgacaatcacattatatatattaaacttcatgttttcatctccttacaaaaaataaaatataaaaaaaaaaaaaaaattcatcctacctatattgtaacaataaatctctaccgtaaatcacaccaagtggtgtttaattatatatatgatcattaacttgagtagagacagtttaatagcttcattctgaaacaaaatatagtactcgacattattagcttatatatcctcaaacaaaatattcaataaagggcacaacaagatattttatatatatatatatatatttatatgggtgactattcaatggttatatttttattgtacccatatggttacatttttctttaacctgtaat

SEQ ID NO: 115142 - DNA, 2867 bp, Cannabis sativa
tctctctctctctctctctgtttaatcttaattcttatctgttgtgttttgggcgagtgagtgatttcaccaaaagatagtattttttacgtttttccattttgacctctatataatatatcactatacatttttcccactttattttttatttcatgtatacccttattatacttttgttggcaaaaattagtctttgatgagttcttttttattatttttcctgtaactttttgtctagatgctcgagaaagattaaacaataaagtttcaaaatctgtagttgtaaaagcactctcttgctttgtttattgtaccaaaaaatatctagaattacataaattagtagcaaacttttaggaggatataaaaagtaattttaagaaaataaatattaattagaactgatctcatcaaaatccttaaatatttgaataactaaattagtgaagtctttaaatatttgaataactaaattagtgaagtagagatacatcaataaaataattatataaaattcaattaacactattttaatgataatattaaattaaaatgtgactttttgtttcaaattatgaaattaatgaagaaaaaatttattttgatatcatatctttctaactagagatattacagttactttacggtcagaaccatataaaagtgaagggacagttgtcctaaccccagtttcatttggagtagcgtatatgctgctaaggacacggttaagttgggactaaggaaaggaataggatctggtgtaactgttgacattacttctgatccttggttaccggtgctggacagagctactccaattcttattgttcctgggcttgataacttcacggtcaatagcttgtttcaaatgaatagccgaaactgggatgctgaggtggtccgagacctcttttcacttgttgatgttgcaattattttggggattccaattaaccaatcggctgagggtgactcttggtactggtttgatgaaaaagatggtatttattctgtctgaagtgcatataaaatgatacaagaacacaagacctctcctattacttcagatgttcatgtattttggaagaagttatggtctctcaaggtgcctcccaaggctaaagatttgatttggagggtggattctaactgtttaccaactaaggtcaacctctgtataaaaaaggtgttgtttgaaaacacctgccctatgtgtgcagtctatgccgaaactgaattgcatctcctagtgacttgccaatttgttggatcctgttgggaggcggctgctgttgcagaagctagtagaaataactcttccttgctgcattggttggatttcaacgctaattgtatggacagtgagaagctaggccgacttgtgatgttgtgttaggctctatggtcggcaaggaatgatctaatttggaaggatcgtgctcgaagtgttagtgatgtagttgcatttgcgttttcaagtcttgatcaatatgtaaaagctcaaggtaaaggtaaaatccctttgttgtcgcctcttaaagatggtgatggttcggagctttggaaaaaaccgctagcaggcattaagctacacgtagatgcggctatcttcgtgtggtgaggaattctaatggggagttgatctcggtgtttgctggtgtgaaaattggcagagtctcccctgaacttgctgaagccatgggcattagagaggccctcagctggcttaaagatcacggatacactcgggctgaggttgagacggatagcttggtttgtgttgaagctattcggagcacaacaagttttacttcaagtttcgggttgattgtggaggattgtaagaccattcttaaaagtttgattaatgtctctatattttttgtcaagcgttctgcgaaccgtgtcgcgcattttgttgcccgacactctatgattttcgctgaatgtatgtttcctcttaatagtgttccccttagagttgttgtctatcctttcgagcgatagctcttcttaataaataacaccttttcaaaaaagaaaaaaaaaacatacatttttaattaaaaatgataattatgaatatattacaagatttggtataatagttaaatcaatttacacatagactacatagtagagctcatgccctcaaatcccaataaatgcaagtttatatagtaccaaataagacacaccaaaaacataaacaaactaacatatatagtacaacacaaacttacatcaggcataataacaaagtaccataaccataattctatattaaattgtaatttatactaaatatattatatttatatgtccataaaagttaatattacatatataaaatatgtaaaaatataatataaaatacaattcaatataatataatataatacaatatagtgtaccaacgaaccatagtgaaggcactctaagtttccacatataaaaaataaacatcttaagtgatcttcaactactacacaacatagctagtcaaaggaaatttcaatttagtgatatataaataatcacattcgattattcattttgtgttcctacttccctcttacacataataaaaataggtaattgttttgtttatatatgattaatgaaagttcttattcaaatcttaataaaaaaaaaaaagaggaaattaataaaagtcaaaagacaaaaagtcaaaataagaagacatgacaacaaaacaatccataaagtttttgtgtcattaaaaataaatatgtgttaggctatttttagcctatgttttggatccaatttatgtgcatttctagctgtgttgggacggaattacgcttgttttctatgttttcaggttctttggaata

SEQ ID NO: 115143 - DNA, 4481 bp, Cannabis sativa
  modified_base (84)..(109): a, c, t, g, unknown or other
tataagtttaattaaaaagaaaaagttttaattaatcacgttttccataaacctcgttggttagcaacgagctgcacagcatgnnnnnnnnnnnnnnnnnnnnnnnnnnttagttagggtgttacagcttgtatgtgactggccgagcaagtcctcaccatcaagtgatgttgaatcattcgagcaggataacacgatagaaatagatccttgaagatattttccataaatatgcatgcgtttatatctcaatcaaatcccaatttgcctgggattatagcatgcgtcaatagagagattttaggaaactaacttagttttcctttttattcctaattgttttgagaaacttaatttatgtattttttcttataaatagtggagtaattttattatttgggaacctgaaattatatgttctagagacctattaagctgtcaaaataattgtaaactttttctaaggattattgagaaattcacttggccatctccttgatcttgatacttcttcgaagtaataaaagtaaaaggggagtaggctattacaattatcacgatgtcaaacttctataaattctggtgttcttattgattaattatattaattattatctaatatctcatcgctttaaagacttagcgtcattggctaaaaacaaggtgaacattttgctgctttcattgagagcaaaagaacacatatctgtcactttgattctttacaagtcgtcaaaagatggttgctcatacaagaagatctcaatccactgaatcaagtaatcaaatggctacggatcctaatgtgcaaactcctgctaatcaaaattaagatccaatggtgacggatcatgatctgaacacttgtctgcctccacgagttccccaccaacaagactaggagtgacaactcctctggctgagttcactccaggcacgcaagaaattgtaaccaccagtactcaatacactggtaaaattgggtcgggtaccagagagccacttatcggagagcctcgagtggagaatggtgaaaatactaaattacaaaacctaagggatgccttggggaaagtgaaaaatcataccaacacccttcaccataattaagaggatacccgagcagctatgaacctagagtttgaacaacaaaggcgttaaatcgtagagtggatggatcaacagactgagatcttgagagccaaacaagcaaagattgataatggatccaagcaagcaaccgaacagaatagatagtttaatcagcagagtggacgacaataagtggaagaaactccactcgtaagggatccaaacaacgggaaagatgcctatatcccgagtggaccgcaatatgggccaaaggaatatctagccaattgtactcagcagacccaagagggtggaccatctaatccaaggccataagatcaaactatgggagacacggtagacgagcaagtattggaagctagcccattatcttggaagagatggccaacataacttctgtcctcagagaaatatattgaactaaccaaatggagaatttggtgggcctgtaaatgtttataatcaggatggatgagttctagttaataatcaaactcagtttggcgagcaacagctgggccgttcaaggtcctgtataggtcaatccttcacaaacaagaatgatgatggggtggatagtagaaactgtatcaaccatcgtcatgataatcactatactcatcgggagaaccccccaaacaatgttgaccttcctaggcctagttagtcaaacaacctaaaaagaagacctctaggcaaatcagtctttgataggattcgacccataataaatgacttgaaggacgatttgaatcacgtgaagaggaggttgggatggtcacaatatccatcctctcaatactcaatcaattactatggacaattatatgtgcccgtcagtattctagagggccaacaggtggcacaggtcgatcaataggcatgtcaagttgatccaggggtgcaacccaaaatagatcaacttaagagcctcatataaagcctgatcgacccaaaactcaccgacctagaacttgacaagacaagaggatcctcacctcatataaatgccctcaatcttccaatgaagttcaaaatgcccacatgtaagatgtagatgggcaaagaggatcctttgtctcatatcaagtactttgagatgcagttggacttacaagcagtaaagggtgatgtacggtgtagaatcttcccaacgaccttggcagaggtcgcctagaaatggtacttcaagtgaactttagggaagttcaactaatgggatacctttgtggcatactttcacacacagttctcctcttccaagaaattcccctctcatttagaagacctggttgaagtaaaatagataccaggggaaactttgaaagactacgttagtcgatttatgactgaggcaaagaaagtgaagggattaattgaggaaggaaggttggtggctatcctaggaagaattgaacccttgagagaattatagaaagatatcaagatgcttactgtgggtttgatgggagtgtttttagaccgtgtagatggatttataaacctcgaagaaaaagatcgatccaagtcccatcactacttccattacattcgtccagtgtaatcagatctctggtaacagttcgagtcaaggtggtaaaaggtcgatcagcaaaaataatcaacataagaaggggataattaattacaacaccgaccaacaacaccctcaagagaaggctttgaaattcactgccttcacaatccttaccaaagaaagagaaaccatcttcatggcgaatcagtcaactatactgtctaagagaaccccttcaatcaagaaagatgtgagcaagagggttatcaccaagtactgtcgctttcattgagactacgaccatgataccaatgagtgcaacaatttaaaagaagagatcaaatgtatcatcaggaaaaataatccacactcgtgtaggtacattaaggtcgaccaagactaaagggctgcccaaaataagaattacttaatccctccacaagtggaagcatttacaggttatcattggggtccctcacattgttggagattcaaattataagctagagaattgtatgcccagattctgaagtatgagaaaaaagatgaaatattagttgtagaagaaaaaatgtcgaaatagccgctcaaagaaccaatcatttcacttagtgaagaagattccgaccatgtcatctatctacataatgaccctctttttcgttgaaatacagattgccaataagatagtgtctcagacaatgattgataatggagcctctttaaacattctctttaagacaacgtatgagaaaatgaggcttcaactaaaaggcttggttccttacacacaacttttgtatagtttctctgagaaaagtatcgctcctcttagacatattcatgttctgctcacagtaggaaaagctccaacaactaatataattatggcacaatttctagtgattgatgtaccctctcattaaatgtcatgttaggccgaccatctctctatgatttgaaggtagttacttcgatttaccacatgtgcatcaagtttccaaccaagaatggagtgggttgtttgaaaggcaatcaaggaactacacgagaatgctacaaccttgatttgactaaggccaaaaatgaggaaacaatcgccaaagcttgaaagaggacaagagcattgccaaatagacaagagcattgccaaatagccatcctaagctttatggacgcctatttagggtgtaatcagataagaatgcatccacctgaccaagaacacttaagcttctagagtgattttggtttatattattataaagtcatgtcattcggattaaataatgttcgggctacctaacaaaggctagtcaacacatgtctgaataattttcaaaatttattttttatatcgatcaaagtttgttatatagttacaacatgattgttgtaattttttttttaaaaattatgaagagtttgttaggcttttatttgggcttacattaactttcattagttttaataaaatatgggttgattggatagttctttgctgtggtagcccatattgttagtgatcaataattaatgggcttagcatttgtttgtgtaaaatcttgttgaagcaaaaatggtggcttttttagttaactaaaggctttgatgagtaggccaagtccaacaagaggatatgtatctaagtcatctccttaactctataaatacatgttgtcttatcacagctatacacttttgatattcaaataaacaaaattgcttataatttagagatctaggaaggaagacttagttgatagtattgcactgtcaaattaagagagttgttatggatcaatcaggtacacatacctaattattatat

SEQ ID NO: 115144 - DNA, 2535 bp, Cannabis sativa
taaactctactcttatgctaattcagcataagtgaaattgtgttttgcatttatttttagtactctaaacattaaatttttgcttaacaaattttatggctttaacatcaagtgcttcatagatcttttggtgagctagaaaagcctttgttttgattttctataggtagaaatgattgaaacagtgaacttggcacacctatttatagttggtggtgggactcactttaagtcagtgacagagccaattgttatacctaacagcaaccattttcaaatttgtttgatgagagaaaaaatggacctagtgacttagacaaattaagtgagtttattcccaacactttatattttaaataatataatatttaaatgatattttatattaaaaatagactaatttgcggcataattatctaagtttaattctcggttgtagataaattcttaaatttaattttttacggtaataatacctaagatatatttatttaacttctataggtacctagctttttagtgtaaaattattatctacatgtcatatttttatttgtgtatttaaattaatttttaaataaaaataataatttaataatctcaacaatttatatcgtaaattactaaaaaaaaaaaatatataatattttaatgatatatagtgagaaaaatattaatttttttaagctacataaaagatcctcatttatacaactaaaagtggtgctatatagcatatcaccataaccgtaagcattgattttcatatgatttttttcaattatttattaattattaaatcacatgggtgatgactgattgttatacaatataatattctttgacctacagatattgagccttcttctaatacttgttcattgctagtagctcttgttatatatacccaacactctttaatttactcgttccatataacaaagaccatcctataattcaagtgaccaaaaccaatcaataataatgtctaaaccacatgcagtgtgcatcccattcccagtacaaggccacataaacccaatgatgaaactagccaagcttctacacctaaaaggcttccacattacctttgtcaacacccaattcaaccacatccgtctcctcaaatcaagaggccctaactccctcgatggcttccccgattttcgctttgaatccatcccggacggcctcccaatgaccgagcaaaaggccgatgctacgcaggacattccgtccctatgtgtgtccaccgagaagaactgcataggcccctttagagaacttctcctccagctaaacgacagtactagtagcggtgttccgccggtgagttgtgtcgtttcggatggttttatgtcgtttacaattaaggctgctgaggaatttggtgtacctatagctctgtattggactataagtgcctgcggcttcatgggatttctacattatcggcaacttcttgaaaaggaaataattccatttaaaggtaaaaataatattatacaagataataccaatttgtagaaaatatatatggggtttttacaccacatattaaaattttaaaattttttatttttttattgtgagacgaaatattttttaaatatattgtgtaagttttattctatgttaatttttcactgtgattccactattgtttcattattgttttgattattctgttttgttttgttgtttgagggttattttataaaaagacatatttttgtaaaaacttatatgtaacagtaaaattctaaatttttactcaaaaatctaatgtatttgtaacctgtccaattattattagatcgaggtttctgtcttttgttaggatattagattaaaataaggtggacaaacatgcatgaaattttaattttgttcttgttttttgttttacattttatgagattattttcacaaattctatttatttttagcaatttatattagtaatagggtaacttttaaaacaacaagttatatcgtgtcgaaatatatattttaagaaaattaacgggtactttttttatttgagcaacaaattaaagggtattaattactataaaattaatttgaaaaataatatacttctaatgaaaataaaaaaaaaatgaagcaaagaaatcatacaaattaaaataataattatataaaggaaaaattacattttgctagtaattttatttgaaagaattttgctagtattatttattatcaatatttatatatatgaaagaaacttatgtttaaatttcttcatccttagaattagaattagacattttcaatccaattaaatatattttttttaatccaacctcaaaatccattatgatcggtttttttattagatatccaattacatacctaatttttaatattaattttaaaatacaaaaaaataactaaaaactaaggttgtttggctttacagtttaaaaactgttttctgttttttaaaactaaaaataatttttaaaaactattatgagtcgtttcgcaaaaatttttaaaaactgtttt

SEQ ID NO: 115145 - DNA, 2205 bp, Cannabis sativa
  modified_base (1826)..(1835): a, c, t, g, unknown or other
attgagatttatatatctgagaagactataaattacttgttgctattgcatagaatttggtataaggagttgaatcatgttagaccataatagatagatacaattgaaatcaataaccctaacctttaatcatcgttaatttagataccaatttgcttgtttttattgttttaaattctagttctaattttttcttaaatttaaataaccaaatataattaaaagtttaattttaaaacacttaactacaatccttgtaggatcgacctcagtctttgtgagtttataacttgataacgatacgtatacttgcatgttgaaaatatcacaatattgatgtgtttataatatggtatactattatttacaggtctaacgtacttatttattaatggtttttttttttaaatgtccaggtttattgttaagtctttctttagagtaatactagacgatatttcaagtagagatctttaggatgtaaagggtgtatttcattttgtaaacctaaattagtacactatatattataattatatttgtgttattaataaatttttatttatacctgagttgtttaacgattataattatgatataaacgaatatataataaaaatttaaaattattaaaattttaaaacaataataagaaaataggtcattatacaacgatttaaaactgtctcgtataatactataggcaacggttctaaactgttacctatactcaacaacacaggcgacgattttaaaatatcgggaatgctttttaggtgacggtttcgaaccgtttcttattccacctgttttgcgacggtcgaacaggcgacgattatagaaaccgactagaaaactttacttgactgtttaaaatcattgggaaaaaccagtaaatagtggtattactaacgggtcacaatgggatgtatataatgtgctcggggccatgaacacgctctataatttcttttgtcagcccattggactaagataatcaattctcaccatatgggcttgtagccgtaggcccagtaaacccattaattctcataaaaggggtcatgccttattttaagtgaaatagtcttatagatgaatatgggtatgtgtgtgttgaaggatgaaaagagtaatgtccatacaaacctttgcatttttcattgttttctttcgagtgtagatttgatgattaaatgagtgcaagtgatgtatgaagattcatagccattaattacaaggtaatatgctttactcactaatattttgatgctaagatgaaatttggatgataaataagcattgttattgtacactgaccgtttgaaattcttggatcgatatttcttgctaccattgcacaagttccactttaagaccttactctccgcaagagatcgaggaaaaactaagaagaacacgatcaattttgataattacacaatgatcacggcaacaacaccaatgattgtaggcatatactagaattattaaagcacaaaatcatatataagtaatagctactttttttttttggaaaattaataaataacttgtatatactttgatttggctaattaggatttttttcctcccgaattttgatatttatcaaatcataccccttgaacttttttggacgttaaaaattctcttcaactattgagattgttagatttaagcacttttatctaatttaatttaattttactgtttcagtgattgtttatgtactaaaatatgctctccaaattttcatatctatcaaattatgcccttcgaactttgatatgtactaaatcatgtctcctgaactttcatccatnnnnnnnnnnttttactaaaattagacaaaagtcattaaatttaacaatctcaatagtttaagaatatatatttttttttgaataaaaatcataaaatctattaattaataaattcgttcaaaataataaaacgcactgagtcttttggcaagcaatgagccaacttatttgcagatcgttttacaaaatacaaattgtgaaggcataaaataccgctctgaatcgcttggacacacatcaaactatctattcttaacatgactctatcccacgattgagttgctatccaactcaatgcttctttaatgcctattatctcaataattttgggttgaacatatccaatcttctccttcttgaatgcttctaccatagcacc

SEQ ID NO: 115146 - DNA, 5096 bp, Cannabis sativa
atctatattaataagtaaatcagattatattgaagtgagttttatttagggcataaaacccaacatttaacacagataaggacaatccattgacttacaaagaagtaatggaagacactgactcagacaagtggaacaatgccatggatcaagaaatggattctatgtgtaccaacaaagcctgggaatataaaactccacccgtggacattacacttattaggtgtaagtggatgttaaaaaagaagagaaatgatgaagggaaggtagagacctttaaagctaggtttgtagccaaaggttacacacaacgagaaggcatggactatgacgaaaccttctctcctgtggaaatgcttatatacatttgcattcttctttccattgctggcacttatgaatatgagatatggccaatagacatcaagattgcttttctaaatggaaatcttgatgaaaccatttatatggaacaacctggagggtatgtgctaccaagggaagatcgaaaggtatgcaaattgcttaaatctttttatggattgaagcaagcctctagatcttggaatatcaccattaaataagactattaaagagtatgactttgaacaaaacaaagatgaagtgtgtgaatacaagtacattaaaggtaatgtagtggttttcataattctttatgtttatgacattctacatattggaaacaatgtaggaagattatcagacgtaaagaagtggttggctaaaaaattctaaatgaatgatttggaaaaagcaagctatgttctcagcattaaaatctatagagataaaaagccgagaacattagcactctctcaagcaacttatattaataaggtgctcgaaagattctcaatgaacaattccaagaaatgacagtgaccgtctagacatggaattactctatacaagaatcaatctccaaagactcctcaagagatggaggacatgagatagtacccttatgcattagtaattgggagcttaatatatgaaatattgtgtacaaggcctgacatatgctatgttgtaggtattgttagtcgttaccaatttaatcgaggtttggaacactggatagttataaagcacattctcaagtatctttggagaacaagagatctcatgcttgatcattccagtggagagttaaatcctactggacatactgattttgatttttagtaagacaaagatagccaacaatcgacatttgtgtcagtatttacttttggtggagatgtagtctggagatacattaagcaaactagtattacagattcaaccatagaagtcgaatatatagcggctcgtgaagcaaataaggaagtcgtttggttgcagaaattctacactgatctagatgtagttccagaagtagaaaaactactggtgctttactatgacaacagtagagcagtggccaactccaaggaactaggaagccacaatagaggcaagcatattgagaggaagtaccatttactaagaaatatagtagagagatatgatgtgacgatcttaaagattgcattaaaatataacctgacagatccattcacaaagacgctaccaataaaatcttttatggatcatataactaatatgggactaagggagatgcccaattttcttttaaggcaagtgggatattgttagggtttataccttgaaaagcctgtaaagatatttctgattattaataagagtcaaacattctgatatatgcatgaatgttacattattaatatataatattgaataatttatatatataaatattgaagaattctttattcatacatgaggttgtgacttgtagttgtatggagaattaagatcacttagccatgaataaaatagttagtaacatattaaagtttgaaaatctttaatcaatggttgctagtgcaattcactaatgcctgttatttagtgtaagtaatctcgattcgatttactgatgtagtatcgcatctaagtgaaagtgctatataaatcatagagattatacaagaattgatatgaataaagttatctatatgaaacttacatttttcctgtaaagacctaatttatatcataatggtggtcaatagtagatcgcctaaatcttgagtaatcataaactcatgttcatgttattaggttctttaatttactcgttaaagtttctcagagaagatgattcttaaaatctatattttgggaatttaataatgtggatggttgggaatacatctacaattatggaattcgaacttttctaatgggtcgaatgttagttccctttaagtgttaattttggaattgaaaagttgtgcacaagattagactcaaattatactttgacaagtcaattagcgatactaaaagataaagaagtaattagaagggtaaaatagtaatttgaccaaaactaattacgaactgacacaaagagggctaatcaatagaattgattatatcagtaacaagtgcagtaaaactcagtatatataattctataattactaagagtttaattccatatttatagtagagtaatcatggaattgatgaacaagattatttgattgatgagattcaattaataaatctagttttattggagcttagaattataggccatggttcccggattgccaccttgaaacattgttaagggttaggataaatattgtatatagaattttagaaaaaattattttgagttagcaaaatagtaattatttattttttaatgaataatttattttttaaattaattaaacaggaaaaaagacaaaattatcaagacaaaaggcacattccttgtcttaaatgagacaaagtatgctccacatgcattgtgtccatacacagtgcatgcgacccatgctgtggagagtccctattgattcaatggataaatatttgaatttaaaaagtagttgagatattctcttaagtggttaagagattccctcaattagttattagatgtaaatatttataatctaatacggttatattatttcttcaaataattaaatataatttaataaatatatttaaatttaaaaagtagttgaaatattctcttaagtggttgagagatttcatcaatcggttattagatgtaaatatctataaccaaatttggttatattatttattcaaataattaaatgtgattaaataaatatatttaaatttaaataattaattaaataaagtttttattgggtttatttaaatatactgtataacatagttttgaacataagttttggaataaaaattttcacgttacttttcttaaagcctaaaaaggatttttaccaaaagccttctactctctatcacataagaaattgttcttatatattcatgtgttgagatttatacaataacttcatatacactttatcctagtagtctacactattctttgtgagtttttaatcgacccgaaaagatacaacttacaaaaagaattaaggataccctgataagcatcaaaatgtatttatttctttcatgcaatttatatttttaataaatatatatacatctagagatccttgggactatggtaaattgatgatcggatatacaattctcctgtacgtatagatttgatttagtaccataaaactaacatattcctcaaattcatcaaggaataatgccaggatatgatatttcaacaactacatctcgaaggagcccattcacaactatgggcatccaggttgacatttcaacctggccatcgattttgtttcaccgggttacacccttaaaaatttgacaaaattgaaatttgtggagtaattttcccaaaaaagaacattgtacattaacgagaccaatttggagctgtttcccctagttgggcacgcagtgcagacccttaggccatcttgggcacgcaggttgacatatctcaacctagggaactctaaaacttcttttcggagaagttttctaggcatctcccttatttttaaccacgaggaagatccaaatgctttcgagaaacaaatgaagcaatctggagcccaaatgaaaagctggcgatcaggtttacataaaacacttttggtgtttctgtcgattcgactgtgattatgtctcagacattattcttattttactctaagaaaagatatgagacctggaatcaagagaaaatatcattcgagtaatgagttatcccccaggcatcatcgggcgctagcatgcaatcacacaaggtgcccaagttgacattagcctggggctctgtgttttgtccttcaaacaacaattttactcctggcatcaatcatattttgcctccaaaataagatttatcatattttgcctccaaaataagatttgtattcttctgcaagtcaatatctcatgtagatgtgccacgctcaagtccattgatacccatgtgcactagtaatcaccggagtgtaacctagtcgtctctagtaattcaccgggcatcacccatgcatataaagtaaaatttccaaaagaacttcacctaggtcaaagaatgaactaagggtagctatcacattattcaagcatctcaaaatattcctaaagccccaaataacatgttttgggcgccgaggttaaagtttatgacaacttgggcgcccgaaggtcaacctgacctcgtagtcactttttagtagtgtacatttgctcagtacaatggtcataactctctcactttttattcaaatgatgtgattcaagtggccaataagcccttttcaagttgggtatatgtgtgtctcacacccctgccacaattctcaagattcaagcctcaaaattgactcacgaactcatgtaggatttcccagcaaatttagtgctattttttttttaatttattgtaatttaattgtacatccttccctacaaaatgagagcttccctagctttttcacactttccattctctctacactgtgagagattccctctcttcatattttcttttttttttttttgataaatcagaaaattcattgcactataaactctttgtgtaacgccctaatgctaaggcacgctacagt

SEQ ID NO: 115147 - DNA, 1398 bp, Cannabis sativa
tcctaataaaattgggaggaggtcagtctaagacatatgacttttagttctttttcagaagaataaaataaaattttttttccattgtattacaagggatatatcaaatatatttttctgaagtgagtgttttgtatagagagatttcaagtatggtgttttgtttttagaaagagagaggagaagcagagggtggaataatgagaggggcatttgggttcccaattagaatttcaagcatagttttcaaaattttgttgataaatgtaagccaatgttaagcatagatgcatattccttattttatctcttgttttgcgtcatagcttattgatgttgggatgtgttaattcctaaggaattgggaaccatttgatttgagtcactgactttctcccactttctttttcttttttctgaaaccttgtcacttactactttaagattccaggttattgtgtcacggatgagatacatatcatcacaaactgatcgtgcagtacgatttgtgggtctctctacggctttagcaaatgcaaggtaatttaagcaatgtttcttcaatcactttatcttcatatggatattttagtgtttcttctaaagttcttgctgtctctatttagtgacttggctgactggctgggtgttggtgaaattggactcttcaactttaaaccaagcgtgaggcctgttcctcttgaagttcatatacaagtaagtggattcattgcttctagtactaccaatactcacaaagtatttttttttcttttctatttttaatttcctttttatcatctttggtgttgtattcttgtgggtagtgttaagctctttaagatttatttctacctattctgattttatcattttcctaatactatgaaaatagttcctggtttaagtatttaagcttctttggcggtcttttttttccccttaaacttaatgatgcttcggttgtcaacaaagcaacaaaaagaatagatcaatccaagaataatgggtttttttcccctttttattttgaaaaagactgaaaagtctaaactacagggatgatcttacaagcagcagatatagaactagtcaactctagatatagaactagtcaactctacgaccttttctttcgaggtatacacataaatatattatcaaaatacccagacctactacaaaagagaaaccccaaaacgaaagatccctaaagaaacaacaaaactagctacatagatcatggtttcgctacccagattttatacactgactttggatgattttcggaaaagctaaggtcgagagttatgactgacctcccgttgaaaaaataagggaaggtcaagcagtcagaaaactcaaacttaaaaaagggaagaaagaaaagaaaagaaa

SEQ ID NO: 115148 - DNA, 3100 bp, Cannabis sativa
aatataatttgcttggtcccaagtctattcttgaatagaggttctactgtattattaatagttttagtattcaaataattaaatttaagaaagtaaaagtatattatttatatatttaaactttaaaatactatagtttaaattaattttatgaactttaacattaattaacaaaaattaattgaataaatattcatcaaaatatagaaaaaggtaataataatataatatggtgtaaattacttcaatacttaaaagtaataaaaactattaactataaagtctaaatttcatgttaaatactataaaattcaaattttaaatacaaaataatttcactaataaacataatttatttaatatattacatatattttttataaaaatttatataaattgatttatttagattgagaagtttagaataatttttaatctactcaatatatttatattaaattatttggggttacattttattaggtttagtcggtttgatttaaatagtttattcggatgggatattttgtaagttttttttaacacccctaacattactttgtttaggggctttactttagatttgattattattatttttttttgctggattgaaaaattatttatttatatattgtagagggaccggttgttggttggtgacgagttgtgatgacatgtcatcacaaacctttcaattaggatccaataatagaatagacagtgttgtggtgaggtgtggtccttttctttgtatagcaggaaaatcatggcacgccacgccaggccgaaccaaaaatatcaacccaaaccaatctcacttaaaaaacacagaaaaagtaagtaaaaataaagaaaggacactaaagggtcccaccataccagctttaagcacatcaacgacagcatcttcaggcgactttgcgaatccttggttgtcgtacatgatcgaaacggcgtcgcagtcggacgtaatgtacctaaatattatataattattatttttagtaataaaagagacaagagtagtcaaagataaaaaagaaaagcataaactaacataaatgcacatataatatacattacactattcttcatagttaaatagttaatattacccgtgaaatccccactgggctcgagcaatcttagataagaggttgaaatcggcacagtttgggaccccattgacacggttgtaagcgcacattatcccacttgcttttgctttctctatgcagctttggaacggaggctggtacgtgtcagctaggtcttgctgagtcacctgttttgttttaataatcaaaatcaaccaaccaaaattcacataatccgctcccaaccccatcatgatcttgtattattttttattaattaacaatataatttttgtcgaatgaagttacttcttggtgctctgttgaagaaaaagaatcccttaaatctcgttttatttttattgtaatgtagaataataccattgtctttgaccgagacaatgattctacttttatatagcctatagggtaaagtaaaacactaccaaccaagtaccaatgagttactctaaaacccatcattgtcgagtcatttctcaatctgggcacatagagcaatgaggaaaagaatgatctttgtttgaagaagttttccctaaatgcaaacatttttttatggtgataacaagattagaaagaagtaaaaatcttacatgagcatcgaagacaaaccgattaatgcctttccaattgtccaaatcataagctgtaaaatgcttacaacaagctgaagcaagaagatgagcaccaccaagcttgcctccttcaaatgagtccccttgtacacctcttacatacgacactgcatatttcccagtcaccaccggatcttctcccggcgtttcttgccctcttccccatcttggatctctaaaaatgtttatgtttggagcccaaaatgtcattccttttgcttctccaccattgtacacggctctcgcttcggttccaatcacctataataataactcaataatattcattcatcatcataaattaaaaaaagagagttgagttgagcattgactcacctggccgattcggtaccaaaggttggcatcaaaagaggcagcggtgagaatgacttgagggaagctggtggcagagtgaatggctccgtcaaaccttacgccgggaccggcatcggccacaccatgtaaggcttctgaccaccactcgtaagcggggataccgagtcggggaatggaaggggcggtgttgacgagttgggatatcttctcgtctagtgtgagacgagagacgaggtcctgaaccctgcgggtgatgggcaactctgttttgcagaaaggtaaggactttgtggtagggttggccgagtcgcaggcgtaaggaggccgagttgactcggtcaaaacaagggtagtagtactagtgatagtgataataatgaggataacattaacaacatagacataacaacaactggttggagtgggagagtgagtgaggaacctcatactagtcatggcgtaggaatgaattgaagaagactgagttagataagttcatacttatagtgaactcaatctactactactgctctgctaccatcgttttagttcaattacaataatgtcctctacttttgtttttattattttttatttttccttaaaaatatttttaaaatgaaacgaattaagtaataagaagagagagaagctatgaatttggtcgatcttttgattctataaaaaaagttttatttatgtatcatgaaaaaaatgcaataatgtataatctgaattataaattataaattatagtgattttgctttctccataatagccatctatatatttatcacttgccacttactaaattttgaatggaaaatttaattttttaatagggaaattattttatatactgtttttgtaattttttttttaaatttacggtttgagtttctaaaatgactgcaacactacttgcaataggggtttttatacgattttttgttacaatttaagttgcagcgctagttgcaataggggtttctatatagaatttcgta

SEQ ID NO: 115149 - DNA, 4629 bp, Cannabis sativa
  modified_base (4578)..(4582): a, c, t, g, unknown or other
gaacataggctactccactcattgtcaattggttttgagatgtaactccatgttcttatatatgactcaatacttttacatttaatccatgtaggacaatgttctccaatatcatgtgtcattttcattttttcaattttactttctgcagcatatttataatttaaggttcaattttgaataaaatatatttcaattctgttcaaataattttataatagttcaacattaattaaattatcttttaatttcactttgctaaccataaaaacagaatttcatgctttgttaattttttgtttttcagtttaaatttctgcagaagagtttggaatttggttcttgatcaaagcaaattaaagattgagtgtgtgtgcactgttgtgttgagtggtcaaaattagaccacttgtgtactaataactttgtgatagagttgtgtaagaattaaagactataaattccaacaataattatatacacatttcatttatagtaatgagtccgacacatatattgttcaccaatctttcttattatttattttaattaaaaatttatccaccatactgtccctatctttttttctttaattttttgggtccatatacctatgccttttattttttcggatgagctatgttttatttgtggtgtgtgactgcccaaatcagtatggaacataaaagtgtacttctattgtcaaggcattgcatgttaactaataattaattattacctactactactacgtactactctagaagacaaatttatttatggttctacacctacaacctacttaattaattttagttagatttgtttcgtattttagctagttttattaattgagcatttctattaggtaccagaagtgtctagaactttctcgatatgtcgcattgcgattggctagtaatactccctaaaagctattagattaaactatacttaattggaccaatagcgatattgacacataggagggtgttagacaccactggtaccctttagcatttcccttattaatttaagaaggatgatataattagtgtccatttcaagaaaaggagttttaattacaatattttattataactttttttctaatttttatatttgaatatatatgttggaatatttttttttctaatagtgttcattataattacaacattatttttgtaaattttaaaaaaatttcaaataatttacagtatcgaaaacaagtttaaatttttttaaacacacgtggattaactgaaatataagaaactctgttgttgatattgtaaattatttttttaaaaaagtattagaataatattgtaactattacgaatacttctatgcatgaaaaaaaaaattcgtttcaaacatagaaattgagaaagaagttgtaattaacgctcattttcccaaaaaaaaaaaagaaaaaaaaaaggatggctgtctcaatcaaattgaagattttttagcttttgggtaaacgtttagagcatgtttggtttagtataatgaaaattgtaatgaaattattattaccattacattatttgcttttatttttaaaactttgtaatagctttacattgtaatggtcattacattatgtattgtaattcccattacattacaaaactaatgtaatgatgattacattgttaaaaatatcaattttgcccttttttgttacttttatttaaattttaaatattaaaagtaataaaactaaggatatttttgtcaatatacaacttactttatttgattacaatatatattacagtgtcaaaccaaacatcatactactatttttattacaattcttattccattacattaccattcatattacaattacaattcccattacattacatcaaatcaaacaaccccttaatttgaagactttttaaattagtacataaattcaataatttaatcctttttaataagagttactaaaactaatatcactctaaaatcgtgacaagattcaaaagacaaaaaaacaactaccacaatttaacctataaaatagcagaataatagaattgaagatgtgagactatttctaatgagagattcaaatgtgttaaatttgacacaaaaataattttatttagtacactatttataattgtgctccaatactcaaaatgtaaaataaataaataaaataattaattatattgataattgatattttgttgagaatataaaaaaaaaatattattttttattatttaaaaaatgataatatggtaaatacaaaatgtaaaattgagtaaaagtcaatgaattataataatcagtgacattatagtaaataaaaaagtaatatatattgtgggctaaatttgagataatgttatatcttgaatcaaatttggcacaacttttagcatatccaaaattttgcatacttttacagtaccaatggagtagtaatttttgttaagtgtgctaaaatatagcaatgcaccgcctttttagtactccattagatatgtaattactaacaagctacttggcaaacagatgacaggctatcgaggttggcaatttggtggcagtgattgagttcaattctggagttggggttctggagcagcgtcggagaaagcagtgaaaacgtttaagcttattgttgaaagttagctactctttcaaccttggaccaataaaatcttattagactaactaaaaatgaataagttagtatttttacaattttgcaactcatgcgtccatgagtcttaaaatcgagataccagcccaataaccccttgatccaataaccactttaacaaaaacaatcagatcacaatttctagggtttgaatcactttgagaaaccctgagaaacttcgcacttgttagggttagatattcacacaaaaatcacacatgaaaaacacaagaaataaagagaagagatattatggttcaaaaattcaaacatagaagaagaacagaaggatttttctcaaggttcacccctgaaaatatggactacatccttgtcgagctcaccaataaatgcttgatattccactatcaaaaatcaagtatgtttacatctccctcttgatttcaagtaaatttattttgaatgacaatcaaacgttcaagcattgaatttctctctatttcttttacaaagatttccctaacttttcttctgtttttctctcaaaataaacacgaatggagctaaactctcttactcatctctctcacactctggattgaatctctctaactatcgcgaggagttctgaccttagatctggtttgtatagatgatgtaaggtttgttggtgaaggcccaaaatattgctgagttggagtaagtagttgaaatatttttgcttgagtagtttaggattttattctgttgagatgtaatttgaaaccttcgggtaagtttataattgcttataattgattttgtgtaacacttgagccaaataagagaatttattttaacaaattctacctaaattgtcttattgatcgatgatagttgatttaatctcaatgggtcctaactcgatgaccattcaaggtaatccaccattttcaatccctagcaggtcaagcagtgcttgaactttgctaggggtaccactttagtccctatgtctgaagggttgtcctctgtgggaaattgttccatagacactcctctttgtgtcactttttctttgctgaagtggtatttaatctccacgtgctttattatgtcatgaaaaactagatttctacataggtggatacaactctaattatagaatagaatataggattctcctttaatagatatagctcttttataaatcctttagtttaaattgcttctttgatagcttttgtagctgagacatatccagcttctttactagatatggttgcaataggttgcacctggaccttccagcttacacagtatccacctattaagaagaaatagacagatgtagacctcctagtgtcgatgtctcgagcatagtcagaatcacagtatccttctatcttagttggctcctgtgacttcttataattcatctttgtttttgtagatccaagtaggtacctgaatatccatttcatggctagacagtgaagctttcttggattattcatgtacttacttagtacactaattaatatcataggctaagtcaggccttgtacttaccattaggtacattattaatccaacaaaattagaatagggaatcttgctcatctcctccttttctttagcagtagtaggacaatctttcttagaaatatgatactggcttgttataggctgactagtcttcttagcttctttcattgaaaacttttcaatcagttttagcgcgtagtcctcctctacacataatcccagggtccctttgtttctgtttaattatagatatccctaggatctaagttacatgatcatttaacttatcatatttatttaaaataaatgcaacaataatatgataataattttctcacaaaaaaacaaataataattaaagaggtagcgacactacaagaaatgtcactttnnnnngcacatttttgtgctggcaaaagtcggtattgcgctggtaaaataga

SEQ ID NO: 115150 - DNA, 5437 bp, Cannabis sativa
aagtcaattactttgtatttttgagaccttactaatgaatcttatctctgggcgtggccctatggactagtaacaatctaaaagaattgttgtaaccacctacaaaaaccttgtgtgtttttacttttctgcaatgtttgtttttctggtttcttctagagttacagagttgtcatctgtagctaaagaaaaacagtttcagtaccagtttcattattctgcatttaattaagtatttaataataaaactgggaatattaaaatacggaatttgaattggtattagagcgggtcactaaattcttagtgagttcttgagattattccatttaatttgttctttgtgatatgtctttgtttgtagaaggaaactctatccctcgaccacctctgttgaatgagtcaaattatctatattggaaggtcaagatgagagtattcattaagtcacaagatgagaaggcttggagagctatacttacgggctagtcgtaacctactgaaagtgatgataaaagtaatactaaggtaaaacctaaactcagttggactattgaagatgaaaaattatctggttataataatgaggctttacatgctatttttaatggtgtcggtgaaggctttattaaattaatttcatcttgtgaaccaaaataaaaggttttccttgtgctcttgctctcgcagttgagaagctggagctatggcaaaaacgagatcaaaaattcaagcgaaatcaagatctgctagcaagaaagggtagaagaaggaagaacgagtagagaaggatgaagttcgagcaagtacgatgactaagatggaagaaatttaggagttggagatatcagatgaggaagagattgacagagcagaccctgctctggttgatgtttttcaacctcctatgtcccctggagcatcactgaagttgattcagagacaagaagaaatcaaaaatgattttgtgcatttcctcaaggcaaatgagcaatgtaacagtgatttgcagcaaggtaagactctgattcctcctattttacgttctggatctattgtgcgtaatcttgagaattctttcaagcttgatgaacaaaagactaaggtgaaaatcactttggaggatatcgaagatgaggttttgtttggaaaccttcaattgtctgttatgacttaggttcaaaccctccattacatataatagaaggttttgccaagagagtttggggggataaagttgatagggtgaagatgctatcctttggatctttatcataagattttgttctatggattatagagatcaagtgcttaatggtggctacatattctttaatagaagacctgtcattatgaaaccatgggatcctaatgttaattttaagaaggaggatgtgaaaagtgttccaatttggatccaattagaagacctagaactaaagtactggggagaaaggtcttcgtttaagatagttggtcaaatggggaacccaattatggtggatgcaataaccagagacagggagcgacagaactatcctagggttctaattgaggtaaatatggatcgaaatcttcaaggtatgctggaattggatgatgaacatggctcgaacacttccattggagtaaagaatgaatggaaaccctctatttatactcactgctctggtttgtgtcatgtagcagcaaagtgtaggaagcatattgcagggaaaaaaggatggatagtgaaagctgatcacaggaaagtaaaataggttgatgaggagggatttacaaaggtgacaaagaccaggtggcttgagaaaccagtacaggtagttgctgatacagctgttagtaacacattccaggttcttgatctggtgcaagatacaagggaaggttgtaatgagatagggggaaacactgaagaggggggagagccctcttttctaaatggataaaatgttatgttggaatgttcgagaagctaacattcaacataaacaacacttaataaaacaatttattagtgtgagaaaggttgattttgttgggcttctcgagactagagtaaaggcctcaaaacttggggctttgtactcaaatgttttcgaaggatggtgtttttcgtctaatattgcttggcattcttgtgggaagatagctattgcttggaaccccttgagatttattgttgatattattagatgcacaagtcaaattatgcatctaaaagtgtcaacaatagatggtttcttttcgagctatcttactgtgatttatgcctcaaacaaccgaaatgaaaggaagttactttttggaaaagtttgtatgaagtcaatataggggagaattggtgcctcatgggagatttcaatgatatacttgctaaggaggaaaggatagggaataaggtaaagtattaccctgactcgaattttttgagtagtgtgagctattgtcaattggagatataaaaacgagtgggaatttctttacatggtctataaacaacaaggggaggatataattttttctaagattgataggatgttggccaatcaatcttggattaataaatatgaccatgctgaagtggtttacttgaatgaaggattatttgatcattccctaggtgttctcaatctctaccctaccgttgagtatggcaaaaagcctttcaagtattttagaatgtggaaatcacatccaaaatatgaaggcagtctaaaagagatatggacataagaaataattggatctgctatgttttaaatggtctctaagctgaaacaattcaaaattaaactaaaggaaattaacaaggaaggctttaacaaccttcaagccactgtgggaaaatataagcaggagctagatgatttgcagactaaattgcagcatcatccactggatactcccttaattacacaggaaaaggaggctcgagagagactaattacaacacagaaaaactatgcttattttctacaacaaaaggcaaaaattgcttggctacaagatggagattgtaacactgctttcttacattcaagtatcaagcagagaatgaggcaaaatcaaattctctctatagagcaattggatgggagcaagactcgtgaccctaatctaattgctgtagctttccttgagttttataagggactgttgagcaccagattggagaacagaaggaaggtacatgctgggatactagccaaaggacctaaattgactcaggagcagactaatatgttactacaggaattccctacaaaagaagtgaaggctgctgtctttagtattcctggatccaaatctcctggccctgatggtttctttagtttcttttaccaagataactgggaaatcattgggaaggatgtttccaaagttgttctgccattcctgaattcagacaacatcataaaggagattaactcaacaataatcaccttggtccctaaggtaaaatgcccaaacacagtcaaggattttagaccaattgcttgttgcaatgttatttataagattgcaactaagcttttgagctctagaatcagaaatatcttacctgaaataatttctccttcctaaggaggttttattaagggtagatatattgggcataatgaaagaaaatccagcaaaccaagctgtatgattaagcttgatcttcaaaaagtttatgatactattgaatgagatttcattaaagaaatgctagaggatttaaaatttccaaagccgtttatccagctcattatgaattgtgttaaaacccctaagttctctcttatgttcaatggatcatcacatggcttttttgaatctaagagagggcttaggcaaggggatcctatgtctcctctattatttgttctaggcatggagtatttgtctagattgatgaggaaaataggtgagaaagcagattttaaatttcatggtggttgctcgaatctcaagttaaatcatttagctttttcggatgattttctcttcttttgcaatggggacatgaggagtataagatacatgcggcaagccttgaagctattttcattgacctctgattatatctgaatgccaacaaaactgcaatttattgctgcaagaggagatacaccagctgctgactttgtctagttttcagaagtaggtacttccttttacctatttgggaatcgcaatttcttcaaagaaaatatcagggaaggattgtgaattattggccgaaaagatgactgctagaatcaagagttggagttcgagaaatttgtcttttgcaggaagaattactcttatcaattctatgctcattgttattcaagcttattagagccaaatgatgattatgccaaggaagattctaaaaaacataaaggccatcagtagagaatttgtatggaagggtcaagctgcttttcaaggggtaggagcagtggcttggattgatgtatgccagccaaaaaaagctggaggattaggcattaaaaaattggaagaatggaataaggctgccatgtgtaaatacatatgggccattacaaatagacaagaaagtttatggatgagatgggtccatagtgtatacatcaagaggtattcttggtggagttactcgacctctattcatacaagttggtattgaaggaagcttgtagctctcaaagatcacctcaaaacattaattgatcctgatgcatttcaaatgcaaaaatatagtatttcagtaggatattgcttactcagtcccattcaaaacaggttgccatggagctaggaagtatgggcaaggttgaacattccaaagcatagtgtaatactatggttggcaatgttgaagaggttaaagactaaggagaggctagtcaaatttacgctgcaaatggatgactactgcagcctttgtaacagacagaaggagtacagcacttgttcttcgagtgttcctttgatgtccaatgccttcaaggaatcaaagattggctggtgtggagagcaaagattattgatctggcccagcttattagatggataggcagagaaaaattgagtcgatttcgaaagcaagtgtatgctgcagtagttgctggtttagtgtactgcatttgggaggctcgaaatagagttatttcgcaaggggaacaaccaattagaagccagttgataaaggatttgaagtggaaatttaaaattcagattgttatgtttttgtctaagaaaattaattgtaaagatagatattggttttttgaattgtaaggatgtaaatacatagaatgtatagatacaaacgaggctcctaaattgggagtgctcttagtgtgtaaattgggtttgtgtaataaaatattctgattcatcaaaaaaaaattaatcttgtgaatctacaaaggaagcgtgggaaatccttcaaactgatgtaaaaagaccacgtttt

SEQ ID NO: 115151 - DNA, 2360 bp, Cannabis sativa
tatttcatcataatagctttttgtcaatagttgcagttgcagactagattaattattcttgtcatacttatgatcaagtctgtataactttgtatttttatttgcaacctcaagtgaagtttctgataacatgcccctcagggatcttggcttcttctaccggtatgacaatgcaaccagatgcaagaggttgctggagaaagaggaggctatcttcatggacgaggcggtatctctctttacttatatttcttgtctatttcgtgattggaatgtgaaatttatgtttgttcttagtttacatctttttaacatggttgagagtgagcagccttggacagtgatgaccttctatatctcaaggagcaaatggaagctgaggaggacgccgagcgtctccttcgccgtactgagaaacgggcatttgctgcctttaagatatcctttctcattgttttagcaaattctgattttcaactgcataagttactctcataaattgctaggaatctctctctttgttggatgagtatgaaacttgtttaaagcttctgttcaaaattttcgaaaatacttttgatcaatttcgaagtatgatagctcattaatgcttttatctttttgaaattttttcatatttatcaattgataagcatggttttttcttttaattttttaaatgcatttgtgagaaatactatactgattttgaacttaaattctcctcctaaacaatcactagttgaagatatgagaaaatacagttcatctttttcacttgttctaccttgaaacgagaatcgaactgttgttgtcaattttctttctcctatttctcctttagatgaaatttgtttgtgattagacattatttgtggtacaaatttccttaaccaattggcacaaagctgcaagtttagtggattcttcacctgcaaatgttcccttgccacttcgcgttgagccgaagccaaagagcggaatcaggtatgttcgtgctcgacatttgaaccgacttagtgaacaaattgaatattttcaagctataccttaattttctttattatgttatatattttacctacttggaaattcagacagcaagatttactgaggaaggtagtggaaattaaaccgaaacgtcatagagtctcgagcccacctgatgggaatcagtctactcggggttcagtgaatctcaactcagaatctaaaaatgagaatgaaaagaagtacccattgtcgaaatcagaaggcgagagtcgagtaaataatcctgttaaaggtttgttaggcttagcttatgaaagttcagacgatgaagattgaataacaaacgggcaagagtgagttaacaagattacaatttgagttgaagaaagctctattttctgtattcggaagcggttagagttattagtatcttctttttgcgcattcgggacttgtggcgcaatggaaacaaccgaggatcttgatcgtaaacctcgtaattttcgaatgaaggaaagtccatttttgtaaacattcccaacttagtaaaaacattcttagtgtttttctagtacttgttaaagtgatctatcacaaataaattaaactatgttgaactatgtttgacatgaatctttattgtgtttatattgtgaaagtatgtacatttataataacttaagatcttcatcactaaatagtgataccatttttattttaacaaattagtgagaggtatttactagaggaaaactattgtgaagaaaatcaaagtttcataacacatatacataacatattaaaaatggatatttgtggtgaaactcttttaacatttataattgttacacgactctaataaaaaaaatgtcggcgaacgtaccttattttacgaatttgttgtgtattcttttttgggattatttcacaaatacacaaaaataataacaaaattacaaaaatacaattttacgaaattttaaatatttttacaatttttgttattttatttatagaaaatacggtctttttatgttgtacactcgttaatttgttgttaatttttgttatatgtatgttattttttgttattgttttgatattatttaaatgttattttttttttgttacttttatgttgttttttttggtgtttttatgaaaaaccgtataaatgtaaaaaagaaaattatgtaaacataaaaatgtaatttttttacaaataatggtgcctcatgtaattatcccttcatttttggttgttaagtgtcatttaagctcgttaagtgccaactcagaaacacgtggcaacatatttttttagcttatttaatatatggtccaataatatgtcgccacgtgttttt

SEQ ID NO: 115152 - DNA, 2500 bp, Cannabis sativa
  modified_base (2231)..(2236): a, c, t, g, unknown or other
aaaatttacatttaattttttaaaaggcaatatttttgttcgtgggggctatagcccccacatcactcttaatgggtccgtccctgccaataatatatattaattttataatacacattctaaaaagatgatttaagtttatgttttctctgtttcggtatttaaaaaaataatttaatctaattcttttaataatatacattgtaattatttaaaatcacttattattttataaatgtccaataaaatttgtatagtttttttaaataaaaaaattattgttaacttagattttcgttaacaataaatgaagctttgtaaaaaaaattaagtattcataatttgtaaatatatatgaaacactaagaatttttatgtaattttaaagttaaaatctacattatcctcaagtcattatttatttttgaatatttcttggtaatgtatttagattacagaggagtaactatgaaaatttactcaatctcacaagattttttcttctccaaattatcgatccttttctccttagcttttgtccctatttatagggttttttttcttctatgaagatagttagttataatactgttggagtttgttgtggtaattgtgtattcgtttacacctgtcttgattcttattgttagttcaattagactagttgactctttgagttatgtatatatattgtactagctctctttgattcaaacaagagtttcttttcagtctttatcttctccaatctttctcttttttgttttcattgcttctctgttcttggtgtcctattataatggtaactgaattgagaagcatctttggtaaccaaattggcaactttcctctttggggttcggttgacagtgactcagcctcccatttcttctccttttgtccgatcactcaaggtctttggtttctagcaaatagagtattcgtatcgacaaaatccctctgcactctggtgtcgagatggtaaagtggattttcaattctttttctactcagggaattggttcttagatcgatagggaagagatctctctttttgcggctattttttatcacaaactttggtttttcaagaacttcaattttcataatagtggacagtggcgtttcgatgacatgaagaaaaagatcaatgaagatttaacagtcgttggaaggtgtttttaagcagtagacatgctattttcgatggtcaccattctcagttggctcgttcgttgaacccttcctaggcttgggagaatctgggtaaatgtgaaatttacgaataaagggatctggtgaatcctcaccctcaaaacaagttgttacaatagtaacaatgtttgagaaacacaattcaaaactaaaaccaatcacaaaatcaaaacttgaacttaattgaaaaatagataaaaaaaaaaaaaacttagcttgataatgaatgaatgatggatctttattcaatatgaatagtcaatagtacacaatagaatgagcccaagattacaattcaacacaataaagtattacaaagaaatgtctcacattgagagaaatcacttcaagagtgatactcccttttacatccctccacacacactcactatgatcttggactctctttctctctaaactgaatctaaagtatgagcttggagattagagaacaacacttagaacttagaactcctttgaaagagtagagacacacctatttatagttattggtgggatcccctttaagttggtattaaagccaactgttataattaataacagcttttttcagattcatctgatgagcatatagatggacaaactaacttgacaggttaagtgagtttaatcccaacaattccacttgattagattcacttaatctccaatccaaaagaaatgagtgaggacattaaggttgcgtttggttgggaagaatgaaaatataggaataagaatgagaataggctttggaataggaatggaatgggataaaatttaaaatgcataaaaaaaaaaattgattaaaaaaattattaaatttttttaaatcttgtattggaatggtctttcattccaatagttttaaatgcaaccaaacaaaaaaataaaatgaaaattgtttcctttccatttcattagctccaaccaaacgccacttaaatgtcctgaatgctcaataagtttagacaatgtctaaacttgtctctagttacacttttagtaaaaatatnnnnnnggttatcatgtgtgcttattttctccacttccaccttcttggatgacacaatatcccttatgaagtgtaacttgatatcaatgtgctttgacctctcatgaaatattagatttttcatgagatgcaaagcactttgagtgtcacaataatctgtgatatcctcaaatttgaaacccaactcttctgttaaccccttaagccatatagcctctttgatggcttctgtagtagccatgtataacaaggctactactttctataggt

SEQ ID NO: 115153 - DNA, 2319 bp, Cannabis sativa
tgaaaatcaacaaatcattctgtttaatatagctcttagttttgtatgcaagaagctaaggggaattgtttttctgcaggatgatggctcaaagcttgaagcttttgctaggaaaacctttgatgattccctatgttgggaggtacaaatcatttaagctaaaaaaaattggattaaatagatttattatccccacttgaggcttatgaagatacctgtattttgttctttttgtttgcatctgctggtttgtaatcacttgtgattctcgagttcatttgagctgatttagtaaatcttatttataacatttgcaggacctaaaatggttgagatccatcacaaacctgcccattctgatcaagggggtgcttactcatgaagatggtaactgaagggtcttcttttctttttgtgctatctgtagattttcgtagtgttattctatagaatgacaagaaaccaggcaattgaaatccaaagcctcttcttttcattttcttcgtctcacctttcttagacatcattctaaaataattgaaaatcaaatataccataaaggatgacactgtattcttcttcataaattcaaaagtctccattctttgttaaccaaccatttaaatagccccttcagattcagtaaattcatcaaatgcttctttttgctagcttgtgatttattcttaaaagttgtactacttttatacacgtatattgaattgataagatcttaatatttgagatgttatgcccccaatttcagcaagaaaagcagttgaagcaggagttcatggcattgtcgtctctaatcatggagcccgccagcttgatcatactcctgccactatctctgtcttagaagaggtgactatgcttatcatcatgtatctaacttcttgtttagcttttaggattgctgtctttctgttaaaatacaaatgattctcctgatgatcaatgaatttttgaaatccttacattaggttgttcaagctgttggagggaaagttcctgttattgttgacggaggaattcggcgaggaacagatgtctttaaggcattagcccttggtgcacaagctgtacttgtaagttcttttcttcaaattaatccagctttttaggtatcatttcagcactaaagataatgagcataataaatactaaaaattaacgtgttaaattcataggttgataagtgcagggaaaaatgataaacttcacctgcagtgaaataataaagaaagcttaaaaaaaattcggtttgataaaactactaaattcacaaaaagagatatatttcacttataactcaaaattatacactcactatctcaatttctccacccaaatcttaatacacaatttgcttctttttcactctcaccacactacaaactcacacatttttttttaacaactcacttttcttctcacacacaccactctctcacacacaaaaatatatttataaagttacaaaatttgaacaccaaaatactctaaaacttggctaccaagacactccaaacttagccactataactcattttctcacaatttataattacttaaaaagaaatagtaattttacaaatataattaaataaataaattaagtcaaactccatcaataaatttacccaaattaaatataatcattttataaataagttaggtggctagtgttagtttaacctgtttttaagcaagtcaggtttggacttgacctgacacgactcgacatgacctataaacacaaattgtcaccgctttcgagaaaaattagcatgtcattgctttttaaattgttttagcctttcttaattaactgttgttaatgaaaattacagattgggaggccagttatctatggcctggcagcaatggggcaacgtggagtgaaaagtgtggttaaaatgctgaagaatgagcttgagctaactatggccctgtctggctgtcctacactagaacatattacaaggagtcatgtgatgacggagcgtgacagtagtctccattcaaagctttaatttcattttagaagaagaattagttatggtaaatggaacttaagaatctcaggatttgtttgagttgcagacccagattggtttggcctatcatctgagactgatcatctcaaattactagagccaacttctgagttatccagttaagctaggtctaggctccacgctgggttggtttgggagatgataatcttgccattattctagaactaaattatacatgctatcactttcttaatgcttataatgatttatgaattgatttagcatgtgcttagat

SEQ ID NO: 115154 - DNA, 8008 bp, Cannabis sativa
tctctctctctctctcttctattttcctttcaaaccaaattgcatacttttgtatactttgtactacaaaacacacacacacacaaattcaaaaaaaaaaaaaaattcttcctttttgaaaaaaaaaaatacacaaattcaatagaatattttcataattttgattttctttttaattatctctaagctttctgataattacttgggagataagataagatggctgctcctcaatttccaaaagttcaaaaacaaggggagaagaaagaagctctcagagttgataatagctttagattggaacccaatcattattccaccaccaacctggtatttttctttcttttcttttatttccctttaagtattactgcataagctgttaattttttatacccagataagcaagaggcttaatttagcaggtaagattagtgaattcatagatgcatacttgaaaatttgaaaaaaaatcatgggcaatcacatatttaatgatatgaatggataaacacaaggagtggcttgatttgattctttgaatagatgggtctttttttttaactgttttattgattatgtgaattaaatatatatttgtattgagtttgattttgatttgtgtcttatgtctttatgatatttccaaggaaggaagtccttctgaatcttctataacagcctccatgatggaagaaaaccatgcctataatcattctcaggctgcttatccaagcacaacctcttatggttactactatccaggttttggtccagctctcacataaagtaattttattttacatgattagtcgtttcatatttatctttccatgtttacagtagttttttagcaggttacaatggctctcttggagatttttacaaccaaggatactacattgctgggaatgcaatggagcaacaataccctgtaagccttttcagctgtttttcaattgctaatgctcaaaagttctacatcaggttccatactttttgttccttatgcatgatttatctgtatatctttagtcccttaacctaattcttgaaataaaaccttaagatggtcctctattaaattgggggtagtgattggatttcatctctcatttatggtgccagagaattctaccaatatgtgcttagcctttacaatactgttatgagtttattaatatcattgaatcttagtactactagttaaatcttatatttgtttttctaccctgatcaggttgtgcaagcagatagtggatcctttgtttacatgatgcccgggctctatcctggatatgatccttatacaccttacatgcctgttagtactatcactgttgatgggcaatatgttgggcaagaggtctacccaccgagtcccatgtttcagtctcccgttccttcacctgaatatggtacaactcatcacggggatccactgcaggcaccctacctttggagttcatctcttgttggtgatggaacttatgaaaatggttatgttggattgttggaaattccagctgccaaaactgatttctctgttccagttgttccgagggcccaaccaccgaagtcttctaaacttgcaggctcagtcaatctttctcctgatgttttatcaggtcaaaccaagaagctaaaaccattaaacaaggtatattgtatatctttcgttacttgtaacactatttcactgagtcctctcattatccaaattttctgatgtttctaaaaatatttcaggcctcatctcataccccaagttttcagtcagatttacctgcccaaggttactatacagttgcaaaatttcctgtgtatggtcaagggaagagtggtttgctctactcaaacaactcagttaatttgaaaccaaatgttaagggatggggaggcagtgaaaagttaaaagcaagaagcaaggttaacggtgttagtcacgttactttactcaatgacaagaataatgatacagttaatgcgaagagtgcattgaggtttggaggtaatgcttctcaatccttggctactgatgaggttggaaatggtgtcagcataacctcttcaataaggagagatgaatataacattcctgagttttcgaccaaatatgatcatgcctacttctttgtaattaaatcgtacagtgaagatgatattcataaaagcattaagtacaatgtttgggctagcacacccaatgggaataagaggttgaatgatgcatatcaagaagcacaagagaggatgacagagaaaggcagcaagtgtcctgtgttccttttcttttcggtatgttttataactttgtcatgacattgatgcttgtctaacttttactccctaagatcagtgactgaagcctctagttccaacctttatcttattatgtggttcaggtaaatgctagtggtcagttctgtggggtagctgaaatgactggaccggtggatttcaataagagtatggatttctggcaacagagcaagtggagtggttattttccggtcaagtggcatatcattaaagatgttccaaatgcgcaattacgacacataatacttgagaataatgagaacaagcccgtaacgaatagtagagatactcaagaggtgtgcttccattattagttattttatagtaatatatatatatgtatgcatattgttttcaatgaatgtggtactctgatccactgagcttacattttgcttatctttctattctttacaggtgaaattccatcaaggtatcgaaatcttaaatattctcaaaaattatgctttaaacacttccatattagacgactttgaattttacgaaaaccgtcagaaaattatgcaagagaaaagggtcaggcaatctgtgcctaatcatgatttgcaggtatgttatattctttctgccattttttgttttttattttagtattttctgataattgattataaacactcccaattatattctcactcaggagcaaaaaatgctttgctaatttataagctttttcctgtaactatttgtgtggttgtggattaaggaataatatgttatcaggatcctaacatttggaaagtgattctcatttcttttaattttaactacacaaatcattaggaataaagctggttcctaaatacaaatagcatagtgggaattgttccaccattgaaattttgaaatgtggataaactttattctctacataaaataatgtagagaataaatagtgtcctttaaatcttttgattaggggtgtttactggaccacatctactatttttagttctatccaaattcgatccaattatatattgaatgttagattttaccatccgatccgatccaattaattttagtcatccaatcgatccaacatctattggatgttggattagatcggttctatccgttagatgtatttcatatatatttattggtttaatttgtgtttattcaatattttagacatagtattttttgtttagtatgtattggattagatggggtattcaatattttacgtataacaatataaaatttaattactcatccaaactaaatgaaaatactaattagttcgattggatgttggatatatttgatttttgaacaccccatccaacatccaatctgatctaattagatattgaaaaataacattcaatccgatccaatcacaattggatatccaatgtttagcagtcggttgtaattagatcagtccgttgtcaatggatttaatcgatttatgcacacccctagttctgatattgtacattgatttataaatgttcctcttttgcagcggaaggtggaagatttaaccgcgagttttcaggccgtagatctttctgctgcaaaaaccacctgaaggactacttcatgccagaggcagagtggagatagagaaatggaatatgaagtatcccaaaagacaagtagccttattggtcagcttttaataattggtgatgatgctactaaaaaaaacaaaaacaaaaaaatattaaaaaaaaaatctcaaatatgaaaaccagatataaaaagggaaaagatgtaaagccttcctccataatatagggttcccatgattgatatggtaaatgttttttttttcttcttttcattctctctttttgttgatttctccttcttcatatgatttgtagttattttcttcttattgtgcaacccccccaacaccctcacaacttctttgttcagggtacaactgtaattttagtcaaagcaaaagggtggtcagtgggtggtggttggcttataccataatgtttcaataatatatcaataatgaagaataagaagtttccttttgtgatatatttattgtatataaaaagtgacaatattgtatgctttggttcttttgttttattcttaagtgggatgggattccaaagtaggctgaagcacatggtaagagaatttcaatgactaagcatggtgttgttcctatcaaaatagggacttaaggaaggttttatgtggtatatgatttccatgacatggacaaagtgattttcctgttaataaatgaaactttcggaatggattttttttttattcttcaagagcatccattaactatctcctaatgacattatttctaaaagcactactggtgctattgtttagtactcttctcagtatcatactgctattggtgtaatgctattagtgtaattaagtattagatttcatataatttaaaaatttgatatgcaacttaattcttcaatactgtttaatatagagtagaacatataaaagtaagatacccattatcggagtgataagccaaatctttattgaatttggtttctctttaaaaagggctcgtatattttcggcagtacctccagtgaatactccatcagtataaaagtaggcatgtcaaaaagatccatttgattggagcggatcggaactctgatctgacagatcacttgtgatccgaaatatttggatacttattagatctcggattagatccgctccgtcccacctatttttcatatgtttcaatatatttcaaaaaaaaacttaattcaaaaatctgaccccgaacctggactcagatcccttgagactcgagatcgaacccggaccctgacccgagaccctagacccaagacccggacctggacctagaccctgacccaagcctgagactagacccaaacctgaacccgagaccggactcggacccaaacttgggactggatgctgacccaaacttgggacctggttcgaggccttgagttgggaccggacccggatccagatccgaattcaaacccgaaaccagacccgtaccgaacctgggactcgagacttagaccggacccgagacccaaacttggacaacctggacccgaacttgggacccggacttggacaacctggacccgaactccgattcgggacccgaataggacccaaactaagacccgaacccagacttagacccaggaccgggacgaagacccaggacccagacctagacccaagacctagactcgagacttaaacttgaaccgggacccgaaacggggacctagacccagacttgagactcgagacttgtacccaggcccaaacccgaactcgaaacagggacccaaacccgaactcgggaccctaatccagaacggggacccagacccagacccgaacccgaacctgaatacaagacctaggacctagactcggacttgggacctgacctgaactcaagcccgggacccggacccaagactcgagacccaagcccgagacttaagatctggacccaggaccaggacatgagacctgagacctaaactagggcccaagacccgaactcgagactcgaaacccaaactcagaacctgacttgtagttggtgttggaatcgagtttatttaaaatatattatctttatataatctattaatacaagtcaccaaatatagtattgtattaaataatactaaaatagatataaaattatggtttagatataaaattaaatttgttttaaaaaaaaaaaagaagaagtcgggtcggattaagtcagattggatctaatctgatccgagtatgatgtagcgtgacggggcaggatggatctgtacataatctggattaggtcggattataactggatcaaatttgacccgacccatttacacttatattaaagtccttaatgtttgttgagtgtcttgtgttctcaatttgatgagttttgtcttaacataatcgatagagttagagacgtactcttacaattacaagtaatgagaatttagatagagatgggttatatttgaaaaattataattcgttagatcatattatataaatatatatatgtgtgtggttgatgatgacgattatagatcaatccgaatttgaaagtgatcatgaacttgtgtttatgtcaactaagaagttttgttatggaaactcattcatgtagacttggggatattccctttctaaagtccttttagtgttaattttcaaactaaataattttgagctcagtatttaaagtaataagaataataataattttgagcttaaatttataattgaaagagtaatttgcagtataaatatttaagtttaactcttaattacaaataaatatttaagtaatttttggcagtaatgatacttaaattatatttctgaaactctacaagtacttaactaaatgttaagtcattatatgcacgtgtcatttttttattagtatatttaaattatttttttaaaataatacaaatttaatgacttgaaccaattagggattattacgtagcaatttacttaatacttaacagtcaggtaattacagaagttctaaaattataacttaggtattattgccgccaaaaattaaactgagatatttatttacaattgaaagttaaatttatatatttatgccacaaattattttaattaaaattataaattaattcatgacaaaaaaattataaaataattatttactagtaaaaccatactttatcaactttaattatgaaccattaatgaagaattgaattgtatgaagtggttatattgacggatactttttttaggatattaatgaagaaattatattgtatatttattttatattatatattttaatttttactttaatttttatattttttaatatatacctacttttatagatgatattttcattatacccgttaattaatgtaaattatatgctagatttaagtagaaagtaagagtatattgggcaatccactcacaaaaatgaatatattttaataaaatataatataagaatatttttaattcatggatacaaaaaataagtattcttcaacttatcctcatattagtgtatacttaacagtactatatatattctacatttttgctaaaaagaaaagagaaattttcatttttattgcttttattacaaaattttgcaagaatatgcttttttttcaataaaatattttattaggaaactgattatcctaaattgtgttttccattttttgtaaaaaaaatttcattatttttcccataaaatatattttatatataaaaaaattatatttttgcaagcgtggtataaaaactcaaaatatccacacaaaaagaaaagatgcatactcatttggtacactatatttttatcacaataaagtttggtatgtttggtatcttgtccatagttattaataccatcgtcttcaattacatgaaatttaaattcaaatttaactatttgattacatggtaggtttggtcaaattactacaattttattgatcaaatttgacttgggcattaaatatatacaattgcaaactagagggtaccaatgaagattatttttttttttgaatagaaggtggaacttcattaacttataatagccaaatcgaccattatagcagaatgtacagcattaggaacattgctgacattg

SEQ ID NO: 115155 - DNA, 952 bp, Cannabis sativa
  modified_base (907)..(915): a, c, t, g, unknown or other
atctgagtggaaggaaacattatattccgctgcacccaacgtaaggtttctcatactttatatgtgtttaagtttcattgttttgtaaattcatatttaggatgttaaaaacatacttgatagtaaatctaagtctggtaaaatataatccaacagtttgaccattctagggtggaacgtcattgttgcacccaacattttgagttcttcggttagtgcgctcaccactagggtaactagtggcactatcctcattcgaattggggtaagactccccagtgcgaaacctactctggccttgccttggcgggacatctgaccgtcattgggttaataggatggtggccttgtttgggacacagtcgatccccctgcccgtgaggttttcccatgattcctagggcggtgagatccctttgggacatagggaccttttctccaaaggggatcccttatgaggtggctcttcaacctgagatcctaccctcttgttgaacaatctaattaggttgttagcctccctattttagcggttcaactttgcctgttgggcttggaggattgtagcttcctgatccatccactcttgaagttcgcatctctactgggcaaaaacatcgcccatagcagcgcgtgttgcttgttggtcatgatgaaggagatttgtatgaccctgtacttgtcctacgacctctctcaaccaggaaagtttagagtcgtcccctaggtccacgtggggttcgttatagggttgccaaccgcaggtcaagtctcaccatcataaacacgaggtccaaccctcgtgccaggaacttcagttgttggttgaacaatggcccccgtaggaggctctttacttggttggacctctgttgtaatatcacaataagcctaatggtaaataatnnnnnnnnntatttatattatgagttaatcaggtaataagtgggat

SEQ ID NO: 115156 - DNA, 4279 bp, Cannabis sativa
  modified_base (4251)..(4253): a, c, t, g, unknown or other
ctgactccatgaggacccaagctaatgttgtaagttttgcacctctctaaaatgaataaacactttatgtctttacattattttgattcacttatggtctttcttttgtagattggcctgatggaagagaagaagtgctccttaatcgtccaattggtttacgacttagaggtgctgagggcggagcatgctaatgatatgcagaggagggaagaggcggagagggcattagttgagaccaatgccaagatggaggctaccataaagcaaagggtgtctgaatctttagaaaagtctttgactcgcaaaagaaaggaaaccaagatggagaaggagcatggagacaaatataaagacaagcactacaaggctcttacccaaatcaaaaacttggaaactaatctaaagcaggccaagctggatgtcaaagagaaggagaagaaggtcaccactttgtctcaagagtacgataagcaagccaagatcatcaaagataaattcatcaatgagaccactctagagaaaaaggcaaagctccatctcgatctacaacagaagacaaaggcatctaaagctaaacctgtcaagagggttgaggaagctgagagtaagctagctacatcggtgaaggctcttgaggaatcccaaaaaagaatcattgaaatggagggtgaaagcatgaaattgaagggatgtctccaagatcaagaagcctagcatgacaaggctctggaataggcctttgtccactcagtatatactctctggaagtataataaaataatgattgatttccttgatgaaaaaaaatagggaagagctttttcctaagcttttggcactggaacaggcaaagaaagctaagggagcatcttagggatccgaagaggtcaatcctagagctaccattcctactgatgagaacatggataatggcgctcttctggcctctgaagtgcctgtctcaaccaaatctatgatgccagaggccttatgatgccaaaactccaaatgtgtagccattgaatgactctgctcagtcttgaactatgtttatttgatttttctttttgggggggacacgggttaccctttttaagtgtgtagagataatagattataccctttctgtgggcaatttaattttattaattccttcgatatttatatttcatcatcaaagaatttgctaagtcttaatgtttcaagcctcgtgaggttctggttcgaaaggcctgaacctttagtttttcaattaaatgcttaggcttacatatttttcttgcaaaaatgtttttacataaaggtttctttggaaccgtaaataactaatcaacctggctaatcaactatcctaagattcaaaccttttattgacatttatcacttatttttagggcttaactttttacttgatttgaatcaattgatttaagtaacctgaatactttgtgtcaacctgggttaactatgaagcctaacttctatatgagttaacctgaattaactatttaatgtgcgacaattaattccaaatataataaggcaatgacttacttccagtatcttgaggctccagtttcaagccattcttcctactcctacatttagtttagtgttaaataatttttcaaatataataaggcagtggcttacttccggttccctgaggctccagtttcaagcgttacttcctactcttatatctgagcatttaacttagtttttctttttataaaagtggatataattatttatgataatatcatatatgctaccccccaagtgattaatagttgagacttttaatcacttgttacatgatagaacttttaaagaccaaatatgaaatgaaaacttcttctctttatttacatggttccttccctgaggcgtatatggaaactaataataataaaaaagtaaagcaaaagtaaaaaggaacctgaccaccctaagtttactaatagtattggtgcaggtggtcaacattccatactcttggaattctggttccatctagtcaattcaaaagataagttccatcaccaatattgtctgtaatttcatatgagccttcctaatttggtcctaagaccctcactccaggctcttgagaggtagggaatactcttctcaaaacaagatcaccaatttcaacttttctactcttgaccttggagctaaaattcttggcaattttattttgatacatctagagttggacccgtgaatgctctcgaagctcctcaattaagtccaaagattcttgaagtaaagcatagtttcaagttgggtcataggtatccctcatatatgtaggcactgtggattcgattgggattatagcctcacatccttaggtcatggaatatggagtgtggcctgtagaagttctttcagtggttttgtaggcccaaagaactcttggaagttcttccgaccagtgtgctttacaagcctaaagcttcttcttcaaagtggtctttaggattttgttgatagcttccacttgtcagtttgcttgaggtctagccacaatagaaaagctcttgattgttccgtgcttggtacaaaattcagtgaacggatcactatcaaattgttttccataattagacactattttatgtggaagtttgtatctgcacactatattttcgattatgaagtacaaggccttcttagaagttactatattcatgggttcagcttccacccacttagtaaagtagtcaatagcttccacttgtccgtttgcttgaggtctagccacagcagaaaagctcttgattattctgtgcttggcacaaaagtcagtgaacatatcactatcaaattattttccgttatcaaacactattttatgtggaagtttgtatctgcacactatatttttgattatgaagtacaaggccttcttagaacttactatattcatgggttcagcttccacccacttagtaaagtagtcaacagcgacaatggcaaatttgactcctcctttgccagttgggagtgatcccactagatctattcctaaactgctcttgagagtaatctccattggcagagctctgggaacctttgaatagcgttggcattgcttgcacttgtggacatattcaatgcaaccttcttcatggtaggccaaaaatagccttgacgaaagatcttcttggaaagattgggtctgaatgtgtggtctctgcaaaatccttcatgaattttgtgcatgacaacgcttatttctggtccggctatgcacctaagatatggcatcgagaatcctctttagtatagctttccatccatgattacatatctgagggcctggtactagattttccttgatgtagctctattctctagtagtgtacctgcttccaagtattggaatagtatagccatctaggaggttaaatggtcaatggtggagactcccaatgtgtccatgctcaatgttattaaatgtgcaatggggactagtccatatttttctatttcttggtctattgctaattttgccagcatatcagcaaaagcattcttatccctggatatttgctttacggaataatgcttgaaatgctataatagcactcgagttttagctacataactagccatcttctccccttttatctggtactccctaaatagctagttgaccacaagttttgagtcactgtagagttcaatgtactgagcaccaacctcttttgccagttgcgaaccagcaatcatagcttgccgcttagctttgttattggaggcctcaaattcaaatccaagtgctttctgaagatggagatgttgtagatatattagtacgattccagctctggcacctttctcatttgacgttcctcaacatatattctctaggcttttcctttcggggtcgatgttctaggatcatcatttatcccagtgcactctataatgaagtcggctagggcttgacctttaatcgaaaccttgggctgatactgtatgtctaattgactcaattccattacccagttcaggagttttcttgatcattctagtttccacaacacttgacagagagggtggttggttagtacctttctggtgtgggcctaagagtatggtcttaactttgtgaagcaatcagtaagaaaaaggagagctttttaatcataggatatttggactccatgcccaacagtctcttactcatgtaatatgctagaagttgtacctgttcggttttatgccctaaannnaactccatttcaatgtaatctatttt

SEQ ID NO: 115157 - DNA, 2019 bp, Cannabis sativa
  modified_base (1988)..(1993): a, c, t, g, unknown or other
ctatggccggccagcccctcacagttacatccatggccagccatccacatgcaaccaaccccttagccggtcagcttacacaatgctagaaagatgaacaaagctaaaagtataacttaccagagaaaggtcccgaaggccaatagagtagagcctatctagctcgccatcaccaagctccttgagctcttcattcatgaaaggaaaatctctctctatgcatttatgggctgccttcacatccctctgacctacagctgaccctactcctctatcgagcctctgagcaccttggcctgccgaccgtgtcacatgctgccgagtaggtgcaggccctagtagaggaggtagagacgacccagtagtatctcttccacgagaagtttgggccacctaagccctcacttgtcttgtgggctcatctgaaggccccccagtgagacctcttagcctggaagacatatctacagaaataaagtagcaaagttagattgcaactataaaaattcaatgcaagacaagaatatagtgttatcaactatcaaataccatcgccatcagaagaggaactgtcaaagtcctctataactgccttgtcgttgcctctagatgaaggcaaggggcgagcaggtccctcagaagcctggcctctaggcctgatccagagaaaagcctcaacaattggacccccgctggccaagcgtcggcagagggccctcttttttctctccaaattctgtgtaatgcgagacaaaggtacatcatcatctaagttaggaacctatccatcttcaggacaggttccctctacagttggggctcctgcaaccccaggaacaggaggatacaaaccatacttctagaagttggccatgttggtcaactagagtatgtttctctgctccattgatagagataagatgtggtttgcactatcccttattttcaaggtggggatagagcgcttgaagaacgacacccactggaactcatagtgaccaatcctctagaagccataagcaataaagtacttcttggcatacccgccaactttcaacataactgtactattggtgtctcccaactattggtgaccgatttgattgaagtaaaagtacccagtccaatcttctttggagcgaacttcaaatcaaaatagtatcctatctcatagggagtagggtgaggccagcctagctccctatataagacaaacatcgctgaaaggtacttgattcttttcgagtgtgatttgtgtcggacacatcctaaagtatgtagtaatgtccaggaagtatggatgaagtggcaacactacctcatgctcaatgtgacgttctaaccatgccaacaaacccaaaagatgccagtgtgcacgttaatctttgttatgtatctcaaagtggacaccccttattaagccactagcaagtatcttgctaaaaagcctcatcagaaatggtagaaatgggagagacctaactgtctccctgtgatctcgcatctagtatctcatgcttagaagactgatccaatccaagcattgaaggctcactaagcctgttcagccgattgccattgacatcgtaatgacccaagggatagttcgggagggcagtataagtcacgtacctcctcttcctaatcggcgaagcctcctcaagatcagactcgacattgggactctcagtcccctgatcaatctttagatcaacatcagggcggcgttgagtagcctcctctacagtcttgacttgaccccttgtagctgccctgactacatgagggtcacatggaggcgctctacagagagtgtgcttcgttctggccataattacaaaataaataagcgacatacgcagccgtcacctcccctattcaacattcagtgctacctccatagaagagataatgggaggtgagtaacctgataaagctacaaacaaattcaagtcaacaatacctaatatgttgggttttatgccctnnnnnnaactccatttcaatgtaatctatttt

SEQ ID NO: 115158 - DNA, 3382 bp, Cannabis sativa
tatgatccacaagtagtaacttgaaagttatgtcactattgttttgtcaaccaaatatgtatatagtagaatttacaaaaattgacatgtactactcgtatatatgtaccacgagacaacaaaagatcacacgtagctctactccatgtgataatgatatacaagtctccatgacgtatagctaagaacataagcacgtgaacccttcgtaaacaaattcgaggcagtaagagtcactcaaattccagttaattacttggtaccacacaaggtttcacaggttggctacaacttaaggagactaccaattatatctttaatccacagaaacagaagaaaatccatataaaattaatttaataaaaaaaaaagaaacgaaaagaagaaactggcgaagttggtgtctttatttacttctactaaacaaacacacttccttagagagctagctagaaacaataagcaaatagtactgtaatcaaaactgcagatacagaaagcctgagctgcttcaatgaagaaacaaggctgtgagattgaagccataaggatcaactataggattcaaacggagaaccctttcaagatattcaccagaaaaccgcatcagagtcatcaagctgttgatccagaaccagaagagtcacctaaagtaattgaaaaatccttcaacaaaggaggcaggcaagtgttgaaagaggtgaactgccgggctaaaccatgggaagttctagccattgttggcccgagcggagctgggaaatcgtctctactggaaatcttagcagggaaagtcacaccagagagtggttccatattcatcaatgggaaacctgttgacaaagctgagttcaagaagacttcaggttatgtcacacagaaggacatgcttttccctttacttacagttgaagaaaccttgatgtttagtgccaagctgaggctggggcttcctccagttcagttgagctccagagtgaagtcactgatcgaggagctcggcctaagccgtgtggctggagctcgagtaggagatgacagggttcgaggcatatctggtggagaaaggcgacgtgtttctattggagtcgacgtgattcatgatccaaaagtgctgattcttgatgaaccaacctcaggacttgacagtaattctgcactacaaattgttgacatgctaaagaccatggctgaaaccaggggaagaaccatcatcctcagcattcatcaacctggctttagaatcgttaagtccttcaattccattcttttgttggctaatggctctgttcttcatcatggcacaattgatcagcttggtgtgaatttgaggctcgtgggattagaagttcctcttcatgttaatcttgttgagttcgctattgaatccattgaatgcattcaagagcagcaagtcaataaaatgctgccacaattgccatcaacaacaactacaacaacagcacaacagaagaaaggagatactcatggtgagagaaagagcggtaagctcactcttcagcagctatttcaacaatcaaaggtcattgatgaggacatagtaactgccgggattgatttccctcgagactttgccaattcaagacttaaggagacgattgttctcacacacagattctccaagaacatattccgaaccaaggaactctttgcatgcaggactattcaaatgttggcctctggtctagtcttgggatcaatcttctatgatcttaaagataatttagttggagctcaagaaagggtaggtctatttgcattcattttaactttcttattatcatgcactacagaagctttgccaatctttttgcaagaaagggaaattgtaatgaaggagacctcttgtgggagctacagagtctcatcctacgccatagctaatggcttagtctatctgccatttctactcaccctcgccatcttatttacctcacccttatattggcttgttggattgaacaagaatttcatggcatttttgcatttcttgttgctaatctggttgatcttatacactgcaaactcagttgtagtgtgtttcagtgcattggtacctaatttcatagttggaaactcagttattgccggtgtcatggggtctttctttctgttctctggttacttcatatcacagaatgagattccaagttattggatcttcatgcattacatatccctgtttaagtatccatttgaagggtttctaatcaatgagttttctaagtctggcaagtgcttggagcacctgtttggaaagtgcatgatgacgggggaggatattctcagagaagaaggatatggagaagagagtaggtggaggaatgtgggagtcatggtgggattcatcttggtttacaggttcatctcttatgtcattcttagatgtagatgctctcagagaggactaaagaccgtccttgtttaaactatcatttgtattttactctcttttctctctctcacaagtgtgtttaattggtcacatgttttccaatttacttgatatagtattagcatctacagaattattattattattatattaataaacaacatagaaaaagatgattgaaaaaagaaaataaaaaagagtgtgtgtgtgtgtgtgtcacatgtgttctgatttatgtataccttataatgaaagtttctctcttcctctctctctcatctaatcatttctttcttcatgttatttatttattttcatctcctgttttccccttggttaatatgccaaaacactctaatggccaaggtcaaggagagtggtagcgaagctctcagcttgtggtgagttaatagtttaacgtggatatatgaccacctaacataactgattggctccaaaagttttacacaaactactaacgagaaagcaacaaattgtatgtgatgataaatttgacttgtatggcttcacgtacttaattaaatggtttctgtcaaagcttggattcttgttaaaggtaaacaattcacagccattagaattaactctgtttcctgtagtcgcagtagatatttcaacctgacaacagccagaattctagcaggcatggtgatcccctttaacttctgcccttttgccatgcaagtaaattgaaagagacatcttgttaatagcaaagagaaactcatagcttaggaaatgatagagagcttgtccattgaagcaattttatactgagcaaaaagatgtgtagcagtaactttttttttttgagagagaaaagaagaagccgcactgaagggaggaaagaaagtgttatgggatttgaacccatgaccttggacattatgtcctccacctcaaccaactaagctataaatatttgttgcttatattacacttaaa

SEQ ID NO: 115159 - DNA, 2791 bp, Cannabis sativa
ggatgggataaataatcccagatagatgagattagctggattaattatccagacttctaacatgcccaaacactgaattggacaaattagtctatctaatctaatcgagtcatgcatactaaacgggctctgtagggaaaaaaaaaagatgttccctcacttacaaaaaaagtgtcgcttcccctcaacttaaatcttaggaccaccacttattcatagcatgtgagctcagtttctaatcataaaacccgaccatacacatcaaaaatatcacaaacatgtgagctcgagttcatggaggaaggtcgtccatgcaaggctttggatactgtccccctctacccagtcgacgtaggccgatcgcactaagggactaaaatccatgcgatcaacatcgatcatgactgcatggtggtccgaccaccaaataaaaaaactaaaattttcacttttcttatacttaaaaacttttcttcttattgctgtataagtaccaaaatattaatatagatttttctttcatatttacatcaaagatttaagtttgaattttgatcaatttggtactttaactcagaaaaaataaatttcggtatttagttgaaagcaattccaaagtataggttaatgtgtttcaaaaaatattagtaataatatgataattcaataatatatattataaaaagaaaattattttttttaatgacaaaattgacataaatttggtattacattttgacagaaattatagcataccatcccataagctaaaataggatataaatttgaatcttttttgttaagctaaaatagaatgaaaacaaaaagttgggtaaatagtggaataaataaaattaaaaagcaaagagagatgagagatattatgaattggaaagaagaagtgatgtgtggttaagaacaaccaaaaaatgagtggtacaagtaattgagctcaataaaaatgtgagtttggaataaataattattaccggtaaaaaaaagtacaaaatacaacagtaacaatatcttgtattatatgagatgttatggacccaaaaacttcctccaaccaaaatgttactattcaatacactaattttttttttttaattttgaaaaatactatcatgagtagtataattaagtatcgatcagatcttatataattaaatataataatctttataaaatatcgttaattatttgaaaagcgtcatcttataataatgttaatgactattagtatctaatagcaatgccctttttatttatttcgaatttcaataaattcttatgttttaacttgatttcacactaaatataagtaataggggatttgatggtgcattgctagaacccatttggctctttcaatggacatagaacatgtttggtggtcgggtttttcgagctccattatttgtttggttatgtctgatttagctaattgatgaaaatttaaattttttcaacgatgtatgttatagtaattttgatgtttcgcaatttttttcttttttaaaaattaaatttataatattaaaaataagatttaaaagcctagcttaaatgcgtattgaattttgatacgcgtacaatagattgttcgaaccatattttttgaataattagcaattttatccctttaactttcgacacatgtgatcataccttctaaaatatacggcttgttaaaaattcattctaaacttttatatttagtctttttgttaggttatgtcatattattctgtgtaaatactaacgtgtctttgtaaattcgcaactttgacaactatcaaatcgtacccctctaaataaaaataaaaaaagattcaatatattttttttaaaatcttaaaattaatttaaatcttcaaaaaatatatgtattttgaatgatcaataaaattacaactctaaataaaaatgaaaaagattcaatattttttttttttgaatcttaaaaaataaatttaaatcttcaaaacatatatgtattttgaatgattaataaaattacaaaaaagaaatcaaaattttaaaactaattaattgatctaaaaattaattattctttattaaaaagttcatttagatataaaaaagttcattaacaaaaattaaattgtacgagaacaggtttaagtctattttttactcaaaaaatttagatttgtttaagtaaatataacatgttttagtttaatttctatttttgaataatttatatttttattgaatttataattatttttatttaatttttaagatatgtgtttgtaaatataaacaaatttaattttctctttacaaacccttagtttgtttaatttatttattgaatttttaataatttcaatttaatcttttaagatatgtgtttattaataaaataatggaaatatttttttaagaaaaaattaagtttgttaagtaaatttaatatatttttttttattattaactcaacacttttactaaggtttttaatgattttttaaaaaaaaattaataaaaaaataataattttaaaatttttttttttaataaatgggggcaaagtttagtatcagtcaaaatttataggataaaaatattaatttttaatggtagaaaaaaatagaacttaacagaaagtgtatgattatgtaattgttatattttaaagaaattttttaacaaatcgtatattgtaagggacatgatcatatatagtgtatgtgacagtcagtagtcccatgatccgtaaggggaaacatcgggtaagctgtgcaatcccacatcgcct

SEQ ID NO: 115160 - DNA, 1575 bp, Cannabis sativa
  modified_base (1489)..(1489): a, c, t, g, unknown or other
ccaccaccgccaccgccaccgccaccggctccacagtcccccgaggaatggaaggcgttacgctcatctcttctcattcttacagaaactaggtccgagaaaacgacgtctccttccccttcgtgatcatcgtcgtcttcgaagttgggcccaccatattcgtccaacttccgtttcgacgatacacggttgtgattgtggttggggtggtggtgattatgatcggcggcggcaagagtaggagggccctcaacgatagacatttaagataggccccagccgcccgttgtggaaaatcaagcgtacggtggccgcggactcatcagaattgaagctatcatcaaaagaaatcatcaaaaacaaaaaacaaaaattaaattaattttacagcaaaaataaaataaaagaaagtcttttatttttctgtttggctaacatgaaagtgtgagaaaataaaagattacagacactactgacaaagcagatgatcggaattgtcttctttcagcttctatggatggacagccgtattgtcctaacactttctcccttctctcttctttttaagctattacaatttattaaaaaaaaacaaataaatatatatatattaaaaaaaaataacaggtcaaattacttactaccgtaccgttatacaaacacaggagtattttgaatcgttgattaataaaagtatgattagttaacggctatcattattcattgaatttatataatgtattagtaacttactctttttattagaaaaaatcagaaaataaaaaaaaagcaatgataaaataaaaaaagttataagcctatcaatacttatatttcttctaaaaaaggaaaatgaaaaagttttctatatgggactttttcacataattgtgcaaaaaaaaaatgtgcaaagatattaattctataaataattaaataaacctaaaccccagacacaacttaaataaattaaaaagtaaaaataaatataaaaataaaattcacagaacataattttattttttattttttaatttacaaataaaattaattatagaacatatttatattcttttaaaaaaaataaaaaataaaaatattattaaacatcacctaaatattcacacataatttatggtacaaactacaaacaactacaaactatattagcataaacttatccttacttacatttttaagaggactccaatcaaagaaaacactacaaactatcatgtgatttatataatagattttgtaatttagctcaacactatagcttatatcaaaatgtattaataaacaactacattttggtatgcctaatatatgtaaaaattttatggactttattttggggtatgttagtaaggtatatgatcaattctaattttaacattgaattattgctgattaattgtgtgcaattctaaagttaaattttcccttcgtggtttacaccataatttatgtgacagtcagtagtccngtgatccgtaaggggaaataccgtgtaagctgtgcaatcccacaccgcctggggaaggtcaagtgggatgattttgagactgtgta

SEQ ID NO: 115161 - DNA, 1516 bp, Cannabis sativa
  modified_base (280)..(311): a, c, t, g, unknown or other
  modified_base (1394)..(1401): a, c, t, g, unknown or other
ttttttttttttgtaatttattacttttaagaaattttttatatttatactttaaaataaatttttttgtatttttataaaaatccacataaaataattaatatctctatttttaattaataattttgaaggataattaatgtttttgttctcacaattttgatatatatatatatatatatatataccatgtcattgaactttttattattcatgtaagaaaattggggtttttttttttttttttacttttttgcatcatcattattattattattannnnnnnnnnnnnnnnnnnnnnnnnnnnnnnnattattattattattatttataaaccatttattaaaattggagcacacagagagttttaacatgtaataataaaaataatcaacttaatttcttttacttactatttttattaatttagacacatttcatttctaactcaggttataaaaaacagctacgccacggttttaccgtttaaaaaaatcagttttaaggttaattgcaaacctaaccaaatttatttagaaagttcggccataaaaaatgttacaaatgtaataaaatacagtaatctgaaaatagaacgatatcggttcttcatattaaatagtatctatgtatacatgacaaggactaaaagtaacaaagatctttttaaccttgattttgattgcaaattttctctttgtttcattttcaaaaaattccaaaagtggtagaataaagaaagtgttttagaatataaagctttttagatcatattgatcatgatatatattgagaaagaaagcttaggaatcacttggttggaaagttggtttcatatgaaaaaataaatatatggtatctatgacgtatacaactttatataattatatatatttatgcaagaattgctaaaagttactattaatatttaattaatattttctttagtattatattgttattgatgtaattatagcggggttcatataatttttttaaaaaaaaagctaatttttaaaaaatattactaatttattactacctataaaaaatttagggcacccttatgttatttatacacatcattaatcattgtaccgagtggaatatattgaatcgcctaacataaaactataatatgtaataggcatgtttggaaagttaatagggaattagaaatgagattatttcaaaatacacaaaaataataaaacaaaattataaaatatggttgtatgcaattttatacattttaacattttttatgattttatttacagaaaatacgatcttttgatatatttttatattgtacccttgttaatttgttgttgatttttagttatttatatgttaatttttgttgttggtttgatgttgttttgatgttattnnnnnnnnacttttatgtagttttcttgttgattttattttgttttcgtgatattttgtgaaaaaccgtagaaatatataaaaaaaaaaattctttaaacgtataaatgtaattttttttaca

SEQ ID NO: 115162 - DNA, 11748 bp, Cannabis sativa
  modified_base (3188)..(3217): a, c, t, g, unknown or other
  modified_base (4342)..(4348): a, c, t, g, unknown or other
  modified_base (10109)..(10112): a, c, t, g, unknown or other
  modified_base (10761)..(10763): a, c, t, g, unknown or other
atgtacgtggcttgggagacattatttcaaaatccaagtcacctggttcaaaagcaatcgtgattgggtaaaaacaaaggctttgccaaaaaaataaaggacgcattgagaggttttggctaggtcgcatctcataagaaacgacattttcctttgatgatttcttgcagaagcgcctctggcaactagcattatcttcatgataggttctcattaggtgttccctaaccctagcatcgtgcaactctaatttagatgtgggttttgaagggttgggtttataagggatggttgaatctttaggaaactcaagttctaaatcttgtggacgataaattattattgaaccagagtgggacattgctgcaagaagaaagcagtcacaatccctagaaataattttgtcaaaccagaaggtggtgagttgaagattctaaaaaaacctacgtaatgcatgaaccctaatgttgacccaaatacatttcaaccctaaaaactactaaaaccaaatgagatggcaacgatacaaaaatgatacagcaattaaacacaatgtaacaagcatgtaaagaagaaaagtaacttacagtttgaaattagggtttggggcaatgaatggttgttcggtctgcaaatcctcgaatgtagtaaggatcgcttcgagaagaggaagtcggaggaaactcgcaggaaaaaaagtcaaggatagggatggcatgtgaattctcgggcaaactcgatgttgattcttagtgaagagtttctcagaatttctaaaatggaggagataatgcaaaggtggttcctttttcttactttatactcttgagattagtttcgtcagatcagagaaatgtttgatcctacggatagaattcaaagtagatgtggaaaagatggtcatttaatgctgatgtacctcaaaactgcacgacccccaaaataagagaacatgcgcgttttttcaaaagggattatgatgaaagtaccctttgtaatcattacaaagtactaatttttatcaaaaagattttaaggagaaaacccaaaattcggctagcacatcagaggaaaacacgtgtcaagctgggaagaacacaaaccaaggcatgtcattataattacacttgagatggaataactcattaaaagtataattaacagagtatatttacaactcaactgactaaatagtcttatgcaagacaaaaatatacaaactgttgccttgtgcctcgacgagaaatcatgtaacttcaggtgtacaagacaaggcactaacctcattacgtggaggggatataacgacagtgaaaacacttagggtataatttacagcatacaaactaagtatagcagacgagtgaaccaaatcaactgatagcgaggtgtccacctcaccacaagaagacatgctcatgttaaagatcacctcgtcactaaaagttgcgatcgtcaaagagggtgttaggcttccagagtaaaagcactgagattcgcattattacacttggaaaggaatatgacaagctccagctcgctatcaaggttgcctctgctctattccccagtgagatatttcaaaacaatatggtttacaacgtgcatgtttaatacatgtttgttttgacccagttaaagcgggatattcacagctgtgtgatattcaaataatcaccacatttatattacgtgatatgtaatcagaccctatgatttcagggataaatgttgtaaagattgcgttcaaccttgtaattaacttccaactatgtgattatcaatagttgtaggctagattaaaagggggaggaagaaaaaaaaaataagacggggggggaggccctgaaaaactatcagaaatctattaagattgactcgtggactatgcaaaattttaactgtaaaaccacgtaaaaaatcctttgtgttcatactttttcctttactgtttttacttttctgtttgagattatcaatattaggctcaaattttggttaacgaaaatctgcgttaacataaggcatggaacacactgtacggtgtacatgatggggatcaaataaagcctccatgcctctatagggcatgggcaagtaataggtgtacaaagggtaatggagaccaaatccacaggtttgagtacgtatgaactgacacttgaccgcaactaccccttgcattgttgatttccttagtacaaatcagaatatatatgttttagcttttgggacaacttatatcaaggtcaatagtgtaattataaataggatcctctttgattagagagactggggttgaaaattatactttgtaactcatattaacgaatcaatgcaacagtagcatttctccacttttacagagctcttaagaacttaatagttaatcatctttaaactttatctttactttaatttttttgccttaacttggttgacattaccatcaacaatatcattggaacacatttttatatttcaactttgtgtaatttatttttatctctattagaaatgttgttatgcaataattaatatgacaataataaatgtaatcttaaagttcaaatatataaatgaactttttattttaataaatcacataaataaactttgatccatgtatatcttatgaaaaaaaagacaaagcacattagatattgtgacatacaaatattaagagaaatattaccgatggaattatttttgagaatatttgatgagatggatttacttttgccagaacatttgatgacatgaatttatttttggtatatctttgcttgaatggatccttatattattggagtgaaaaagaatgctaaaaatatacctaacaacatcatcttttatatcttctctttatttttgttttattataattttgtcattaaaaaaataactatttaatatatattaaataatagtataatatataataatttttaaagttgctcgctattaaagcattttacaaaaagtactacaaataatcaaataatgtaaaagagtaataaaatacaatattatctatttatagagaggttagatatgctctaatatgttgaaggcacatggccctagctaagtagttatgatcaataattaattatatcaaaagtatagcattaggcacaataactaatcacttagaacaacaaatggaaaaataataataataatannnnnnnnnnnnnnnnnnnnnnnnnnnnnnataataataataataatatcaaacagacacaaatgccagaaactcttcatccaattcaagtttatccatgacatttttgtctaagttgataaaggcttctattccaccatcacctgattttgaatccattaacacgaccaaattcttggatgaaaagggaggcacgccaacccaaataggctttccccaaccaaatttgattcgtacaaaggaaatctgcaccaactactgaaactaaaaagagtcttttcattactcatcttcttaataaaatccaagtgtttcactattccctcttcttgctgtagcattttcgaatacttgccattaatgtgactgaattcttctctaagctttcttataaaagtcttgcactcattatctagagatacatcaacattaaacattacaagtctaaaaaaatttccaaatgaacaatccaagagtggaggatcaaacctgtttcgaagattcattggataactcatcacataattattagtttttttggataaatcatcacataattattagttttttttggataaatcatcatacaacaacaaaacagttccatatgaaagctgacaaagcctccacacaagaaacacttttattatccacaacatatttttgtttaagatctttgattctagaggccttgaatacaaaccttttagaggtaaaactcatgctattattgttcacaaagccagttttaaagttgtactgtgatcaattcataggaggaaagagtgaagctgctatgaatcacaattgttgatctttatctcttgatcttgatctcctcgagaaattgccgtccatctattgagaaacataaaatatgatatgccatctacaaatttatgatatatgcatgaaccaatggcaatagagccacacttgaagatgttgagttggatgcctagaggtagttgtataccttgtcgcaggttatcatgtcaatctaaatctagtgtactgaaaaatcataggacttaaatttttaaacatataatcctgattatattctacaatgttgaaaatactataatcatgaataaatatatgttctagacttaatataattcatacattaaatatataatcatgaaataaatnnnnnnnaccatgcaacataaaataatttcttatcttttattaattagaaaatttgattatattcaaatgaattttatttagggcacaaaatctaacaatatagtcttccaaaaaataaagttaaatatgctataaaggcagaaaattggcaatggaagaagctttcaataccccccactgttcgcaggccactctgcaactttagcaaatgcaggctcgaagtaagagaagttgaaaggcaagcattggagccaaacactgtataaagtatgctcgatagaaatattctcaaaggcctctggtgggagggaaaagggtcaatggtctcccttaaagtgtaaattgttttcccaagagtctacttttccaagaaaagagtatctactaaagatgtggcactagacatcttacccttcaaatgagatgccttgttcaatagactatcattctcaatagtctacaatttgaggtcttgcatgcaagattcaagctgagcctatagaggagccgacgaggcacacaaggatgataggcagtgggtgatcccgaggattgaaatttaaagagcataagtccacattagcatgtgaaagtaagcaagatcgcataagtaatgtctgagaaaggaaacttacccatgaagtagaacggacacaacatggaagtggaaaagagaagcttcatccactgttactaacttctcatcaagaaccatatggcggggtctatgcactttggtgcatagccaatgtctaggtacaaagtgctagagtacctggtgtaaagatacaaggcatgggacacactgtacggtgtacatgatggggatcagataaagcctccacgcctctatagggcatgggcaagtaataggtgtacaaagggtaatagataccaaatccacagctgtcagtatgaactgacacccgaccacaactaccccttgcaatgttgattttcttagtatagataagaatatatatgttttagcttttgggaccacatatatcaaggccaatagtgtaactataaataggaccctctttaattagatagagtggggttgaaaattatatgttgcaactcatattcacgaatcaatgcaacaatagcatttctccatttttacatgagttcataagaacttaatagttaatcatctttaatctttatctttactttaatttttcggccttaacttggttgacattaccatcaacaatatcattggaatatatttttatatttcaactttgtattatttatttttatctctattagaaatgttgttatgcaataattaatatgacaataataaatgtaatcttaaagtacaaataaataaataaactttttaatttaataaatcacataaataaactttgatccatatatataacttatgaaaaaagagataaagcacattagacattgtgacatacaaatattaagagcaatattaccaatgaattgattttaagaatatttgatgagatggatttacttttggcagaacatttgttgacatgaatttgtttttggtatctttgaatggatgcttatttagagtgaaaataatgccaaaaaaatacctaacaacaacatgtattctctttgtttttgttttattattttgtcatttaaaaaaaataactatttaatatatattaaataataatataatatgattttaataatttttaaagttgctcgctattaaagcattttacaaaaaaagtactacaaataattaaataatgtaaaagagtaataaaataaaatattataaatttatagagaggttagatatgctttaatatgttgaaggcacatgccctagctaattaattatgaccaataatttattatatcaaaagtataaaattaggcacaataattaatcacttaaaataataaattaaaacataactaacataataataataataataataataatactactaataataataataattataatatcaaacagacacaaatgccagaaactcttcatccgattcaagtttatccatgacatttttgtctaagttgataaaggcttctattccaccatcacctgatttcgaatccattaacacgaccaaattattggatggaaagggaggcacgccaacccaaacaggctttccccaaccaaaatctgattcatacaaaggaaatctgcaccaactactgaaactaaaaagagtcttttcattagtcatcttcttaataaaatccaagtgtttcaccattccctcttgttgctgtagcattttcaaatacttgccatcaatgtgactaaattcttctctaagctttcttataaaaatctcacactcattatcttcggatacatcaacatcaaacattacaagtctgaaaatatttccaaatgaacagtctaagagtggaggatcaaacctgtttcgaagattcattggataactcatcacataattattaattttcttggataaatcatcaacagcaacaaaacggttccatatgaaagctgacaaagcctccacacgagaaacacttttattgtccacaacatatctttgtttaagatctttgatactagaggccttgaagacaaatcttttagatgtaaaactcatgctatttttgtttacaaagccagttttagagttgtactgtgataaattcataggaggaaagagtgaggctgcttcgaatctcagttgttgatcttgatctcctcgagcaattgctgtccatctattgaggaacataaaatatgatatgccatctacaaatttatgagatatgcatgaaccaatagcaatagagccacacttgaagatgttgagttggatgcctaaaggtagatgggacacttcttcataatcaggtttgaatgggatgaacttgttgagctcaataggtagaatggggttttgagctaagaactcagataattgacaacttacattggcttcaaagaaagggattcccatgtcattacaatcaacgcaagcagtagcctcgttgagtcgtccagctaagggataaaattgagataggacatgagacatggctgttttgagcttggtagatatttcaacaacatcattataattattagtactatctttctctttgtcatagaacataacaaaagggacgaatagtggaggagaaatttgatcaagaaaggagagttggtaagagcgaaggtgatctggagttgggctagaaggtttgatcatctctttggagactatatctactcttacgctcaccatcttatcaattaactaaatttactaagactgtttggatcaagtttgaacttcaatatttggcctttgcctccaatggagaactcttatgcatcccatgtatatatataatgtatatatggacagataaatattatataattaccccttatacaattgtaaaattacattttcatacaaagttttaaaataaaaaatttctggacccatatttttaataattcttcaacacccatactttattaaaataataatgaaaattttcaaatttaatttttattctcattaatacaaaatagaaaaaaaaaaaaaaattatatgcaagggagggtctacagtaacacacttttatgttgtactgatacatcacctctccccaacaatatatgaggagaaattttttagaatttcttttttattgatttgttcacatgacctagttacgggatcctccttgtcaattttgaaaaacctctattaatttactattgacgtggtttcttgttaatagatctaagaagaatgtaaatgaacaagatgaataaaagtgaatgtcgatcaaaataaactaatgtattaaaaagacaaataacaatgatgaacaccagatttttatagtggttcaccctctttgagcgataataaattagtctacatagagctcgtttggtagactgtataagagttgtattattttaagtaacaaataatattattatctttggataaaacattgtattgtattaattattatcaccataaattttaatacaatgtgagtcgtattatttaatacataataaatagcacttattaacttatattataatgtttacaaagggcgggtctggcgtcaaccccgaccccgaacctcagacttggacccgaacaacggaccctaaccccgaccctaacctcagaccccggacccagaatcagacccgaaactaaacccgaacctgaacccagaccctgatctagaccccaaccccaacctagaaccggactcggataaggacccaagacccagatccgaattctgaaccccaattctagacccagacacgaaccccaaaccctagacctagacatgaatcggggctcgaactccggacctggatccggacttggacctcagacccaaatgttaggctatttttagcctaatgtttgtaaaatttagtatatattttcttcttagtttttggagtagaattacgctttttttgttggtttcaattttcgacacttaaaatgttcaaattggtcaaatattggaaataagatgatctataaaatagagaaaattttgcaaataaataaagctgaaacttcaagcctaaattcgtcaatgttctggtcagattttgaaaactttcaaaacatacaagttttagatctctttttcagctttccaacacttcatgaatcaactcatttaggtattaagtataaacacattagggattaagtaatccttaaagtgatggcagaggaataatatgactccttccgtttagatctttaacccttgattctttctattgcagagtatgatcaagatttgaaccaaaatcttcttctccttcgatggtgttcgtcacaatcttcctcactatgctgagtattgctttgacatgtgtgggcaagctctcaacaccaaggagcgcgaaattttatgaagaaatctaagagaacataccctctgaattttcaaaaataaaagagaagaagaggtctgctttttagggttttctagcttagaaagacatcatcagacaaaactctattttctttcttttaataggctttacttagggttatgttaagatgggatggactttgaataaagaattggactgaatcttactcttaggaccgaatatgcatataggctttagagttagacttttgcctttttatttcaactaatgaaacaaaagtgttttgtctacttttagcacttttctcaatatttaattatttaaataccaattttattttaataattataaataattatcaaataaaatacaacttaaatatatttattaattaaacccatcaagtgtactaattaacaaataaatccttatttttcttttcttctcaattatgccattccttagtaaaattcataaataaaatatagtcattatttagaatcctaattgattaaataaatcaattatttgagactacaaaataatattatctcagttagtgcggggaccatgggcctatgtaaccaagctcctaataagtagatccaaaatttatcaagtaaattttctaactgattaattcctcctaactccactatagatttagattgcactcctgatcactacgtagaacgttttatatactaaatatagatacgctatgaattattcattggtacaatctaaatagtcaatgatcctctatagacagtgagtagggacaaatttactgttgtacccgtaattgtattttatccttaaaacacnnnnctacttgtaaatgatattttgggatgcctatataattatcgaaatgaggccataattatttaaacgcatttagccaaggtctaatttcacttctatgtagttgtagaagatatagattccatatctatgattaacgctcccactcaattgaattaccgagttcccaagatataagtattgggccgatcctattggttagctttaacgaacaagtcagagaacccatattgtacaattaggctagaactcaaccatctcaggattgagatcaattgacctaaggtcaactaagtgacattaatgacttagaaaagacataacagtaagtttattatattttttcatagtcaatatatgtcggtctagactgatgtatagctgatacatccaatactagattactactttgctaatgacttaaaaaagacattttactatacaagtgtaagtaaatcacatcgctgattattacgctagtgtaaatttagtgcagtgataaattgtaggactaaatagtttgacgcatataatcattattatttttcattgtgtagacaacactataatcatgaataaatatatgtttgagatttaatagaatttatatattaaacatataatcataaaagtaatcatgtgaaccatgcannntaaaataatttctgatcttttattaatttgtaaatgtgattatattgaaatgagttttatttagggcgtaaaatcccaacatcatcttctattgtccttatgttagactcatcatacataagaaacactataaaacaacttgaaattggacttattttctctttagtggatcgcctatgtgggacttcctcttgagattgtagatcgtttgctcttctggaacaacctcttgttattgagtagggagttccatatgtgaatcctccctgttgtcttcaaatatgccttaacaatatcaattggttgatcattgtaaaaaaaacatttagtagaagaaattatttctcttcaaataacaacattccttactttatctcctccctcaaacacaacatcctacaaaagtcacgcatttcccgtctcaaaaaaggactttgttgagttaacgtaaatcataaaacccctcaacctttcaagataccaacaaaatagaggttaactattcttaagtccaatttattttcatgtgagcctaaaaaggccttggctcagctggacaaccccaaatgtggaagtgtttgatactaggcttttagcctatttatagttcataaggggtgatagctactaatttgctaagtactttatttagaatatatattactgtcttaagtgccttgtaacgtctctgcttcaaacctccattgggccttcccccatggagtcatggctcttatacacaggtacgccactatcgctgcttcctggactaacgactgacccaacacaccaacatgagtgtttctagtgtactttgtcctcactcgcacgctccttgggaaaacttcccaggaggtgacccatcctgaaattacacaaggtcaagcacacgcttaatagtggagttctttcgtgatgggttaccagaaaataagatgcaccttgctgatataggtagtaccaatcaatccatttaagccctctt

SEQ ID NO: 115163 - DNA, 4081 bp, Cannabis sativa
  modified_base (2308)..(2326): a, c, t, g, unknown or other
  modified_base (2372)..(2389): a, c, t, g, unknown or other
atctaaattgctatgattaatttgttgacagatctaatgatctaattttaatcatagtctaatcgtcaatagatcttataaataatttgtaataggttactattcattctaatgatctttatcatattagttgcactatagcagtaaaggagagtcatgtgtcttttaatttccgtggtttctatgggaatccaatctaatctaataggcatctatcacggttacttattgaaacaatagtttcttgtttatttggcctatggttatttatgggtggactaataaaaatttactatgtgtacacttgtatacaccgtgacagtccactttgtcacttaacagactaaagtggacaaaagaattttagagcaaaacgattgtggaggttggagagtttaaccataatttttttagtctaagggtttaactgtaccaaactttaaagtttaagaaatttagctgcaaattactctttcaaattatacttggtgggtgaaattaatcaaggagacttcaactacttcatcaaatatgtcgtgtgactacagtgcacgacatatatgctgtagtactgtagcaatgacattcacttttttttttaaaaatatatttatatttataaaattaatatttaatttattgtgtgcaaattaaaaaatgtaccctattcaaaaaactttacttgtctaattttgtaaaattttaaaaaatttaacacaccataaataagatttaaactgttagttacatgtgtaactctttttattttaaatgtagtttatagtattatggttgaagtaaaaatagattttgacaccaaatttaataatagggtgacattaaagtatgacttggagatgctcttggcataatttagccaagatactcaactcagttgtctatactcatcaatcttttattttatcgtgtctgggggttcaatatttatatttcttcatttcaatctttattttgataaaatcactaaaccagagccattaacaaagtaccacttaaatttttgagctgaaaaattctatcctagtttcagctgcactaacaagcaaagctgtttttgcttatattaaaaggagaaaagaaaaaggctaaggtgattttgatactctattacgaaaacaactaaagaaggcctgtctgacaaggacaaccatttctaccaaaggaatgtcacagatcttcagtacttacctataagaacaatacaataagacaatgtaaataacattaacataacatggtaccatttgaaatagaaatgtgcaaaccaagtggtgttgaattttttttgtgttaagaactcttacctttggcatgagatcaattttgttatctcaccggccaataattttatcgatgcgttgctgctgctgctgctgctgctgttcctggttgctttgatgatcagaaatacacagttctactctctcagcagagttaacaagcccgcgaaactctgtccaacctactgcagtcacaatcatcctaatatcccttcgaagaccgtcctcaaacctcctacacatatcgacctcattcgctactatggctcgggcaaatctcaccaatgaaataaacttatcctcatattgtcttacactcatatatccttgtgtcagctgcaaaaactctctcaacttggcatcgcgataggatcgtggaaaatacttatcataaaactcacgtcgaaaatctacccaacttatggttgatggataaggatagcaaagtttcacccccttccaccaatgaaaagcatctcgctctagcaaaaacctggtgacggatagcttttgctcgtccgagcaatcaatgatatcaaaaatctcttcaagcctctgtatccactcttcagcatcatcaggactagtagaaccgctgaactttgaagcccccaaattataaattctctcaattagtgttgctgtctcttctactaatcttgtctgataaaatggagcagcaaatgtttccattgcctgctgaggtctaccatttgaggtctgcacaccaggttcaggcatgttagaagtggctgcaggtgcggtctcaattacaacagcggtacttttaggcacgatcacatgctggctctttcgagagcaatcaggttggcgcataatggagctgcagtataaaattcaacagctttaactcatagtatacaatgcaatgaactcataaaaatgctatagctagtacttaagtggcgtttggttgggaggaatgaaaatataagaataaaaatgggaatagaattaagaataagaatggaataaaatttaaaatnnnnnnnnnnnnnnnnnnnaaaatcattaaattttttctctttgttacattggaatggtctttcnnnnnnnnnnnnnnnnnnatagtcattccaccaaaatgatagaaatagcattctattggaattcattccaatactttaaaatgcaaacaaataaagaaatagaatgaaaattgtttcctttccattccattccatatcattacctccaaccaaaaccaaacgccacctagtgtcaccctatttcccagcccagtgtaaatgttttaagtgtaaattttccaggagccaaggttaccaaatgctgatcttctgggagtatgagttatggagttattagttaccaatcaatgctagtctacacattttaacatttttaggaaggaaatagtctataatatttaataatcaaaacagaaaacaacgaaaatataattcattcttcaagtgccatattagtaatgcacccctattaattgaaattggctgagaaaaacacctacccgaaaatcaaatatctcagataatcaaataccatcatagcttacacttgtagatgaagctttgttcttagacacccacatccttagaaagaccccaccctttataaacattgaccaaaatcaaagccactttataatatattgcttttcttaaaacatgttgtagtatataaatgcttaaatcaaaaaaaaaatatattgcttttcatagaatgcatgactataattaccaaatacaaataaacaatttattctatcttccatttgcatagatgtgtatacaactttaggaaaattcagtgtcaatttcactttattgtattttcaagtaacaaaaaacagaaagaaaaaaaaatccaaaattttttaaaatccttcataagagcaagccaggaatcactttatttcatgaaaaaaataaaaataagaagaagctaagaattacctcaacacttgaagcaagttgattttgagataacaaaagacttcagttttgggattttacagacatgcaaatgcaatgatgcaaagccaaaactttttcttttttatttttctctgcgcagaaaactccaatttctgccgagctgcagccttttgtttccaccaccatattttcttcttgagagttttaatacaattttgacacataagtattatacagatatcaatgtcgtttctccaaattaaaaagagaaaagaaacttgccaaaagaaaataacaataaataccaatttgaatatattttgcaaaagttatcaatttgacattctgttttgttaaatgataaaatagatcttatattttttaaaatggtactattaggatcttaaattgattttttttcaaaataaaattttataataatccgatttaaaagtactacgataaaatttatattttctgtatatgttcgtgttagtaattgtctttaagttggttgtattaaaaaaagttgtcgaaaattatactcaaggtcctatttttatcattttgaaaaggctaattagaatttttacacccctaactttgacattaccaaatcatgcactttgaactattaatgttgttaaaaatcttctctgaactattgagattgttagatttaaagattttttttctaattttagtagaaaagtctaatatgaatgaaagtccaaggaccatgatttagtagatgtcagagttcgaggggcatgattttgtagatttcaaagtctgggagcatgacttagtatataaacaatcactgaaatagtaaaattgaat

SEQ ID NO: 115164 - DNA, 1730 bp, Cannabis sativa
gaatttacttgataaattctagagctacttattggaagcttgattatataggcagtatttattattcatagctcaaccttatttttaaagagagttttaatatttctaccaactgtgttttatgaggtaagttgtctgaacatatttattattgtataattcgggctggttcatattccttctatattacatatgtcaacaccatattgttgctcgaaatatgggtataatacttgaccttgccattagcaagctcctttgcatataagtatttagcttaaagagatactgtagctcaaatatcctttatgttcctttctttgcataaaaagtaaattgtcgcaaaaagttttaatgttcaaaagatttaaattaaaaatctttcgtaatagatttatatcttttaattaatcgtttatgtagtcataaactacttattagatcttacctaatataaatatttgttttaatctccaacgatgtaaagttaaggtataagtgggaactcaccactttatactttcattagattctttaaacttaggatatgtcgtaaatttaaaattcataatgaagtatctcattatcatcttcataaccattatagtcttttcagttatactgaaaattagagagaactatatgggtaagtatgttaaaccaacattattaaataaaagcatacaattattataaaacaaaataaatatttaatttcgaaaaaaatccacaaatgcatgaacgcaagaattaaaacatatatacagttgtttagtttttccacgataaagccgttcgataattaagcgtcgctttaggatcgatcaaattaattttattaagcctatgagacgaatctcatcttatgagacataaatgtctcacattttctatttaaatataaaccattgtttgatcaagttaacaactaaccgtatggaagcttagttccactttatgagcgtagcctattattttagattttatgacttaacatagtaatgctgcctaaaggttaatcatactaaaatacatcacttcctcttatttttgacaagagataaaccttgaacaatagtatagattaataccttccttagaggatgaaaactaagtcatcgcgagactagtctatactccttcggcgttgaccaataatagagactgtaaattacattaacatgtactccttctctcactcactattttaggattaatgagttttgttattaatttccaaaattaatacatattaaccctttgatggatgtgattaattcatctataatagaagagcctattttatttataattaaatttctcatcacttccactaaagtttatgtaaaactcttttaaataatttggttaattttactttactaagttataactaatttttactaagtagtttacatgttattggtttctctaaagcaataaatgtttaaacacatgggataatcttaaataattatgtttctactataagatgcatgattaataaaaaattgtgtaaaatttcatgaatgacataaaattaattaaaacaaattttaattagtttgtctgaaataagaataatttctatatagatgtttttttttgcttttatctgtttttttaattaaatttactaaataataaattacttttattgtttttttttttttttgataatgaaatagctacttcattgaattataagtattcagagtacaaaagagatt

SEQ ID NO: 115165 - DNA, 5682 bp, Cannabis sativa
aatagttcaggggcatttttaatggccttaaaagttcaggaagcatgatttggtacatgtcaaaattcagggaacaaaaatcttaattaaccttataaatataattaattagaatactccatggtcaaaataattttagtcctttcgatcatttatagatttctttctctctctaatttgaacataatcaatcaatgcaaagctttctaaaataactaaggtagggaatgcatacatatgtatatttaattatgtaaataattacagatagtaataatcaaaagattaattttaattaatcacagaagaatatttaatcagattccatgcatatgatcacattacatgtgcacactgtaatatcatgaattaatttttcagaattgtgactaccaataagaattggccatgtgaaattttacagtcaaaattatataaaattacacatattcatgtatagtcaactttctagcttcttcataaatatatatatatatgtatattgttacacatgtatatatatagaactttgttaagaaaaatattcccaactaccaatctaggttctccatgcgattgattaccttgttattacacaaggacagactactgcagatgattccatgctctcctttaatattatataataattagtatttttatctcttaaattttttatactactacattattttaatttttacgattataaattttgtagtaaatatttttttttaattatattttatttaattttattatgaaatgaatgatacggtaaataataattgataaataaatataaattaaatatctttcagattttttaacactttaatgataaaaaactaaaactaaaaatataaattattataaaaaagaaaacatcttttattaattaacataaaataggtaaaaaatatttaatttatatctatttattaatcgttatattattttacatatttgatgataaaattaaataaaatataataaaaaaattacaatattataaaaattatatttcgaataatattatagaaattcaaattgatagtgtaaaaaatttaaaagataaaaatactaaattaagatattaattaaattaaaatatgtaaaatttatattaaattatagttatcgatatattatttcttgcttgacacttaaaacatgtatatgagagagaaactttacagcgagtattttttttttttttattatttttacagagaaagtggggtgttttagggtgtaaatatatattggtgggaatataatggggatgagagatatgggcctctctctctagccagctaggctaagatataatatatatatatatatatttgcgcgtatataaataaataaataaatatttatacatatttgtaataaagccaaagagcatctatcttatccaagctacagattttgttctgctattgccagccaagccaaaaaccttaccaaaaatacaaaacctcttctttaggtaaatttctttgctttcttatatatacatgcaaaaaaaaatagatatatatataaccaattattattcatatatattatgtgagaatatatatacgtatatatctatccatctatctctcccaaacaactaatgtgtgctatattgtgtgattttgcattatttgatcgatgtgatatctttcattttttgcactaatatgccatgtcacaaataattattaattaatattaattttattattatttaatttggatgatatatatatgatcccaatttagttgggatatatttgtttctagtatattaaggttattctaagaaaggaaaatattataattaggtgatcatcatgactatatatgtgaataagtttaaatatagaataatgtttattatatatatatgtatatattttttcagaagattgatgcctttacgtgctaagtgttaaattaattagttcatttgatttaagtaaaaataaataatatatttcatgctatacatacaataagagtatattattagtgcactaaataattaattaaggggagttaggtaaaataacatttttgtatagtcgttaattttacataataatcgtattttgatatatatttttttaccaaatgacaccaaacactctcgatgccactggttatttttgttagaaatttttaacaccctgtatttttttctttttcaaatatataaaaaattcataacaaaacgtttcttagctgagactatgggaaaaaatatcaaaatatgaaagattattttgtaaaatagcatataataaaaatggcatattttcactaattactcaattgtatttccaaaaccatcgtatggaatttcaaattaatgattattatatagaaaatataatttaaaagttttttttattttttttttatttttacactttaaattattattttttatttttacaaaaaattcacataacaactcacaaattatataggtagtttccctataatttaatacatagaattttaatagtttatttgattattattagaatctaattaactaattggattatttattaatataactagatttattttcttacataaatgaaaagttagaaacaaataataaaagaaaatatattttaagtgttgtagttgtcactaacgtaacattcacccttgtccaaaacaaacggtactcctcaattttattttttatttttttaaaaaattattattatttaaatttatttatttatgttttagggctttaccttcctagctactccacctccactcccatccttctcgtgttatttttaattattaataacattattataaagtattattacccttatacttttaccaattgcttacgcattttaaattgacgaaaataccctttatccgtgattttcatttatacatatttattttatttttcactttttatttttttttgggggtactatacatgtgcctcatgataagtatagtttggatacaaaagttgatctctgatgatttgtgcattaaatgacttattgattggaataggtcccacctcacattgcattatatatttatgtgttggccattccacttcttttttttgggggctcaataattgattcactcactatttttatttttattttttatttttatttatgtacatatactacttacttctcaataaattcatcttgggataatcccatatatatttatacactaaaatgataaaataaaataaaaattctatggtgacattattcaatatgtaaaagtttaatgagttaattgtatttaccagtttatatgttctcttgaattttccaattttacaagcagtgagactcttttgggttgacatgtatactaacatttattgttcataaagtccactacaatatataaataaatatatataaatatttatatgtaactcatctacattaagaaccacaagttttaaagggtgaatttttcatcatcatcacaaacactttttaatttaattaataataattattattattattactttttttccttttgggaaatgagtcttatgtattttgtattgaaagaaaaactttctttttgatcccaaaataaccctgatcattaaaaaattaaattaccatataattagttgacttgaaaatattaatttgtaggtaaccatatagtcaccactaacttttaataaagaaatatataataaatagtagttatttttatttcatgtagatgttataatcaatttatgttttaacattatatattggaatattattatgtacgtaacgttactaaacacttttcatttattttatttaaaaataatgtaaaaatctatatatccttatcacaaaaaaatgatgaagtcactatcaaaaaccagtgcaaaaaagataaaaacgacaagaattttaaaaatttgaaaaggaaacgttacatttagcaagaaaaaaattggcacaattcttgtaaattaacttggcaagatttgattttgacaaatatttatatactagtactaataagtaataagtgatataataaagtaatatatataggtcattttccttttccaaaaaaatatatactaaaaatgacacaaactttattttttttttctttcttttatattatatatgatacttttgtggaagtaaaaacattatttttggatatatatatatatatatatatatgtgtgtgtgatcttcatctcctataggttggttgatatcatgtacgtacgtatatatatatcctcaaaaggaatatcaataataatatttagtgggcatataacaaaaacaacaataataaatgtaaatttcatgtccctacgtactatatatatgaaaaaaaatatatataaatgacaaaagaaattataaatattatatatgcatgtatgtatcttaatatataggaacatattcctcgtgtcttccaacaagaatagtatgacctaatatttaatggtaattgattattcttattattatatttttgaatcaaattctcattttttgacatttttaaaagagaaatgttaaagagcatttttagtgtttagtattctcttatgtgtagggcggacttaggtataggcgggttaggctcgaatttagggcccactcattgtaggggctcaaataattttttttttttaatgatttgtaaaaaaccatttatttttataataagggctcaaaatttttttttgcctatagctcactttaaatcagggtcggtcctgcctacgtgttaatattatattgattcaattaagtatcgatcgagtcttatatagtttaatataataatttttaggaaatatcgataactaattgtaaggcaacacgtttaaaaaatactacatactactagtacccaataacaatgctcattttaaaatgtggggttgggaaattaaatgacgtagctatagtatatagatatagtactatacttcaatttaattcaaacaacaatatgctaataaatagtatacacacataacctactagtactaaagtaggggttatagctcctattaacaaaaatattatctttaaaaaaattaaatgtaaattttttaattggataattataaattaaaatagtagaaaatttttcataaaattaaataaatctagtaagagtgattataatataagtataaatattttttaaataataaataagccctcatgaagtaaaaattatgggtccgtatatattgtagagtaatttgcagtataaattataataataactaagtttaattcatgttttgtataaatacctaaatttaattttttacggtaatattaataactaaaaattttcgtaggtatctgaccgttaagtataaaatcattagtataaaatcattattcacgtgtcatttcttatgtgtcatttcttattggtatatttaaattattttttaaataaaaataaaaatttaatgaccagaactaatcaacaatttaagtagatacctgactggaaagtgttaagtcaatagccaatataacagtccctagctataattagtctaaatcatttaatttttttatttaaaaatatactaataacaaaataatatgtggatcttaacaacagtgaagtacttacggaagtttcaaaaatata

SEQ ID NO: 115166 - DNA, 1122 bp, Cannabis sativa
gtggaccaatagcggccgaggggcccgccgctattggtccttaatgttgtagtgttagattgtaagttaaataaatatgttggtttgaggatgtgttaaacacatcattttgttttattgatttcatatgtcttttgttgttattatttagtctcttatcaaataataaattgaattttaataatattttttactattataaacgagtagctagttgatttcttaatttattttatgtacagaacaaatttattagaaagaattacaagtgagatgtgataatgatgagaatggttaaatatagtgacactataggtgtgatacagaaatagtaacgaacttaaatatagtgatactacaagtagaataaattaatgtgaacaacttaaaataatggagggcttgatattaaattataatttaaaaagatatgtactagtaagtagcaaacttaaactataatttgaatagatatttatttaagtatgtagcatttacacctaaattataattttattattgtcaatttgtataaaaaaaattaaacttaaaattaataatcaaatattaaatattattttattatttttataataaaaaataaatattagtttgttatgtgataaatatgaaataaaatataatttaagagtttgttatcattattcttatttttaattatgttaatgaatttttatagccatgcttttataaataaaatagtgtagaaaaattcattatattaattaacaaaaattataaatataaataaattcgaaattatttaatttaattttactattaaattaatactaaagcaagtgaaatgcgacttgttttctagttaataaatataataagagcaatgattgtgacatttaacttgcatacactatctaaatgatgcataatttaactttaaccatatagttaaagggataaaaaaattaaatacacatcatttgtatataaaaaaaaaattataatgttttatatctatagaattactcatataataatatggctaattacgatttttgtcccttgaactttgacatgtactaaattatgcctcctaaacttttaaggtcgttaaaaatgccctttgaacttttaaggtcg

SEQ ID NO: 115167 - DNA, 5933 bp, Cannabis sativa
  modified_base (1614)..(1623): a, c, t, g, unknown or other
  modified_base (3737)..(3757): a, c, t, g, unknown or other
aaagcaccaaaatgttgacctcacttttagccaacgacaatgagtcaaatagtaagcaatagaaaatataattaaaataaagtatgaactaataaggaataaagaacaccggattttaaagaggttcggccccgttagttcgataatagcctactctccttgattgtataaactcaagaacaaagaatacaatgtttcctctcttgaagctctcacaatgaaatctctgagtatgctctcttagatttctcttaagtaattcttttgacgacccctttaccagtgagaatggatcactatttatatatgtaaatgcttgagagaaggtttcccttttacttacaatgtctatagttggtaagaatatatattacatatttagaatacatagattgtgggatttggacagcttgccatatctctgtgatacgatcccagacttatagggattgcttttatgcttctcgatgcaagtcttagaattcttaagtgttgattcccttctcggattgtctactgctcggctgggaggacattatccgtgcaggtgtatgctgagctctgtctgaaacatctcttcagctagatgtagggaattaggtccacgtgtcactagcatgtgctgccacgtcatagtgcgaaaaataggataacagatatatagagcattctatgtaatcaagagtgcaattctgaatctatagtagaactaggaggaattaataagttaagaaatttacttggtaaattttggatctacttattaggagcttggttacataggcacatggtccccacattgtctgggataatatcatcttttagactcaactaattgatttaataagtcaattagaattcaaaaatagactatgtcttatttaagaattttcaccaagtttgggtaattttgagaagaaaagagaataaagatttatttgttaattagtacactttgtgggtctaattaataaatacatttaaattatattttatttgataattatttatagttattaatataaaattactatttaaataattagaagagatacgtggtaaaaaggaaaagatacattgtttcatttaaatgaaataaaatagcataaatctaactctaaagcccataagcaattcagccctaaagttagacttcaggccaaatctctattttaggtccaatctcatctaacctagccctaagtgaagcctatataaagaaagtgatgagaataagaattaacctaagtttccaatgtcagacaactctcttctcttctctctcttgtatattttgaaattacattgtattctctctcaaaatattgctccaaaggtgtttgagtatcagcccacaccattcaaggtgatactcaggcctttgtggaggaatgtgatgaacacaatggaaggaggagtatatctaggttcatatcttaataatactctcctatagatagaaatgaagggttagaaatctgaatggaaggagtcatattattccgctgccatcactgtaagtatttcttaatccttaatgtgtttatttatcattttagaaatttcatatttagaattttaggttataattatataatcaacatacatgttagnnnnnnnnnntcttggtaaaataatttttaacaattgcaggggataatgaaggttgggagattgtagtaggtgaagatgagtccaatagtgagaagaaagaagttgctacaagtgcagttgatgctaattaatattgttaagcccaattttaggaaagctcgaagatagtctaggctaaattcaatggaggtaaacttaatttttctaatactaagcttcattatatttagactttgtgtaaagaggggcatgctattgcaaaaattgatgtagaggtagtcgtagaggcttcattgtgggagaatgttgtggtttcagtgggtggtggttttagtggttgtgttatgatggtggtggtggaaagaataaggtttttgaataaatgaagaaagaagaagaaagaaaaaaaaatagagaaaaaagaaaaaagagaaatatatatatattttctaatttgaaatttattcaatattttaaattattttttaattattaatattaagtggacaaatgaaattttgccacatgtacacttgtgtacacagtgatagtgcactttggcacttaacagatcaaaatgagaaaaatgagtacaaagcaaaacgattatgtagattagagagtttagcctttattattttagtctagagggttgatcgtgctaaatttcaaagttcagggagtttgactgtacattaccctttaaaatttagttaactttatatttttatactattaaacatataatattttaatatttaacaatctcttccgttaggggagccatacatttcattgattttcttgtttgtagccagaatgttctacatcaaaagaaaagaaaaactctccaacttagaaatagacatgaaagaaaaaaatgcaaaaagaaagaaaattattaattaatatatttttaaaaaactctacaatatccaaacaaatcatcatataaaaaaactaaaaacaatgtagagaattattatcatagaaaaacaattttaaaactctaccactccatcataactaatattttaaattaataaattaatatatatgtatctatgcatggaggcgatggttatgagtggctcaccgacaaatagtggtagaggcagtggctgtgggtggctcaccgaccgatggtggtggaggcagtgagtgtgggttgcacactgagagagagagagagagaccgagagacccatgacgggtctcgctgttcattgatatgagtctcgccaaaatggagatccacgacagagagagggcaaggagagagaaggaggaggtggcagtggttgctcactgttcaaacgagagagtgaggagggataaggtggttgtggcggtggttgcatgcgcttgagagagctgagagagatctgagagtgagaatgaatgtgagatctcaaacgctaaagggggctttatatttacatggaaattcccgacggtttaaagctgtcgggaattccctttacgttctgtttcaaatttatctcgtaactgttttaaattgccgagaatactaaacaattatttaaaactgtcgcaacactcaaatactacagctgacagttttaaacaatcacttacttttattagcgacggtcctccaaaaaaattaatttaatgattgacggaatagtactgtttgtagtaatagtcgataatattgcattttttttttttacaatgaataatatatggaaaaatttcctcaaaaaaaaaaaaatatggaaaaataatagtatagtattagtacatttttttccatataaattatagtactagttcatcttaaaattacccaaaaaaaaaaatacatcttaaaataatataaattgaggaaaatcttctaactaaacaagttcatcaagcatgtacaaattaacaatgagtgaggttatttcattatcactatcttacactaaattctaccataaaataattcatttaagaagatcaaacaagctatatataatttggagtgctatcattgcagactgattcaaccaattaataaagtaccttgaataattactccatttcacaagttcaattagcatataccaataaatcaattaatgaagatataattaaataataataataacaannnnnnnnnnnnnnnnnnnnntaataataataataataaaagtagcaatacacatattatacattgtacaagaaagaaattttgtctacactgaaaataaaaaatttatagagaatttaatatgtaattagttttggtgagagctaggaaggtttgtgtttgccattggtttcgtacagtttgattgtattcaacttgtgattaatgaaggtgtctttttttcttgatcgaaaaaaaaaatagcaacataaataaaaataaattggaaagacacaatacatctctcccatacttgaagtttggtatagtaggttagaaattcccttaagaatctacagggggacagggtaatttgcaagacatgttacctatacccttcacttcaaaagcatatagtatatgtgtatatatatatatatttatatgatcaccacatacttatatgtatatctatatctatatctcaattcaaatgtctaattaattaactatactctatttccttgttgaaaatgaatcccaaaatcaaatacttaagtttgacaattgcaatttctgcaatacttatatcatcaaccagggatcttataacaagcaccgcaccaaaaccacaattaccatattctctgaaatacatagctgatgttgtcctgttattaccatcatccataatctcatcacctcttatatcattcccctttagtaggcaccatcgaaaaaaacgacctgataagggtacaacgacatcaatttgtgatgattttcacccacaatttccttcagtagatccaaacacaaccaccattctgtgtgtggatccaaacgggtgttgcaatttcacgactgttcaagctgccattgatgcaattccaaccactagtgctgctgctgctcctactcagaacagaaccgtaatatggatcaactctggcctttactagtaagtataatattattcgtaacaattttgttttttcatttataaaatatttatgtatatgttttgttaattaatagtgagaaagtggtgattccaaaaacgaaaccaagcataacattacaagggcaaggatatttaaccactgcaatagcctggaacaacacagcaaactcatcaggtggaacgttctatagtggctcccttcaagttttctctgacaattttatagctaagaacataagctttatggtgagaaattgatacaatatatacatagttttataaacttatgtacatatatagttctataaacttattacatgtttgttgtaataaatgtatgtatagaatgtggctcctattccaaaaccgggggatgttggagctcaagcagtagcaataaggatatcaggagaccaagcagcgttttggggttgtggattttttggagctcaggacacactccatgatgacaagggtcgccattacttcaaagattgttatatccaaggttccattgatttcatctttggaaatgcaaaatctttatatgaggtacctgtatatacacatttagcctaatcttttttttttttttttttgataagttaatgtattttatgtgtttctatattattttttttttccaactcatgatatatctcttcaactaacatgagcgtaatattaatatagtggacacaccccatgattgagataaacacactttaccattattttaattagttatgcttgattgatgaaaaaatatgttacttttgatcactttatcttttcctttttattttaaagatttattttattttttttatttttatcaaatacaataaaattgtttagccttataaaactactgttaaaaaaattctttcatttttttaaacttactgcatgattttctaatgaggattatgataatgttgaattaaagtatcgtataagaatatttatttaagaataacttctaatacattatatatatataaaaaataagttacaaatttgggtcaataataaataaaaataatctctaaattataactagttatgcattttataagttctatattaaaaaagtatacatctaataatatatgtatagtttataaatttatttagtaggatattaataaatatttatgtatattaatattataatacatatataatattatatttactcaaaaatatttttttttatgatatagtattaaagtatttattgtagggcttttt

SEQ ID NO: 115168 - DNA, 2692 bp, Cannabis sativa
attctccttacctctttaccttttcttcttttcttttcttctgtttcttctctttctctctctacatgaagtcaaatcctattctttctctctcctcatacttctcacatacatacatatgtctcatatatctatgtatatgcatcatcatcatcatcatcatcatcatactgaattaaattataataatataataataataaatatgattagatgtacttttgaaattacttaattacccttgactgttctgtggaatttcttcctctgtagctccctcacaccttcttaacctactcaccatttttcaagtttgtgttcttaaaatatttttttttctatggagtttctatattaagaactcttatctattctaatttttagtatctttgatctctaatttttaatttatgttaatctcacttttctttaactcggtttatcttacttaactttctttattttcgtcgcagattcttttttttaactacattatgatcttattattttttttcttcaaatttctgtttagtatatcgttagtttattttttttaacattttattccaattttccatctaaggatggatcgagtattaggtatgaaagaaaggatattaagaaagaaaatatatttgttaatactgtaacagaagttatatgaatcgaaataaagttaaaaagttattattcatttattttatgaaattttatacaaattacttaaaattaagctatttttatatatttgtacagaatataacttactttttcacaattttctttcaattacatttttagggagttaatataaataggctaattagaatttttgctaactttgacatgtatcaaattttttaaatttttaagatcattaaaaataccccctaaactattgagattgtatttaaggacttttttttttctaattttaggacttttttttttctaattttagtaaaaaagtctaacatggatgaaagtccaggagccatgatttagtacatgtcaaagttcgaagggcatgatttggtagatatcaaagtctggggagcatagtttagtatataaacaattactgaaatagtaaaacaaaatgaaattagacaaaagtctttaaatccaacaatctcaaaagttcagggggcatttttaacgaccttaaaagttcatgggacatgatttggtacaggtcaaagttcaggggacaaaaatcctaattagccatataaaatataatatgtaaactgcttagtataaatataaaagcaatatgaaaaaacgtgcaaacaacatagtataatgttataaaaaaaaatgaatcacaaaattgtaaattcgtatttttatgatatttttatcttttgaagtatttatgaaaagagcattgatattggtattagtggtgcttagcactttttagatgtgtcgctttgttattggctagcaatacttttaaaagttattatattaaactatatgggactcgatacttagttagatcaatagtaatattggcacgtaagaaagtactagacactactagtactttttagcatttctcttatgaaaaattgtcttctgtttaccatgtacatttattatttttttttaagaaaaataagataattatactataaattaattaaatgttttcaactttccaacaatagaaaaatttaacaagaaaaataataataattttggctagagaagattttcttttgttttccaaatcccattttactttatgtttgatcacatgaatttttataaggatggaaatgatataaggaaatggagtaggtggatagccaaattggctagaaagaaagttggaagaagaaaaaaattgaaaagatagaatttctttccaaaatcctaaaaaatgaatctctccaaaataggagaaaatcataacaaaacaaaaaaattataaacaaaattaaataaatacacttcaaataatttaaacatatatttctataatattttttttatgagaaatgctaaatacaccttgtattatttttttcttttgcacctttttaaatcaataaatgaaataatttataatataaactaggttgataatatatccacatgtcatgcattaaagaaggagaagttaaaagaaagtgcaatataaaatttcctttgcactccttttttttttaaaaaaaaaattattatgtagttaaagacattgtctaaattataagagtaatggtaatagcaaagaaataaataaataaatgtgaatgaacaaactagggagaaagatgatattactaaagaaaagaactcgagcaggtgcaactctacaaagtggaaaataatttaatgtgaatgaacaaaaaacataaatcaaggcgcctaaacaagagatgaaaagtagtaaaaacaaacaagtaaataataggggtgagcaatagtcggtttggtcggttttctacaaaaaaaaaaatgcaaaattcggttttcgattttcatgtttataatccgaaaaccgaccgacaattatacaaatataaaaaaattggccgttttaattcacggtttggtcagttaacttcatttttttaaaaaaaaaaataagttttttaattttttttaattatttgaaaactaaaaaaattagagtattgtataatttaagaataaattttttttagttaaataaataatg

SEQ ID NO: 115169 - DNA, 2855 bp, Cannabis sativa
ttaaagtttgacatagtattatataaaaatataatgtataatccattttaatataatacaatacaatacaatacgacctaatacggcattccaaacgagctctaagtatattatttatttattatttatttaatcaaaatatatatattggactccatattaattgtgtaataattttttgggtgtgaacgatgtttctccagtatttttttttcaattattacaaaataataattatttttagtgataatattttagtcacaacataaattttttgtaactaaacgtaacttttagttagattcaagttgtcgttaatttagttctacaagtcacaacaaatattgtgattaaaacacatttagttataacaaattgtaatttttgtggctaatacctttagccacgggtttttatttagtcacaacataagaatgatgatttataattagtcacaattttttacttttagtcacaaattttgttgtaaataaaagtaagatacacttaagactaagaaaattctattataattgagagattaaaactaaatagagatacattaaaaaatttgaaaacaccaaaaaaaatataaaatttaataacaattacaataaataatttctaaatactatattgtcataattaaattatttttgagtaaatataatatttatacatatgttacaatttagaataaaattattaattcaatataaataaatttataaattttatatttttttttatttagatataattattcttatatagagttatactttcttaaattaaaacttgaaaatgtataaatgattacattaatttagatattattcttatttataattgacctaaaatatgattcttataatatcagtatctatataactttttgtagtagctatagcatgttaaaagattcagtgatgcctagtacctttttatatatcaatattgttattggtccaatgtctcatatagtttaatgtaataacttttaaagcgtaatagtactaaccaatcataagataatatgtctagaggtgctaagcacgactgatgtccaataacataactctttttattattattattattaattatttgtttaataaacaaattactataaagcgatgaccaataagttggtgtaagtaaccaagctcgatctctttgaaagtaaaaaagttagtatttatttaatgaatgaaatgaagaaagaaagtatagatataaaaagggtgaaaaaacaaagtgaaaaagatcaaatcaaagttggatttgaaaaaggttagtagtagtgggaaaagtgaatgacctttacagccagccaatttgatgagaagttaaaaatcattatgccataattgttttaggaccacgagctatctaatcagaaaacaaattaacaaaacaaaagaaaaagggtggtgccgtccgtgagacctgaatggctaactgagggacccaatcaaaattaatatatatatatatatgaacactgtcagtgacagtagtgtgatgatatgatcacaagggaaagtttatatatatatacaaagacaagagatgactactaccgcttcatatgtcgatcaacccaacccattccccacttcttcattttctgaatcactcatctaattattacttaatcttattaattctacaaattttaatctaatatatatatttaaaaaaaatctagaaaaatttattaagctcaccaacaacaacaacacttacataataaaattacttacaaattcttagctttcaaccactttactatagcacaaacactattaacaatataattaaaagtgaccctaatagtagagagtttttgcttccaaaaaaccttatttctaacatataaaaatattaaatactttaaaaattattaattaattataaaatattatatcgatataatattaagtaccttaaatcgagactttatatgtatactcgtctcatcttaatctatgtacgtatcattttccacatgtactctccccacctcgttaactctctaactaattgatataaatgtttttgtctaaaatgtgttttgtttttgttattgtatctttaattgcattcacacgtgttattattttattagttcattaattaagtaatttcttcttttttttaacaatattgttcaaaactggagaatctacttccccatgaatatttactgttgatgattatatgtaaaaaaaaattatacaagattatgtatacagtaattaattaacagtatatataatacgtcattcgtggcagtttcattattatcatcatcatctcatgagttataatgattagtacaataacggtgtcatgatgagtagatcttgtaaaatgatgatataaattaagatctttaagctgcttagtacacaaattgtacatgtatatatgggtccctatattaagattgtattgtattaaataatttttatatatataaatttgaatagagtttgtattatattaattattacgattataaattttaatataatataaataaattatattattatttaatatatatatataagaaatgatgtaataaattatagatgaacattttctttatgggaatgcatgggacttcgcggagatccacccctaatggagtagggatggagaacggaacaggaatagaaattactttttgtcttcaaatattaaatgggacggggaagaggattatactccctgttctgacggggacccgattagtattttattttatatttctagtaaaatttatgtttgcatttttttagtatattagtaattttttatgaattttaagttgtgttttgaataat

SEQ ID NO: 115170 - DNA, 1258 bp, Cannabis sativa
  modified_base (1216)..(1216): a, c, t, g, unknown or other
aagccttggccatatctaatttgacggccatccatcccaggcgacccgtcttgcgatgtgagagagagtgcattacctcttgcccaataatgatgttatcgaaaattaagcgggagagattatgcgaccgagaatgggtttgagacggttaaccagcacccgtgaaatgattttgtaaagagtagaacaaagactaataggccgatagtcggtaatctcctcaggattcggttttttggggataagaacaaggagtgtattgttaataggggtgaggtcagcatctccatttagaaaactttgggctgcagtaatgacatcctttccaaccaaatgccaattcctttgaaaaaaagaaccattgaatccatctaaccccggggctttatcattggagagttagaaagcagattgctttatttcctcagcagaaaagtttgcctgaaggagtcccacttcttcatcattgagttctctgtgattcctactaacacgaaatcaattatagcttctgcagggatttggctttggaatagcttagcaaaataattttcaattgttgttacagtggaatgagtgtcgtttgccacggaaccatcggagcaattgagaaagtgaatttttttagtttgacgtctctgagaagcaaaacgatgaaaatacttagtgttcctatccccaagtttgagccaggttatccgggatcgctgttgccaatacttttcctctttctgtaaaagacgatttaattcactctcaagatgtctactccgatttaggtgttcattggtaggctgcgagatagagtgcacactcttgagttgagcttgaacttctcgaatttgagcatgaagaggaggacccatcgatttcttccatatttttaattgggaagagaaattatgaagtttttcgttgagtcctagcaatgggttatgattttgagtaagtgggtttaaagtccaagcatgtcgaaggcaattctcaaaacccgactcagacatccatagcttgtccaagatgaaacgaggggcttggttagcttgatcaacctggaaatggagtgataaaattaaaggccgatgatcagaaccaaaaaaataactgtgaagaagacgaggagtggggacggatgcatcccaatcggcattagaaagacaccaatctagcctctcttaggtgtgagatggttgctttgttgggttttatgccctanataaaactctatttcaatataatccagattattcaatatcaa

SEQ ID NO: 115171 - DNA, 3004 bp, Cannabis sativa
gattttgaataccatttgcagccacacgatcagctccaacaaccacagcattcacacgcccagcttgcattaaggccgctgcggcagaatctactataagggtggctggaatcttctcatgtaccaactcaaaggctgtaagtctggatccctgcaattaattgattacataaattttcataagtgtgtaagtaacatgtgaaatgaaaaataaggtgcataaacaagaaacaaaatggatcataatacaaacttggttgaaaggacgtgtttctgtgcagtaagctctttccaacaccccttctgcatgaagtgcgcggattacaccaagagcagtaccaaatcctgctgttgcaagactggcaatacagaacataaaagtaaacatatttttcagtttcttgtcgaaaaggagaaatataagttgcaagagatatttatttactaatttttagggagaattattaaaatgggaaactcaagagatttagatacctgccggtgttacaatgggtcaatacagaaagctttttagggttgttgagctgctgatgaagaataaaacttgctccaaatgagccaatagctttatttgaagtaacatcatcttccagcatcatttcagctgcatctatataggcctgtggaagttcagtaagaaggagcacatgaatttgcagtaatgctatgaaaggtggggcctaatcaaaagattattggtaaaaccaagtgaaagtacaatagaaagtaccatacttgaaaaacacttttgccttctgtagcagtagcagcagtatttgagatcacttctttaagtttcgtcgcagcatctgaaagattaacagcagttggccggctgaaatagcattgttcagatttaaaatgggctattgatccttttttcgtgggggaattataaagatgtgacgaacaaatgtaaactaataggtggcagaagacttatttaagcaacacttagcacctggagacaagataatccaacttcatgataagataagaaactgaatcattgatggtcccatctaaaccatccaagttgaacacttcaactgctagagaaagggctgctgctattgcaatggctggggcaccacggaccaccatatcctttatggcatgcctgacaattaaaaaaagaactcaaaaattgagattattcatgacaaaaacaagcactaatatgaaaaacatatgcttatgtacatataaaaagaatggcaccattttcgcctcttttcttcacaatacacacaacaaacactaattataattagtagtgttacagcattgaaagtgaactttactagaagctagttataccttccaataatttacaaaacaagtttgaccagctttgataaaagaaacaaagctaaattatctgaaattgaatcgtcctcagaaaaaaaaaaaaaaaaaaaaatattatgaatacgagacctaataaaaataaagaagcatattaccatccatcagtggcatctcgaatttccaaataaatagtttccagaggaagctttctctgttgaacaaaacaacatcaagaaacgaacccacaaagagccaaattcgattcaatgcaaagaagaagaagaagaaaatcataaatcaaacaaaagttaacaacaaaaccagaggcacaacctgatcaagtagctgaagggaaccacggttgtagcatatagcttgaagagtgttgtctgtggcaggcgccataactttaggccttaaacgacacgtttcgatagctattaaccctgtgaagaagaatatgaagattaatggacaaggaagaagagggcttagacttttaggagctgcctgctacttgagctttcttttattttatttttttaattttttatcaaacaaaagcttaattcaaaccatactgtaacaacaactactacttctacaaccccacattcaaacattttgattaatcttcataaatatatgaaaaaaacatcaaccagattagtagtctttctttcctttccctcgccaaaatatttattttttatgtgatggaaagaaaggggcactgaaacagatatgtagattgagtttgagatttgagagcttcaacaaagaaagagctttaaagtcaatttctgtggcaccgaagtgggtgtaatagaaaaggagaagaatgcgattatgacagaaaaaacacagaatttagtgtgaaaaatacaaataagcccataaaaataaggacttcgtagtatacataagcaggaggcgaagaagaggcttatctataatctttacacaccgattgatgaaaataaaaaaacccagctttcatagtagattatgtcagttaaacttgaaaatatatataaatagcaggagaattgagcaaaacccatgtcgcgaaattgtatagtaatcacatgggatataccttgttcagatcggtcgctttgatggtcccttcttgggagagttggaccttataattcctacgggtttatgtattcaacgatgaacaaggaatggtttgagttggtgtgaagcaggtttgggttttgaagagtgaaggtggagaggtggtggtgtgaagcatgtgaaacaagagattctgtcaatatatgaaaagaccataaaccacctcaaaaaaaaaaaaaaaccgggggtatacactatacacgagatatacgcagcgactagtaaagtttttttcttttttagaatgaaactgtcataaataaataaccatgtatcctccaatcaaatacaatttgtcttcaccaagaaagtataaactaatttatgagcatcaatattcgcagatataagcatgagagaccttagaaattagccacaaatttcctattatgagtaataatacaataaaattttgagactaagaagattgcaatccttttgctacaataaaagaattaattttgatataatgaaccaatagttgctgtaggaaattacagatatgtcctacacaactcacacacacaca

SEQ ID NO: 115172 - DNA, 870 bp, Cannabis sativa
tattcgaattccttcacctaatccaagtataattactacatggaataggtcaaattaggtcattgtaaacattaatgcctcgagagaaagcatcctattgttgaattggtcataatatatactcttaaattattaatggaaggagagtcattgtgtttgtttttaactcatccaatccaaacatggtcaaaaggaaaggacttcctccaaatgaagacatatcaatttgcctagagtagtcatgactttccaagtcaacacatatatacgtatatttgttgttgtgcacatgttaaagcaatgaagaaatttcgaggggattggggtctttcttattggccaatatatatatatatatgataaataaatatctagttaatttggatccaatatgttacgtaacgttttttcctaaatcattttcaagacaaaattagggaaatgaacaagttataataagaaaagaggttctattctagattctttgcatggccacgcacacgcagacaactttgacaagtattatggctcagagtaagaaactaaccttttctttctacagcactgctgttataccatacttaactccaaatgtagaattagatgcctagtgctccacttttctatcttcattcaaagaattgaacatcaaatcttacatatttttactttaaattaaaattaaaataataaaatttgatattaagttgaatcaattcaaaactatacactattatgtggcgtttagttgaagagaatgaaaaaaaaaatattttgctctatgttgaccgaggttttcgacaaccagtataataatatataagaaagctgtaagaagtttaatgcatgagatttttacgtggttggggc

SEQ ID NO: 115173 - DNA, 2299 bp, Cannabis sativa
gtttaaaagtatttgtttgacaaaaggtctttcctaccttattgcattggcaaaataaatataaatgacattactttcaaatctcatccaattatgaaataattagctattcgttttagcaacttatctatcacacctatcattcaattctttttcttaatctctctgcttaagaacttctttcgttgatatgaaaatgcctaattattcatgtattcacaaaactttaaacctgtttggtgtttgcgcatctgttctgaagatcttgttgatggtattcttattatttcaagttcctgtgatctttctcagggaaaggttgaagtaaccatagcgggtggaagaattgtttggcaaaatgatgaaccgaaggttgttccaggttctggaaagtacatagaaatgccacctttcggttatcttttcaaaggaatggacaaggcagaagcaagttacttatcttctctacgggctccagttaaaagatccaaatccacaacttagtttgttttcttgaaaaatattagaccagctcaccaagaaaagaaaaggtaacaatgacaagaaagaacctattatttgaaatgttggaatgtctcatataatcagcctgaataataagttaatgaggtttcagattatgtatagatacgtgttcatatcaataaattagattcatctcttgcattttgtgattaaacaatacatatttgtctgtgtatagttttttttttctttttttaatctaaagatgtatcaaacgaatttcaaagttacattatatttaatatgtatatagttatattgcacacaaaagagaattacagaaacttttgattagtattctgatgatgaacaaatctcatctagaaatttacaggccattaatagaggataaatgactgaaagttttactgatagctttggtgcttaggcaatcaaggtcttatacagcagttaatgtaggtcagaatcttctttttcctctgcatgcaaataaaaatgaagcaaattagaaagattaattgaacaattttttatctaaaaatattttctacgcaaatataccatgacagaatcatcctggtgattagcaggattaatgaattctctttcgtttccgaggctggatcgcttgaattcgctgaaatccatcttttgctgcttccggtttgctcgagctcgagaaaacaccatggaatagtcagttcctcccttctgctcccaccctccaaattggggaatagacatccagccatttttctgtaagcatgtagaaaatacacaaactcaacatctgaatccttcatggatttcacatccaaaacaatgaatattgtaagcatttcatataaatgcttgtgaagaattgtattcaataatgaccaatacaacctcatgtgttcctacctcagatttctatagtaagttatggaacatatattcataacatcagcaaataaatggcatattcgtatagagtaagaaattttatggttgtttaagaggaataaaacaagtgcacatcataaatatatataaacacaaatccatcgataattttacaaagcttgatcaagactgaaatttatatcatttatcttcttgggtgtttcagaacaatgagtctttaagatcatttttcattctactttgcttccccaaaaataaaaattaaaaaacaaaaacaaagaagaaaaaaaataatctgttttcttgtaaaaagcaattaaacaaaagaaagtcataatatatatttgatacaatctttctagtattgaatgattgatttgaacgtacctcattctcattagccatggttactttatgagacgttgatggaagctattagtgaaaagcaaatgctttagaaatatttatttggaatactaaaatatctgtggtctattttaagggagtttaaaattgtaatcttttgtggctatctaaaatccaaataaatctgtttaccatgttttgtggtggctaattttgaagaattgaaccattttcagtttaagtactgtccaacatgacatgagggatccaaaagaagatgattagtaggagattttttgtcataaaatatggccaaccaagagattgccttgcttgcttggattttgttcagaatccaaggaaccagaaatgtagccaaaattgggtgtttcaggttatgacattgattttatactcctaatctatagatataggaaatgttatgtttttctaaaaatattcgtattcataactaatttaactatgctttccaaagttcatgaccccacctttctctctc

SEQ ID NO: 115174 - DNA, 6041 bp, Cannabis sativa
  modified_base (3909)..(3917): a, c, t, g, unknown or other
taaatactaaattctagtgtttcaaactaaatagtatggtttttcaaatgttttaatttttctcataagaaaataaaccaataacagcatattattattattattattattaatcaatttttaatataaattcatttcatatagctttttatgtcagaatacagagaaccataatgaatgtcaataaggcacattttttaaatattctataatatcttttgttaagaatatattccacaaaataatttaaattttgcttataatgttcaaaataaaaatatatagaaaattttatggtgtgcctttgtacgtatttttgatttatagatagttcacttttatttttatttttttataaaagagtgtacattatagttatataaaatattttataaatttttgagaaataaattgtttaaattttactattgtaaattattttaaattttttaaaaatttacaaaatgtgttaaataataaaaaaaaatgaactgtcatataaaaaaaattaaaaatataaaagaggtatatcaacacaatttttaaaggatatcttatccaccctaaatatacccaaatatatatacatttatataataaaaaataaaattaaataagagatgtatatatttcaagtattattatttaacatataattagttaaaggattctttaatattatttattaaattaaaatatgaaattattatgaaaaagtggctaaagtaccctctaatcaatttctttcacaatttttttttttttttgaaaacatttctttcacaatctttgattaggtcatactcataatctgcaagtacgtcagaaaggacagtataccaatattatgtaaaaaaaaattatcacaaataaaataaataataataacaataaaaaataaataatattggaaaattttggtaaatggggtccacatattgcaatgttaatacacaatcttaggacattattaattaggaatttaggacccatttagagtggtaactttttttttttaatttatattaaaaattaattacattaaaaataaaatgttaggacccatcactttcattatcaataatattatctttccaaattgccttaccatgattctttctaaggtccatgacaaagaaaatgacctataatgctatatgaccaaaaaaaaaataaaaaaataataataaaaggacacttgtttgtcttatgctatgacaaacatgacaaacacaacttttttttttattattattattgtttttttaacaaagtataggaattaggaatgttcatcaaatcgtcaagaccgcatcacactgtaaaaaaaaaaatgcggtttaaatttttttacggtacggtcgcggtttgaatttttcttaaaccgtgcagtacggtgcagttttcaattgttaatatgcggttcaaaccgcaccgcatactataaaaataccaatttttatatttatttaggttcaatatgtgaaggcccaacctaagcccactaattattgtattgtgtaaacttgaaactttttttttttatatttattttcaagccttatggtatttttttgaaaaatcaaagcaatatatatagggaaaattagacctcatggtcattacaaaggatagaaacaggtatagaggaaggttccacaaaacctgtaatgttccgagcgaaagcccatcttgccatattatgggcagcaaaattacaacaccgcgaaataaaagaaaaattacatgataaaaagtttttagagagttgattacataaagagacataattatcaatattccataacgaatgtattcccttcagcgctttgataaccatttccaaatcactctccaccaagataaagttgtgacccctgattctagtcgaatcaagggcaaggcaagaagcagccgcttctcctatcaacgggtccatgaagccgagcatggagacaacagcccacagaacattccctgaatgatctctagccagggctgcaatgcacatagaatctccaccaaccctagcatcacagttgattttgatccagtcctcaggcggcgatgtccaagtagaaggagccaccggtaacatcggaggaaataagcaagccacataatctgtataacaatgagagatagagtcaattgtcgttaaaatgttatgcgattttgagttgtgtatcttgtcatttcgggctctctaaatagtgtccacaacgactgacgcatataggaataacttttcaaagtccacacccttagcttttatgttccaaagaaatttaacccaatcccaagcctgaccaccagagtcaatggtgttccccagggagaagacctccagagatggtaagcaaagttacagtagaggaacaggtgtttcattgattcctcggcctgcccacacaaggggcaggtcacatcttcaatttggattctcttgaccaagatcccacgtatcggcaaagcattcgaaaggatgccccaccataagattttatgtctttccagaattttggaattccaaagtctattccaaagtgctggagccaccacacaggctggggctctttccaaagctggaatcaaataagccgactttgtggtgaatttcctgtttccttctttggtccaaatccacttgtctctcccttgactcgaaggtctgccccctttcaggatatcattgatggtttcagtgttaaacagggactcgagcttagggatatcccactccccatcactcgttagaagatccgccacctgagtcaccctctcaggacaagaagtaatgggtttcgggtagaactctttcccgtgaacaacccacgggtccttccaaacgtatgtttcttccccatttgatataaccttacaagcccctttcctgagaatatctatcgatttaaccacatttttccagattcaagagtctgaatccttataggttgcttcaaacagaggtttgcttttcagatacttggctctcaacaccctgcagcacagggattgatcctcagtaaggagggcccaaccccacttagccagaagagctttgttgaattccatagatttccaaaaccccaagcctcctctagatttgggcaagcaaaggtggtcccaggccttcaggtataaccctctgtttctgttcacaaccccaccaaaagtccctaaccataccgtcaattttcgaagcaagcttcttagagagcttggtagtttgcatagtatacactggcagggccagccccatagatttaataagcgtggcccgacctgcttttgacaacatcttcatcttccaaccatgtaacttcgaaacaaggttatcaaggatgaaattaaaatccacatccttattcttcgatctaaagagcgggaggcccaagtaattaatgttcgtatccgccaagttcagcccagttcttgtaggattccccttttcatcccttcactggtgttattactgagaaaatagacgttttgagcttgttcacactttggccagaccaacaacaaaatttctcgaggcagttccaggaacctctcgcctcctcaagatttgctctacccacaaggataaggtcatcaacaaagaagagatgggataaaccagggtcgtctctactcaacctgatccctttgatatcgccatcagaaatagccttctctaaaatccgcgagagaatgtcagcaacccaaatgaagagatacggagataaggggtcaccctgcctcaagccacactccgagaccagactgctaatcttacccccattaaggtgaatgttgaatgacgtagtcgtaatacattggctaacccattttcgaaaggggtcgggggccttgtggtatttttgacaagtattgctcaagttttattgtatttgtgatagtttnnnnnnnnngtgatagtccaaactgcaaaaatcgcatcgaaccgcaccattttttgcggtgcggttttttagtttcacgatgcgggtgcggtttggaaaattaaaaaaactgcatgtgcgggttggtttgaaaaaatattcaaaaaccgcaccacccgcaccgcaaatactcctaataagaatagtgtttaatgtcgtaatgtggtctcatattggcattttttttcttacttaatgtagtgccatattattattaatataatttaataagaatcttataattaatttaataattattataaaaaattattatttattatttttaagatgaaatagcaattttattgaaatattagcattttgaatataagaaggaaattaactcatccctagcatcatactcaaaaatgctacgatcaggtagaaaacgagagtgtcttgcaacaacatgagcaactcgatttactgatcgtctaataaaataaagcttaacattatttaaataagagagtaaaatttgacaataatgaataatcaagcttaaaatagagttcattgcttgattactttgaatgtcttgcacagtgagcatgttatccgtctcaatctctacaaaattgatttgggtctttagaaaaatattttttagttcgtaattgtgtaaattgatttaggtcttcacaaacatattttttaaggcttttataatattaatgaataatatttttaaaatttattgaaaaaatatgtatgtttattaattttttttatttatttggctcctaagatgagtgaatcttagatgcagatttaattcacttaaattttgaatcgaccctgtatttaaagaaatgattatatgataaaggttatcgatagtagttagcattataataaaatattatatcgctatttatataatttaatattatatactacatattttgatttaataaagttaatgtaaaaaattattaattaattaaaaggttttagttatgtatttttgtaatttttttaatataaacatatatttttttcatgtttgatatcaatccttccttcattaccaataaataaacaaataaataaaataagtccttccttttaaaatttaaaattaaagtgcaaccactttgaaagaaatcacttattgaatcctcattataattgagcagctttacaccaatattgatactatcattttacttgagcatttatgaacttttatttgtttatttatttatatataatgtgggactacatacattatattattaactttaattagaagttctatactttattacattgaagatatatatatatatatcattttaagactctagtagaaactattgatctaccatatatatactagtagtggggtcaattaaattaaattcatgcatatgatttatctttttacataggaaaccctaggtttggattggacatttattattcatagaccaacttcgtttgtgtagttgagttttgttttgtagttcaatggaatatgttagcatttcttttataggagaagttatttgctatttattttgttttatcaatttcattgttagaagtcaacactcattgttagattaatgagatgaaatatgagttgagtaataacagtttagtactccttgtgttgcgagtgataatgaggctacatctattttgagttttaatttttcatgaaaattataagaaattgactaaggcaagaactcaaatttgtagagagagactattacaaaattgactttttccatcaatttataattgtcatttatattgttttctaacggttcataaaactattggttatgtgagagtcataaaaatgcagagctttatgaatgtgtaaaataacttagtggaacactccttttatagggaatgatgcctattaaaatattaataaaatgatacaaaggggtctcgggaggtcaccccgagatgaaaattgacacccctttaggttgggtctcgggggtgtcaccctcaagtgttagcttatattcccgaaggtggtcaacaaccgtgttgtgacagtcagtagtcccgtgattcgtaagggaaaatatcgggtaagttgtgcaatcccacatcgcgtggggaagg

SEQ ID NO: 115175 - DNA, 1035 bp, Cannabis sativa
ttattataaaatacgagcgttacaaatacaaactctacaagcaagtattattcatatcatatgtttatctttcctatcataattttagataacatgccagaatgagcttaatctaaagcttatgcatacaaaactattctttcaaacaataatgtcaacaaaaattaaggtcttaaggtgttaataaagctagagactaaaaatgggtctttgaatactgcaagcaccaaactttcttcatcaaacaataaaattcaacactttcttaaagttgatatcatgatggtaagtgaagagctaagtagtagaggcgttaataatgagtttttcaagagataaatttaaattaaagctgaggagctcagctatgtaaatcaaaaactatactaacaaatcaataaataacagaatctaaagaatcaaaatcagaagaaaagaaatagacaaaaagtaacccatacctgcgtccaccggagccaccacctgcgaaccagcagtaaccctcccgttcgtctctacgtcgccggcccccgcgtttgtcctgtagcagctcccggcgttctcccgcgtttctccctggtttttctaatttatgatttttttttttttttatgggtttgaaagtgaaaataagcaaggttttttcttctttttttttatcacttcaaattagttttttgtttttttacataaattcacataaaaattagcaatttaaattacatctaaaataactaacagaacaatacaaatgataaaaattaaaaaataatacagagtaattccccaattaataattacttataacttcttatttttatttttctaaatgagtagtaattatctaaaataataatattttgtaattataaccaataattttttttttttttatccaatacaaccaataattcacgtgtctctactatgagaattgaagagcggatatctcttcattatctttaattaaatggttatggttaggagtgttcattggactatattcaatatttttaggcctattcagatctgatc

SEQ ID NO: 115176 - DNA, 3999 bp, Cannabis sativa
cccacttgttaccgtgttttgaattggcgtcgattatgatctgatcctccatagcggtaaacgaacggtgtttaacctcaggagagagctgattataccatcgtagacgacaagatttacctgaccttccaagaattgtaccactaataatcctagtaaaagaaagggtgactatttaatcaaaaccatttaataataaaatgtgatggttcaataaaaatgtaaccattaaaaagtaaaaataaaattaaatttaacatattaatttttgttttttatattaattttttttaaacccacatcaaattttaaaatacagaaacacaactactttccattgatattttttacatgtgggacgaaataagatatcaatacaatatatattaggttgtaatattaattgaagattaaattgaaaacaatataatgattgagattaagattctgtttcaacaaaaaaaccaaaaaacaatttattaataggaaataaatcatattttaatatatatatatattttttaaacagacatttaaatttttaaaaacaaaaacataaccactcgatctcagatattttttcttcactctactctctgttacacttttttttttcttctaaataactctaatatgccttctgtaacatcatctcaatccaaccataacaatttcaagcaaatcactcgtgacaagtaagaatttcattacataataatcttgttcttatatatatatatatacaaatattgattagtatataatgatgattttcagggctgttaaatgaaattctaagattagacaccaaatcaaaatctacatgcaaacaaaaggtacgtataataatatatttcagtttttttattgaacattaatatattaattcatatttaagttttctaatgaaatatttaatttctattttcaatatatagatacttgtcactgatgatttcactctgaaaatattgtctcactcatataaagtgagtgagattaatgaagaaggcatatgtaagtaaacacagaatatatatatttatacatatatatatacatattaatcagaaattatatatatttatttatttttttttcagtgttggaacatctttataagagaagaagctcattcacatatttggatgcaatttacttcattcaaccaactcaaaaaaagtaacttttttttcttcttaaatgtaattattagactaatttattgttgagatatatgttattgataatattctatacactgaaattaatcccttagacatggatatttgggactttacagattaaaaaaaaatcccaaaaagccaaaatcagaattttaataagaggccattctaatttatatttttctaaggctatgtttaaggttagatttcgatattgaaagaaaaatgtagaaagcaaacaaagatttaatttttcatattcgatacaattttttttttatatatatatatatataattcttctcataccaaacatgagaaattaacttgttttcatttttttttttacatttttcttacctttttcataccaaaatttataacaagagttaaactcctatatttaatataatttgcagtgtcaacttgctcatatcagacatggatggaaatgaacctttatacaaaaagtaagttcatattacaagaaaatcatttctcatgaatcttaaaaattttattataatttatattatttcaatattgtattgaccttttttatcttattatttttttttctttttggtatgtagggcatttgtatttttcagttcacctattccaaaagaatatgtttcaagaatcatttccaaggataaacctgtcttatacagtcgaattggtgcaataagagaggttaaaaaaataaaataaaattatatttagtgtacaaaattttcttaccttttcaatattttttttttcaatgataattaatagatatttcatatggtgaaaatagatgaatttggagtacattcctatagatagccaggtatgccaatgttacaattccttttatagaatatgttttctatttgttttcatttatttcttactttgattaatttctcaaaagggttttgttaccaacaatgagaggtctttagaagaactttatggaggagatgatgataatgaaacaaatgaaaagatggcatgtttgaatgccatagctactcgaatcgccacagttttcgcttctttgagggtaattataagaatcatctgtctaaaatttcggtattacaattgctgtctaattataaattattatttttaacataaacatgacatgcacttaacataattgtatgattatattgtgtgcaacaattttttttttttaaatgtgtaggaatttccttgtgtgcgctaccgagctgcgaagtgtggtggtgatgtaactgaaacaacaaattttcgcgatttaataccaacaaaacttgctgatggtgtgttggattgtcttatgaaatataagaaaacaattcctgataaatttccacaaacagaaacatgtcaattgctaatccttgacagagctatagaccaggtgattttacatgtttaaatagttataataatttatgagcaattgatgaaaatgtcactttgtgaaaaaaaaagggaaaagaaattatcaaaacaaagaaaattttacataatgcttttaaactcatgttttttatttttcagattgctcctgtaatacatgaatggacatatgatgcaatgtgccatgatttactaaactttgaaggaaacaaatatgtgaaagaggttagttttgttagttgaaaattttactacttgaaaatttgtgatacacatattaaaggttaccatacaattacaatatgttaggtttctagtgaaaatgattgccctatagaggagaaagaagtctttttagacgatcatgatcctgtttggcttgaacttcgtcacgctcacattgcagaagtatgtattcagtgcttatacgaaactaaattattcaaaaaatttctgcagcataaaaatcatagtagaatttcgatcatgatttctaatttcgtaggttggtgaaaagttacatgaaaaaatgacaaatttcatatcaaagaacaaggcagcacaattccaacatagttcaaggtatgctcgtttgagaaagtacgcttcgatactatgttaaaatctatctttatgtattagattttatctcaaaatcaattgataataaccagaataaccaataatattcaagatacgtcttagactaaggcgagttaagcttgggcttaatgcccactcagttcaagaatctaaatagatttttttatttattcttataataagagcctaaaaatattatttttcgaaagacccaatacaagtttttctagttcatctaatttgtatgtttgtagtgaccatgaaaaattatctacattcgacttgcaaaatatggttcaagcattgccacaatataccaaagaaattgacaagctttcacttcatatagaggtaactatatcatgtatatttatgaccatatatatataacaaatattttagtgttcatttccttaaggtttcatttttttggttttttttatagattgcagggaaaattgacaaagggatcaaggaacttgggcttaaagagctaggaaagctagaacaaagtcttgtttttggagaagctggattgaatgaagtactaaaatatttgaccaagaaatatgtaagaaaaagaaaccaataaaaactatatggtcaaaaaaataatgttataaatcaaaaatcaaaccactaataattttaccaatactaatgtaggacactactggttttatgggttgcacaagggaaaacaagttgcgattattgatgattcttgcagccatttaccccgaaaaattcgagggcgataagggagtgaggttgatgaaggtttgtttattgggttaatttcacaaatgca

SEQ ID NO: 115177 - DNA, 709 bp, Cannabis sativa
tatatataaacatatatttatatagaaattaataatagatgtatagagatagaaatagataaataattatagactgagtcatggggttttttaggtatgcaataaattgggcccctacgctccatgatagtgtgacatctacatgatctagacgtagcaagggagccagccagcagtatcatacagcttcgtcagtgtaagaaaattaaaatgaaaaatatattttagtacagtagtctcatcagtatatatatatatttataggactgtagctatatatttatttctacctatctatataatgagagattggagacaagtataacgaattaacgttagcaaaatcacatataccacaaaagatatatactgatatttatgcacctaaaagtcatcatcataacaacaaaatctgcgctctcataattaattttcattcttaattatgtctgcaaaaaaagaaaaacaaattgagtgctcttatatctgcctaacttcatttgacttcaaatgatgtaatttaatattaaatttaattatgtttattatattacaccaattaatttagttttagccaatagttaaaagtcaaaatagaaatttaatgtggttttgatatttaaaattaggttaattagaatttttaaattttattttttgaactttaacatatatcaaattatgatccttgaacttttaatgtcgttaa

SEQ ID NO: 115178 - DNA, 3778 bp, Cannabis sativa
tcctatttttcaattcccttccatgccttcttcgtatctgatctccaatcacgtaattcttttgacatagatttggtgaagtaatccacaaacatatgattattagttggcaattcaaacttggtctgaaaaaaaaataccaaagtcatatatattgtattttttatataatgatttcgtttgatgtattattaaaaaatttagaatattaccgctattctatcccatatagtctgaatgagtgtagcctcaatgtggacattcttgtagtgaattaaatttatatagttcacaagttacttttatttctctcgaggataagttttggcagggattccacatacaaaatttgtcgtccctttcttattattctcactgctatttataggagtaagatagtaattattgaattttatttgattggtgattacaaaattgtaggtttttttatatttgctttgacttagtcaattaataaggcatgtatgttgtcgtcgagcagaaccattttcaactcttcttctcagaaagcttatttgaagaaccatagatcgagagcttccccaaagtgaaccttgttagccaaatcagcgttaaccatttctgacctaggcaagactcatgattatcatcttcctttccttcgagtaacatctcgagttcactactacgcacaaaaagtattgttcttgttggtcctcaaatcagttttttcgagaaccgtcactaataaaattaagtgagtgtttaaaatcgatgcatgtagttaagaatacccgtcggttttaaagggtcattagaaatcaatgtcgattttcaaccaatattgaattaaaaatgaaatgggacatttttggcattatagccttcggtttttaaccgtaggctaaaatatagctgacgactttgctttaactgatggctattctcctcttattatataaaacactttgattcaattcatttcaacctacatctctctctcacacacacacaactctgacgatccacgatcaccacctcctatctctccatcctcactctctcattcgagttgcgatccaccactaccacctcctctctcttcgcccttgctctctctcatcaaaacaacaatctagacgagccacctcctcctcaccgcccaccatgagccacaaccacctcctcctcgctatctcaatagactcgtgacccctcaaaaattataggttagagatagtgaacttcttcttttatttcattacaaattaaacacaaaccatttaataaattggttttctttggtaattatttcatttattcttataaattagtatatgaagaaaaattttaggtcaaggattgtcaatcagcattgtgcaaaagttgacaagtttgaaattgtaactatgttcaaatttcctttctttttgattttttatgtagggttttgtttgtttcccaataaaattagtgggaaaatgtaaactaattttcttttcatttgtatttgcgtctctcatttgttcacagtgtatgttttgaataataccatatattgttattttgttatgagatttggctcaaaatatagcaatagtaataaagtgtcttcaatgagataataggaattgttatatgaaaatattaaaaaagtatttttaacctagatttatatttaatgaactgcaaaaaaatataacaagaagaaggaaagaaaaataaatcaattaggttttagtttttttttaattgttaactatagacgaaagtgtaaaattgtcgacaatagtgataggtcgcggtttaaaactttcggtaattcttcttctattgttgacgattttgatgtgtttgtaaacctcattcccgactattttctaccaacgcttactctatccagttttgtgtcggtcgaataggcgtctgtcataaagactaacaaaaatacaacactcgactgttttaaactatcgaataattgtttttttagtagatgctgcatatgactcaagtaatatccctttaaataaattatgttcactactagaaaaaaagacctttctcttcaagttttatcctagtttatcttcggttttaaaaacacttactacggaagtcgtttaggcaaaaatgtaagttctaaaaataccaaagacgtaaagggggcctatgtctttggttattacaaaataattgaagacataggtagagcagaatctaaaaattgtgtggggaggaagacctatgtcttcgattattatgtaatcatcgaagacatagctcattttcttcttcggtgacgtatttttatttattaaattttgaatattatttttaattataattattacatgttaatttttgttagtgattatatattaattttttgaaataattataaattagttataattataaagatttaatttgaaatataattcattttaattatactatgacaaaaagttaaagtttacaaaatgcaatttaattatattataacaaagttaaagtactttataatatgttaactccttactaataaaaatacaaaataagcattgcctaaaattagaagtctaaaggtagctagtacaagtattgtgtcaatttcgctaaccacttatgttacaatggttgcaactccgtctccacattgtaagtttacttctttccaaattgtaaattagttattactcaatgaaataaaaattgattagaatgtttatttcttgttggagtaaaatttgaataagtgatcaatttacaaaattatccctatatatactttaacttttattcttatataaaaaaaaaaagatatttgagtcattttacttttattttatgtaacatttgtgatgtacatagcttctccaatgtaataaaaattctattacataatataatcacaataatattgttatctcattacattatttttaaaagaaaatcgaagattataatagtaattttgattctattacgatctctattacatgaaactaaacataatcttacatattatattaatatttctgtgttgttttattggtacacaatggtaaaaaaaattcatgagtatacatttaaataacatgacacatgatatacataattcttaagaagaatttgtatcacactatctttatttaaacgtaattgatgaaaataaaataaataattaacctacatgttttgatgggattacatccctctagcacgtctctacactagtatacgtattagctcaatctaaagtgcacaactttgttttaatttgttttataaataaacttgttcactaaattactaattgttcaataataataaattgcatcatatctccaattgttacaccaatttagtatagaatctacaccaatgtaaaatctttcttttatgtattttggtacaataacttcattgattcacacattaaatatctcacaaaataaatatattttacttaaaagatctcatattattatattaattacattaatagctcaaaataattaatttatgatataattatatcatactaaaaagatttttaaatcttaaaataatctaataaaataaaatatttattaaatcaattaaacattatacgttatatatataaaaagttatcaaaattctatatttgatcttaatatacgcaattatttttattatttttaaaataaataaataaggattatgcaaaaaaataaataaataaataaaatctcactaataatataaagattctcaaaataattcaagtctatatagtcaatattttaat

SEQ ID NO: 115179 - DNA, 1330 bp, Cannabis sativa
  modified_base (1272)..(1284): a, c, t, g, unknown or other
gttactattaagtaatgcttaattaattagctagcgtacgtaacattataataaattatactaccaagagtaattaagtaaaatacttataatataaatatgtatatatgtatctaccggttaaccatgtttatgaatgctgggcttcctggtaacacaacaacttctaatggccagccttaataatcaaaagcttctccaacaagaggaaattaggtaaagcttaatttctcacggacacaattagcaacatcatgctaaagatataggtccacaataaaaacacagtcctaagatagagctctgctggaatcctatgtttgctattaatctccacctaggaatcctcgtggagcaataacgttgtcaaacccaatataatgtcccaatctggctggctccaacagccaaaccatattcttcccaaggttagataaagtgtaggaattaattccatgaatctctccacccaaaaaaccgccttctccatgtcaactttatgccattgaccatccttttgaccattaattcctcaagttcagcagcaaatgttgagtaagaaatttacagcattttattattattgaagaatacttgtacaaagttagaacacttaagatacaaatgactcttaaggcactcttaaaattttacacacttttgaatttgttacccacactttggactctctatttgcttcaaattgcattttggtacacagcatacttctttttatgggtacaagtgatcggtatttttgaaactcattcaaggttttcttcgtactttctagaacattctagatcagtaatgactcttaatactccccctcattaccgaatccctttaaacttcttcttgtttgatgagttttaattgagatctctgaatatatattttgaaaacttgaccgtgcttacacttaaggtaaatatgtcagcaacttgatcatttccatatgttaattttagttacaacttgtatttaaatgctatgttttagtcataagtaaatttttatagtaagtcatatatttagtcacaaaaaaagtatattgtgattaaaaggttgtcataaaaaatgatctttttttgtagtggtattttaacatacctcattactcgttgaattgcttccaactgagatttctttggcttttgcatgtatgtgcttaatactctaatcgcataggaaatatctgggcaggtcaatgtaaagtagattaaaatataggctaattaggatttttgccccttaaactttgacatgtannnnnnnnnnnnncctgaacttttaagatcgttataaatgccccttgaactattgagat

SEQ ID NO: 115180 - DNA, 2413 bp, Cannabis sativa
cggtctagaacgccggtggagccttgattttattttatttatagtaaagtaatttgagctcagtgggatgttacaaatttatttttttaaaaaaagatgcactcaactactaattttgtttttaatatgaatgatcattcattttttttgcatatttattgtaaaacccactgtgtatttccaaacagctttgaatctttttaattaatgcatcaaaattagtattttgtaaaatatggcaaaatattggggtgttacaaagaagaagaagttgacattcaccactttcatcggtttcgaaggcaatagattcaaacgagctttcttctttctcgatcatttttaagacaaaagcatcccataaggcctttgaggaagaggagagagataaccatcatctttgatagatttgggtgttaatggtagacgaatatagaagaggagctgaggtatcgagtgcttgatggagctaacagagacgggaaagaatgaagagtacaccaaatccaacaaaatgggtttgggctttgtgcacgggtctctgctctctcccaccttctgaagttctataccctttctcgccatcattaatggatgataaatctagaagaggaagaaactatttttctttttcttgtttatgtgttgggattcgtttgtttcgatattgttagaaccatatcataacttttatgtgttaaatgagataaaaagttacgggtttaaaattattttagtattgttgtgattttttagtatttctttactggtttggagaagtataaggtttcttcatcttcttctttttattttattcaattgcttatttatttattaaaaaaatatttcttaagaattaaaaaaatatatattttttaaaaaaataaaaaatattatcatttgttattattaacataaatattaattgatttagattaataatatattgatatgtgtcagtactaattaaaaaaataaatatgtaagtgtataaatttaaaaatataaagtacttatgccgaaaataactcttaattttaactagcttaagtttcatttttgaactatgaatattttattaaaaataattcttatatattttagtctcaaatggcagaaaacaaagtaagagaaaaaagaaagaaaagcatagcaaaaggtagagccaaggaaagcttaaccaaaaatggctaactaaagaccttttattatatactatttgaaacagagtacaaatatattataacaaaaataacaaacaacactcaacacttaactaacaccaactaactaaaaaacaactaatagatgtgttagctaacgtcccccctcaaacgaaatggtgatgaagccatttgaagtttgccttttaagtaattaaatctatctgttgtcaatggtttagttaagatgtcaacaacttgatcaaaagaaggaacatagcgaactaagagttgtcttgctattattaggtctcgaacgaaatgaagatcaatttctatgtgtttacatcgtgcatgaaatactagattggctgcaagtgcagtagcactttgattatcaatccacatgataggtggttgagatagaggaactttaagttcagataaaagagatgtgatccattgaacttctgcagcagcattggcaagggccctgaattcattctttgtgcttgatctagcaacaacatgttgcttctttgctgaccaagacactaagttatctcccaaaaacatgagataaccacatgtggatcttctattgtcgatgcagctggcccaatctgcatcagtgtatccttgaagttgtagggtgtcacttggtttgagccataacccttctatgagagtgccttttagatatcgaagcaaccttttacaagcttcccactgtttaacagttggagcatgaagaaattggctaagtttgttggttatgtaagcaacatttggtcgagtcaaactcaaatactggaaggctccaatggtgcttctgtacagagtgatatcctcaaagggatcactgtcttgtaaactcatttttgttgcaggactagtagggttgggactgcttttggctccctccatgtgaacctttgtaagcaggtcagttatgtacttgctttggctaagatacatgccattgctatccctgtaaatttctactcccaaaaaatagtgtactggccctaaatctttcaaggaaaattcattgttaagacctgagatgaaatgatttataagagatagattgggacctgtaattaggatgtcatccacataaaataacaagtacaccaaattgtttctagagctattgtaacgccccaatttcccgagacgtcacactagctagtccgtttaaaaccatttataataaagacgataaaagacttctttaaataaaaaaa

SEQ ID NO: 115181 - DNA, 2704 bp, Cannabis sativa
  modified_base (2642)..(2648): a, c, t, g, unknown or other
ctgtaaactattaggcccaagcacactcgcgaagaaatgctaaatagcaccttaggatgcccaacactcgtaatagagtaaataaatatcgggtgttacatatttatattttatttaaatcaaattaacttgaattatgtaaaacccgctagttaattgcactcatagcaatataatagcgtaaggcagcatgtcacaccagtggtgttttttttcgggtaatatagttaaaaaatctctgttttctgctaaaactcaattataatatatatttacaaataaatggtataaaacaacaagaactgaaatccaacatacctgattgcacgagagccgttgagagagaagtctataatcacctacatgaagctcatataaaggaagttcatcagggcaaccctcaggcttggtccaattaaagtcaggcctcatagatttcttaagctcaccaaaatgatcttcatttctaaccaaaaaatacagaccttgaggcaaacctttcaccctatgaacaaataaagcagcatgcacctcagcatcccaagaaagagcccgaaacggcaatgccaatggcctcttttgcttctcttcatcattacccgaacccgaaggaagacaatgcagaagcatttgataaaatgtacttctctcaattacagtaactccatccatatcaactgcactccttcgttttctaactatttccctaacactaaactctttatacacaccttcactaatgactccactactctgaaatggatcaacaatgaatctactttctacatctacaggtttcttaactgcctcagctgatctatatataatgtcccaacaaatatgttctttactcaacaaattaggctttcccgtccaatccaacttggaaaattcagcaatggcagagctcaattcctcataattaacatcaaatccacaaaccccacttggaaaaacagctaaaacacaatcagggtgctcaaattcaatatgaggcaacttacctttaatgggtcgagaaggaatatgaaactcagggaaaatttcaagccccatgagtttcttcatatcctcatggcccaaaccatctagaaccttcacatcccaaccaatggcggccgcagccatcgacaccgcggcgatagcatgacccacgtcgtgattacagtaccggaaagctcgctcgccgtatttccaagcttcgcgccagaaaatcgaagacaacccaacgaggaaagtgttctcgggaaagaatctggggaaaaacccagatgggatttccgctctaatctccaaaccatgctctttcggagcgtaatgcgccacgaaacccgaaccagaacccgaaaccgagtcaataggagggcttacaatgtaagcttcggtagggtgtagattcccgctactggggttaactctaagcgaccaggtcgaaaacccagcagttttccaagcggagagagctaaagaatcgtagagaaactgggaaatagaagatttagaaatgggttttgaaggagggagagatagaaagagagatgagtaagaaggaggagcttcaatgttggggttttgatcttctgtggggtagtgtaggagagggagcagtggagcagattcgaatctccgaaatggattgggttggttagcccagtcgaggccgtgaggtcctcgggcgtatttagtgaaggaatgcttggtttggttatggtatttgaggatttgagagaggttttggtgttttgattcttgtattggatgggttgtggaagatgaatgtgatgatgagaaggacatggtgatggggaggttgaaggtgttggtggtgagattgatgagcagagatgaatgagtatggaaatggaaccgactagaggttgaaggaaacggtggcatcattcattcactattttcacttcaaatggaaaacaatttgaagtgtgcgtctcatatagggacacaattcacatctccaattagagtttgccacggtcaaaatatataagtttagaaataatttgtggtataaatatttaaatttaatttttagcgataataatatttaagttatgtttctagaatttttgtaaaattaaatttagctagcaactgagagttaaacttaagtatttataccacaaattactttaaatttaactatcaattataaataaattaattttttaacaataataataatatatagttattaagatattatcatgtactttaaatatcattaattaaactgactatctctaatcctaattacataacatactttatgatatatatatacagggttggttctaaaatttagtgggccataaaaaattttttattttggacctttatttagaaaaaagtagtattttttaaaattagtaaaaaaaaattgtataatttcgaaagagaaatatttttttaggcccctaaactaggtgggccctatgtacaggcctagcctacttatacccaagaccaggcctgtacatatataattatttttatatattaatggtaacactaggtaaataatgtttgattatgtgagttcatataaaataatttaacatctagtgtacattagaggagaagagccttgacacctctttattaagggtgcgtttggtaacactttnnnnnnnagttttttatttttaaaagtaaaaaagtgaaaatattttttaaaatcatgttctat

SEQ ID NO: 115182 - DNA, 2376 bp, Cannabis sativa
taatataaataaaaagtctcccacgaatttctcataaaccaagaattcggttatataggcacactttatatagaatagatgtaaatatatgtatttgtatctacgtcttataattatattaaattaattttatcattatatcaccatatatatatacatgctttaatttccttatctacgtcttataattaaattaaaatacatatactttaactaaaaaaaaccatatgtttaaaaattcaaccctaaatacctcgcgtggactgactttaattatatattaattgatttagtcatgaagagattttgaaccgacgtactgcttttttttttttttttttataataaatagaaagaaatcttaaatcataacgtatcctaaaagtttatatatttcaaataattcttcttcaaaaaacaaaaaaaaaaaaaaacgaaaaacaaagaatgaccattttaatttgtttattgatgaaaatgaaaagttaaaagaggtgatcatctcatttcgatagagagataattatataattaacttattatattctaatacagccaagctatgccagattgtttctgctgttcatttcaaatagccttaaatatttaaaaattatttttgtcttaaccaaaacaagtatgagcaacaactttgatcccaattgaacagctatgaaataaacaactatatgattcaaatcgtaaatatatatatttattactgaattaattttattaaaaacaaactgtttcattaatatgtaaattaattttatttaatttatataataaattaaattattaatatatcggcagtgtagattgattattttaagcttctttattaatctattaccgatcgataattattaccttcttaattaatctcaatctgtatatatatatgcatgattttttaaattacaatatatgtatactgaactttaaacaaaatcaaaacattattaacagaaaattaaaaaaaaaattgaaaggaataacactaaatcatgataatcatgacaatctctttttcatgaattcatgatcaatacaccatttgatgtaacgatgatctttctccaactgttctggaatgcatgaatttaggagcttgagcttgatgatcacgatgactactactcatcgatggctttttattataattaataacctttggatattgaatcaactttgaccaaaaccctctcttctcatcatcatgatgatcgtgagtagtagcaacattactactacgtacctctttatttcttgaaacaaaagccaacgatctgctcttcttaagcacgtaattattatttttagtagtactacaattttgcatgggagatgagcattgtgagtcttcatcatcatcatcatcgtcatcctcggaggagtaatacgacgacaaagaagatgtcgttgaagaggcagagccaaagccggtggtggtggatgttctacgagatgatgaggtggggttcatatggtttatctgggacagtttttcacttaagcaaagtgagcaaacgcccggtgactgttggtgtttcgggtgcttcttgcaccgcccatctacggtggtcttactcctccgccctctgaggttgcccaaaatggcgtctttagatcttcttaatatgttctccattaactattagttatatttagggagagagttgtatattgttttgtttagttcttctttttttttttttttgcatcagtattgagggtttggttgagaataatattatatatagagagaaagtagaaaggaaattaaagagagagagagttcatttccaggatagttcgatgtgagcttctttgggttttctttattatgataatattaaactgtgtcccttttgacgggttgtatgtgtgtgtggctttgaaaaaggaaaaaaaaaagggttagttggatttgaatttggaattcctttgatcaaaaaatgcgtgtgtgtacggttgagaacgtgagatggaagtggggcccgctttggggttttaagtcggtggctctgatcgatcgctttgcctccttggaaatttaagctctctaattctcttatctctcttaaaattccatctttgggcggcgtggaaaatcttagtattaagtttaacactttcttcttttttttctttaaatacaatctctcttttgagataaacctttttaaaaaatcaaaaaaagaaagatacaaaattctatataatctaaaacatactaataattattaaataattaaatatatatttaattgatgataatgcaatactattaattaagttttctaattaggatttttgcctcctaaattttcacatgtaccaaattatgcccctaaacttttaaggtcgtta

SEQ ID NO: 115183 - DNA, 4980 bp, Cannabis sativa
cttaaatacaacaatctcaatagtgcagaagacatttttaacgaccttaaaagttcaagggacatgatttgatatatgtcaaaattcaggaggtaaaaattctaattaatctatattttataaattgtttgaggttttaatttcactttttatatggtgatatgtgtagagattaatattatatgtttaaaatatattaaaatttgaaaaaaaaaatagaattattataaagaaattgatgtataggataatgtaaaagttaaaaaaaaaaaaaataaaaaattatagtggtatattttgaaaaatagtttagaaaaactaattaagagttctcttatttcttccttaaatatacattctaggaatattcgcgttcatcgttaacttaactaagattgtacattagctaatattaattcaaaatacaagtatttgtagaatagtagaaaagaagaaaaaaaggtatatatatcacacattttactcaaatgttgtgaagagtggtttatgaaagtgtgaggcctgaagagaaggcaattccagccatattgagtcccttcattttgcaatcaggaagtgggacccacttccactctttactcctaatgtcgtaacatatccaaattatgtcccacaatccctcacagttagacatcaaaacaccctttattataccatttttaccctccaaacaccctgtcataaccccgtaaggctttgtaatcttctgcatcacagtgcacggtaactccgatataaactcccactcattcccctctaatcccagcccccacatctctaccccactcaacatcctaactccacttcccgagtttgctccgtcggatttcacgatcatcatcaacccatcgccgtacacgtgtagccgatcgatacggtttccccagctgaatccaaccgtcaattgtctgttctcgttccgcctgccatcgaatctcggccgtaggattattggcgtgtttgtgtcgagtttgatcgcaattattatgctctcacttgcacggttaattagagttagaaaaataaaattaccttctctttcatcaacacgtggcataataccgacatcctgttgtgcctccattgaccgccacttgtcaatctctgattcgtacacaaagacgatcactcgttgttcgaccaattccgcgaaaaagaaccggaaatgatccgacccgattggaccgggaaccagtttcatggcggatctccgccaggaacaggtgccacgtcggcctaaaggacttggaggtatcttcttaacggtattcgtaactaaattaacggtaataacagactgaagagtgttggaggcaaagaggaacagatttccacttgccgtcaagaaaaagagatcctccccgggaaaaatcgctggcttcaacacgtcggagatggagaaccggaaccagcggtcggcttgatcggcaaagccgtcgagcacggaatcgcaacggcgtcgtttcttgaagagaaagagccacgtggatgaaccccaacgcgaattgaactggcgaacgaaatcgtgattagagatgatcgcggctatgtttttggtcaccaatttaaaacggatgatctccggtatggcaaaaccgatgagaattctctctatgagttctgaggggagaaggcaaaatccgatgtcgtttgttgatggggttttgaagtttcccattggggggttttggggttaggagagagtatttggtttttcatttcgtaatttgggtttagtgtgtgtatatatataagttgttttgtttggttttcttttggtgcaagtttatcttgtattttttattattcatagtgtcatgattgagtttttcttaataaattaaaaataatggggattataatattaaggcatgctaagttcaagttaatgatacacaattagaagacaaaacgctccaataaagaatcttttatgttcaatcgtcatgcttggcgaaatgggcggtgcaatttgtggagagaaatcagttgactctcttttacttcttttttctctcttaacttttgagtccatatagtgttgaatcgaattttaattgtctacacatatatttttcgattatgaacaaaaacttttatttttatagttttgatttgtctcgacttgaaactgttttaatatatatgtttaaagtaagctgagcttgtttttgttggtaaagattgagatttcccatgagattccttgcttttcagatttgtgctttaagcttttttggatgttttcttcacaagatttccatgctcttcttttattttatttaggttgatccaattggtgaagggtgaaccatgccattcattgctgagtttagtcaacttatctaccaaaaataataatttgagagtagaagaaacacatctttagctacactatttagtgcacacgaaagataaatagatcataactaaattatgtttatgactttatacaattagcaagtttaatttgacttctacgtataaattatgtttcactactccttgcacgtggcatttatttagtggctgaatatcataatccatttcattaatgagactgatgttgcggattatgagattaaaaatcagattacaaattaaaataaaataacacataagaaaccagaagacaaaataatgttaaagaataatgtcttacaaagaaaaattgaggaaattaaaggaccaatacgaatgaagaataaactgggaaaattaaaaataaacaaaaccaaaatttaatgcacaatcatggcattaacatatacctaataaataaaaacacggagttaaataataagttatttagaaagtataattcacgatgcttaccttcatgagaaacaaatgagtcactaaagtggaggctattttttaggtcattttttggctgatttggtttggattgttgttgttttaatgaattaaactattttggttgagacaaaaacaagtgaagtggttgatttaatatacgcattataggagctttaactcaaattaaattcaacttagtaattaattgggcttgcaatccaagattagtgctttacccacgtatgtgaagtaaaattgggaaatttttaagcatgtaggcttcaaatgacaacagccaacaattgcacacctacctcaggctcaacccataatgaaaaaggtgaaaaaatggcacgattgggaaagaccgtcatgaaacttcaatcaactctcttaataaaaattacaagttccaaaatcaatcctacaaaatacatctaactcaggtgaacaataataattaggactaacaacagatattactttgatggtctccccaaattattgaaaattctaattttgtaccttaaacttatcaattctcactttcaccattcagctactaaaattgcttaaaatttaacatggacgaaaatgaaactaattttagagaatggcactaagctaaaattatgtagaggacaggaagcgaaacccattatattgtttgctaatttctatgaataagaagtatggtcaagaatgatgtgataggtattcaagaggatcaaagttttgggcgttgactagtaaacaggaacaatagatcaacaaagagtgcttacattaaccccagaattatttcaatcccatggttgaataatagcatgatctatggtgcgaaagcaatacctattaccatggttggataatagataatggctgaacctttgaggccctcacagttttacttgacaagtccataatggataattcctgtccctctgaggccctcacagttttgtgattattagattttgtatttatagtaatacatgtttgactttaggaagaaaaaaaaaagtaaatttttttgagaaaatatgtaatacacccaccattttaaagagatgttttgataaattttatatctgtttcgatatttagaaaaaaatatattaatttaaaattaaacataattagagacactgatcaatgatatgctacgatgccaaagtctcatctcattaattcaggagagttgacactgatctaagcacaactaccaacttataagaaaaaaatatcaaggaagacataggggatggggtgacaaagtgcctgcttgcttgaatacatttgggtgcacttgatcttggtacgaaaaacatgctaatgtcaagaaagagtaaaccaagtgcagaggactggtatctgcatcacaagttgtccacaaactccctgagaaaaatgccatgacagtctgcttatagtcatatgctggattaattgaaggaatttcacttttcacatctctatacagcaataataaatcatagataagtacccccacctaccaatatttatcctggacaaggacaactactgtgtcttggatgtccattgtttcatggaaaagattacatgtaaccagtgaaatcaaatgttgttaagcagctccaagtgtttctacatttcaaactatccctcttgggtaactgggactaccaaatcatgttttccacaagtgttttcaaatgtcaaaaacaaaatttcgaagctttaattttaaaagttttcttacacccagcatccttgatattggaagcagaaggatgaaaataatctcgttcttctacataaattcagctaacctacgtatgtgtagtgtcatatagaatcatcaaaacataggaaatgtatcccattttatttcaaggtaagaagacaagcagtaagagaaacaaaaaacacaaataacaagctagattaaattgagaaagtacaaatagctgatgtctacatacttcttagttccaagtaaagacctagcttgcctaagcggaagacagatacacaactaactattacttcgcaggagtcatggtaaagcagcagagatgctcttctctaagtttcagtttcaatctctctgtttttttttttttttttggggggggggccaaagtaattttcaaa

SEQ ID NO: 115184 - DNA, 1960 bp, Cannabis sativa
tatagcaattaatttactcatctaccacactactattaatttaattagcaaatcaattataaactcaccaaaaatatatccccatttagtatttacaccaacatatcacagccaactttcatcgaatgtgatatatttatagaaatttaaaaccaataattggacgtataactataagaattttgtatttaatttgacacatattaaatcatttgaaatcaatgaaattaaggagagagagtgagtttaatgggttaccttttccctgtacatactcctgagcctcccagcttcctcatccattggctggtcaagcttctgatccaaaacccacatactgcctctagtatctgtttcttgatcatcctcaactcttgaagccatcctaatttgtatgcttattgacttttgaagcttcgataaggcaaaagaagttcccctcagtttctttacagtagcttttcttatcagttactcactccacaaactaaaccaaatctcagaaatcctcgaaatctatcaatacaattaaatatatatatagatacacgcaaatctagatcttcaaattcatacttcacttgaaatccatgttcagtacaaaccacaataaaactctcggaaaaggttgacaacaacaaaaaaaaaaaaatattatctctctaaccacaaagagggcaattgaaatttaacctctaaataagaagaaagaagaagcagaactccaagcataaaggaacccaggaagaaagactgaaaattgaactgaaactagtagttgataagtcaatcttgtcccaaacaaaaacgaaaaacccatacaccaaaatttgagcaccaagagacccacttatggatataacagctcaagaacacctcacacatccaacaataatgggtaaagagacaaagagttcgtattgattaatttgcttctcaaagaaaacaaaacagaataggaaaagaaattgaattctggcaagtggggtcaaccaagtgatgttaatagcctcagtatcagccacgatatcaataaaaccagcaaaatctcatacacccatctctgcccaaataaaacggctgaaaatcaacccaaaaagaagaaaagaaaggaaaaaaaatgagagagagaaaaatgccaacacagtgtaagtcggcttctcagagcaaaaatgagtgaaagagagctgagtatgttattttggctgctattaaccgaaaagagacacagcttttcctcagctgagcttttaaagagttgagaatgagattataagatatacgtaagaaagagaaacacagacaaaattacgagggaattttagagagagaaagtaaggaaagatggttgaacccgcaagttattattttatttatttcttattgttattatatatatatttggaagatattattattattatatttttagtacacgtttgtcagattggcagatctctccaagagagggaaaagaaataattatcttagaataatatttattaatttatatcttcttatttaaatatttataatggcggtgtctgcagtggggagattagttattagtaattttttctttaaattttgacatatattaaatcatgctttttaaatatattttgtcgttaaaaatttttctgaaactattgagattgttagatttaagaacttctgtctcattttattcaattttactgtttgagtgattatgtactaaaccatgctccccaaactttaatatctacaaaatcatgcccctcaaattttgatatatactaaattatgcccttaaattttttagaatcttttttactaaaattagataaagaaatctttaaatctaataatgttaatagttttaaaggaatttttaatggagaaaaaaattcaggaacatgatttaatatatatcaaaattaaaagaaaaaaattgctaaactacacgtatgtttctaca

SEQ ID NO: 115185 - DNA, 1420 bp, Cannabis sativa
  modified_base (1324)..(1324): a, c, t, g, unknown or other
  modified_base (1370)..(1373): a, c, t, g, unknown or other
cgatgggacaaggcggtgggcagccactgtcgtcgactagaaaatcaggtgtagcatcgtccaggtcccaagcctcatgggaggcgcgtgcaatgaacgattgaacaaagtcaataccaaaaaatccaagcaagtatataaatgatgcgatgagagagacaatggcggcaatttccgagagcgtaacgacatgaagaggcgtagagtttcggatcttgtcacgccaccggtggaggagataataggcgacggagaagaaaagcgtgaagaagacagcgttggtcaagtacagaggaagagggagagcgtcggaagctttaggagagcggtgaatctggtcttcatcggttaccggagaagcctgtttccggtgaaggacttctccagaggacgtaagaagaggcttcgaaggccgccggcggctgtccatggcggagcaccggcggaagaaggagatgtttgttaggtgagatcagaaggggttttgggttgttagatgggagcgaagatttaggagagtaattaagggggtaatataatggaatggaggaaggaagaagagaagagcactcctattaggcatcatagtcccaacacgatctgaatgtgtactttcgttacttaccaattttttatattatttattaaattaaattatacaatatttgatgtcaatttgtctcaataataatatgtcatttctaagcacgtatttttttaatatttggagtaatttacgaataaaaatatttaaattttactcctaattttaaataaataactaagtttaatttttagaagtaataatactcaaattatatttttttatatttttggaaacctgtaggtacataaccgttaaagattaaatcattatccatgtgttatttttttattagtatatttaaattaatatttaaaaaaaaattaatgacttaaactaatcaaaaaatttcacgtattaatttacttaacacttaacagttaggtaactacaaaagttctagaattataacttagatatcatcaccgctcataataaaacttaagtatttatttgcaactgcgagttaaacttagatatttatgccgcaaattactttaatatttttgaagagagttatactattagagtatttttagaattaagaatgtgtggaaaaaaataaaataaaatattatatttttagatgatatgaagatttttaatacctttaaattataagagatattcttagaagtaaaagtatcaaaaataatataaaagattttattattaaataatgtaatagagaaataaaataatgttggaatttattttacnaggatcttagatctactcacgagtatgtttattaacaccctaaatnnnnactttctaaaacgatgaaataagcacatataaagtttaggaaacctt

SEQ ID NO: 115186 - DNA, 1258 bp, Cannabis sativa
gatttataaatatatatatttgggtgtgcttttgaaatattgtttaaattattcgatgcatgaattatatatgttccttacataatacgaaatatatatggtccaacaattctttcattgtttatttttggtgatatagtttaaaaccatagttattctatagtcgatggagtgttcccaaagtgattttgtaggcattataaatagtagtggtagtctttagataaattcaaacacattaattcttaaggtatgggaggatccacattacaaccacttaatatttttttttttgtttgtttttagagggaagatgacctaaatggctgagcccataccaatcagtccctgaagacggcgggacacgtgtcaagatataattcgataactgctgaacctgaattttatcattaattagtttctcccactactactgctgctgagttttcctattttaacgcctaaatatataacttaattattatatgcaccacgtagcctttttctatattcttaccaaaattaatttatatatttgcattacaatagtttgacctattcaattacaatatataaacaaaaataaattatacaatatacctacattttaaatttatttatttgtttgtttttttttttggaggagactactccttaaaattattggcactgcctttcaatgttatcccaaagaaaaaggaaagtttttgtctctggttaactgagagaattaatttatggtggttggtctagctggtcgaccatatattaaataaaaagaaaatcattgtactagttataacctagcacatggcttggtttggaaccacaattaattataattcattattaatttgttagttaaccaattattaatgttatataatattacatatgttcttgaccatgatttgccgtaaggaaagtgtttttggagagagttaggttaacataacaacttctttttaagggtttcaggtttcaaaactatatctaacttctgttctattctatagatttattttctgtcttaattagtaagtaataaattatatttaagcaaacacttccactatatattaatatatattcataaatttatatcgagcaggaatccctaccacttatagtgtcttataattaattaattaatagttcttataatttttattaaattaaaataattgtgattcaatatttaccaattatgatattacactttgggctcgtttggtacgccgtattaggtcgtattgta

SEQ ID NO: 115187 - DNA, 3027 bp, Cannabis sativa
gctaaaagcgaagtcaacaaataataataaatttttaaaattaaatacaaaatagtaaaattattaaatgcatattctataatatgatacttaatgacataattaattaaaaaaaaatcatgctaaagaagacaattaatttttatggaattaatctagcatttaaatcatataaaatcttaattaattgtaccaataataaatttataaaaataatacaaaatagtacaactattatatgataataaattaaatgtgaaatcccatatttcataattaatggcagatatttttcgaaaatgaacaatttagacaataagttactgaataaatatataattgcataaatttaaatattaaacattaacacaattaattaaagttacatgcctaaataaatcatgtaattaattaccaaattaaagatttttaattttagtttataactaaataatataaaaataacaaatacatgttaaattaaactggaaaaatttaattaaatgtaatttatagactaaattaactaaaataaaaaataattgagattccaaaataaatgaaaatttataaaaattttcgaattttcctttttttctttttaaatctttttcatgcataaaattgatctaaaatattgtatgaatgttgtaatgcatatgagattcgtaataaatactgaaaaatgaaaacataaaaattttgcatgcaacgaagaaaaaatttcatgcgtatatatactcgtatataatttttatattgcataaaaatataataaatatataaagtagaacattctactaaatattatacaataagatcattaaatgaataagtattatatataaatatatatgggtgaaaatatagttatatatacatgtatatatgtatacgatactaataagaatatgtatatatatgaaaagaattattattgcatttaaaatattaatgttgaatgaatataataatatcaacaacaatatgaatcaaaaagattaaaataaaaaatatttcttttcattggccatgaacgactatgaaatacatatataaatatgtatacacacaaaaataccaaaactcaaaataatcaagatagatataaaattgttctgataccaacttttagtatttatatgaatgatatgaagtatgtggatgtgtatatgaaatatggaattaatcgaatatatacacaagataactaaagaatcgaaatacatccaaccaatcttctttctaactttgctctactagggcatgaacctttagctttgtgctgtttacaatggtgggttgtggacgctcgaagaataacatagggatcgaggaaaaactcaactaagaaatcaaaagctaagaagaatggccccacttcttcggatagggtggtcaaaaccaggccgatggatgatattttaggggtgaaggaatttgagattccaaagaccttataagctgagaagcactggttcgacaatgtctactcacctaaggaaacagagacgatcttcaatcgacaagcagaggtccgacaagatttctcagactagctgagtgtggcgaatcaaactatgcaggatatcaatgttaggaagcagaccattcccttaatactgagatctaatgtgatacaaaatttggaaagaagctttaatggcacgaaaatagagtatcaacatgagtattcaatggttgttgagaaacaaaacacgactcagagatctaaagtgaaaatccatctcgagaacatagcagatgaggcaagttattggaatccatctattgtatgtcgtgtgattggggctaatctccctatcaatataattaatggattttctaagagaatttaaaaagatttagtaatgaaggtgagaatgctcaatcgagggatattcataattcagcttcagaatctagaccagagagacaaagcattaaatggtggctatgttagtggtcatgaaactatagaacccgaatgaagatttcacaaaggaggagattactaaggttcccatttggattcaattgaaaggccttgtcattaaatattagggagaaacatccttgttcaagattgtatgtcaaatcagagaacctctccaagtggatactgtcaccaaaaatagggataagctctcatatccctaaatcctcgtagaggttagtttagcactatcttttcctgatatagcttcattcatggatgtatttgatcatgatgtagacttggaggtaaaatatgaatggatccccttagtgtgctatagttttttaggaatcaggcatgacacaaaacgatgcaagaataaggaaacaaaaaaggcaaagaaagtctggcttcctaagcagatagagggaaaaccgtctatagacaaagatggtttttagctgggtttgaaggaaaaaaagggtcctggaatcaattctagttgcaacaaaattaaagaacaattttgaggccttagttaatgaacatgaaatggggaagaagaagattcaggaatgggggagtttgtaacagatgcaagaatggataataagagaggggggatccctctacttctaatggataggatttatgttggaatgtgagagggattaatagccaacaaaaacatcaagaaatcaagcaattgatttattcgaagagagttggattggttagtctcttagaaacaaaggtgaagaataaaaatatgggaagcatgtatactagcctattatctggatggtgttttaaaaatagtaatcattggacaaataaaggtcgaataatagttacgtggtagcctagtatttacttcatgggctcgttcggtacgcatgactaaatcgaattagacatgctaatttgttcaattcagtgtttagacatgttagaagtctggagaactaatccagctaatgtcatatgtttgggattatttatcccatctagcagggtgggataaataatcccacgcatgtgagattttttttttatcatttttttaattttaattttattaatatatt

SEQ ID NO: 115188 - DNA, 3245 bp, Cannabis sativa
  modified_base (3182)..(3208): a, c, t, g, unknown or other
gaggatgcttttctgtccattgatctgtggacccacgttaggtctggattgatcacacaagccattactaatactgacttaacatttttttaatgtaacattttggtccccataaaaattagtacaagtggtcataagtatagtctactggtttcacaattttcctcacaaaaaggaggcctaagttcaaatcccccctcccaatgtcaaaaaataaaaaaaaaataaaacaccttgatttgtcctcaaatcaccatttgacatttggttcaaattgataaaaaatccactcaatgactcttagtctcattttaaatgaaattaataataacctagtgagagagagaggaaccctgtgtacgtataaaagtaataagagaagaacctagaagtatctccttcaaatagatagatgagtaatgttagcattctcgtttattatgtggattatgcttttgtttttgtatcttctttgtcttgaaggaaagccaggcaaatgatatcccaaatgtgttgaaactggcttattttgatggtttttaatgtcatttgtgacataaaccgacatctggtgtcttacaccgcatgtcgtgccaaccaaagtatggtgttttcatcgtaatctactacatgggacgtcggatcccaacttatgtgtgaacgtctgtaggttgttggtgaaaaaatgacgtgtgagattaggttggttgcatgcctaatctcaaggagaagaaaggtgaatggattatatttactatggaaaaattctcttattacccctttaaacaaggtctcattggagagtcattgatttgtcatataattgcatccacgatttccagtgtagtgtgtatagatatatagattatataaatatatattatatgaattatttatattattaatgttactgtaaacaggtaaaagtagggggttcggtacaaaacaagggttggaccattgaaaaggtggatcataatgatacttctgtagctgaggaattaagaataagaggtttcagaatcaaaagaatccaacagctcgaaacagttggcttgccaaattcatcttgaatccttaattcaagtttttctattctcattcattttcattttgtaacctcatgtttttttttctttctcaagagctaatcaagctgccgtgagatgattctatttatttaaagataaatgacaataataagtactgagtttgttacatatatgcattttttcctataaagctattgtacttctccaagttttaagaattctgtccaatttttccaagtcctagttgtatttacataaaaaacaataatataatctttggaaaagatgattttcgtttcgatatagttgaggaacaaaaatatctctaaactaaacctctctatagtatgaagttgtggtccttgacttcgatccacgtgactctcgtaacttctagaacaatctatgtatgtacgttatttggtcggtttcatttacgttcacataaatatataaaaataataatgtaactcttttttctattattatcatatattaaattttgtcacatacatgacttggcagcgttcttcatactcttatcttatattccactatttcctttggtgatagttcaatgaaagaataagtctgattatatatagggtccccccacgagtagtactattgcctaaccacgaagcttcttcccaagttctcaatctcaggccatttatttatatataatatatggctacgtcaacaatcgagaaccatacaaatttctctatgggtattttttttcttccctaagtctacgtctataaatagtcagctataccactatttctgtttagcacaactaaaagatttggtcaatacatacatatcgtgaatagtttttaaatcatctttagaaaaagctcgaagttatagtaagttgtagtgctatatagtaattagtaattacaaacttttctttccttttattttgctatataacatattttccaacatttcatcgatatatagttcttgctatatatatatatatatatagaatgtctcccttaagcacctacgacttaaagaggatcttccaaaagcttgacaagaatggcgatgacctagttagccttgaggaattgagttggcttctggagaggattaataatggtagtgttcatcatcagtttagcaagacagaacttgagtccttggttggaaaatcaagcctcaactttgatgagttcttgttcttctacgaatccatatcatcaaaacataatgatgaaattgatgatgaggttgaagagatcattattagtgaccttgttaaggcgttcaaggtgtttgatcaaaacgacgacggattcatctcttgtgaagagcttcaaagcgtactaataagattaggtttgatggaagaaaacagtactgacaaagattgcaagactatgattaatgccttcgacgccaattccgacggccagcttgattttgaagagttcaaaaccatgatgttgcttaccattacttcttaatcagcatgcccatatatatatttagctatatattctagtttcttttataatatatatatatatatatatatatatataagtgactatatatatgcatatggtcaatatagagagtctacgtacagaccacatacacatattatatgatcaactggtccaaattaatcatcggcattattattaattagtttttttttttttttgatattatatacatcagattattagtaactactatatgtatatactaattaattaaataaatgcatgcagtcattgttcaattatttttgtgtgactgtgtatctagatcacttgtattgaagtttacatcaccaatatctatctatatgttctaataactggattagtgctatatgtgactgaaatttatcaaaaaaaaaaaaaaagtactacctaaaaatattttttttttttatgtttgctatcaagctagtactttctatcaaataaaaatttacaaaccaaaaattttgaattctgaaaacaatttataattttttttagatactatagtccatagggcataaacaagcttgattagttataatttttgtataattcgtactatatatcatgtattatatcactacaaaaaataactacttttagtgacaattttttnnnnnnnnnnnnnnnnnnnnnnnnnnnaatgtgatttttagtcacaataaaatattacttgtga

SEQ ID NO: 115189 - DNA, 3214 bp, Cannabis sativa
  modified_base (2269)..(2300): a, c, t, g, unknown or other
actcattttaatcccatacattttcactattgaaccaatgaaaactaaaaaaaaaaaattctatatatatatatatatattattaagtaattgtttatatatttttataggaacaaattgttcgtatgctgaggatcacagaaaatgatggtaaagatttgagagagtttcacaaagtgtgtccacaagctaaggagattggatttggtaggctctttcgttctccatctctctttgaagatgttatcaagtccatccttctctgcaattgcacgtacgtgttacatttttccttattagttacaataatgatagcaaaggactaaggcattgtatataattatcgatcattaataatgaataatgatgatgtataattttgttgtgcatagatggggaaggacactcaaaatggctgaagctctatgtgaacttcaatttgacataacacaaaataatcttggaagaagaggtgtaaagaggaaattgatgtttcccaaagaaagagaagatggtagtgtagtgaaaatgttggggaattttccaaatgcacgagaaataggtgaccttgatgagagttatttcatgaaaagaatgagtcctctgcttggatacagagccaaacatatttataaaatggctaaggacattcataatagtggaacacttagtattgttatgagagaattggaagaagcttctgagaagaggttggtacgagaggacatgatcatgaacaagatcaagggttttggtccctttgcatctgccaatattttgatgtgtctcagttactatcaaaaaattccagttgactccgaaaccatcaggcatttacaacaggtttatatatacagacatcataattcaatatattttagtgttattttagaaatttttaatagtttacagtattaaaaataaaattcaaacaagaaaaaaagttatattagttggtgttgcatgtgcaggtacatggaaggaaaaaatgcaacaagaaaacaattggaaaagaggtcaaagaaacttatgacaagtatgcaccattccagtgcttggcatattggtatgtaaagttatatttatctttatctattgtattaatttcttttttaaatgtttatatatttaaatatccttaataatattattcaatatattgacaggatggaaatgttggaattctacgaaaacaaagtcggaaagttgagtcaattgccacagtctagttatcatatcattagtggtagcatgctttgaatgactagtcgacaatttttttaatagaaatatttataataatggaaataaattggggtatatctattttatataaagtttggttatataacttattttttagtttaagatgtttttgtatttctatgttaactttaacagaatatcctattaattaatagaatattctttttataatatgttaactttgaatataatataaattaaactcttaaaatcctaactcaattctatcactcccctaaaataaaaaacttctctcacttaagtcacacattctttcactttttttttgacgtttgttcatcttttacttttcgtcatttcttctttcaattttaaataagattatgttaaaaaaaaattaagaaaaaaaaatcccaatttaagtttatatctagtatctgcttgagaaaatggtcgtcgtctttgtgagaggataaagttgtttttctttcaacaattcattttataaatataaacacagatatacaatttttggactttggggtcactctattaaagaaaattttgatacatacatacaatagatttatattttagagagttgggaggtgttctttcttaatatatttgggctttggggtcataacttgtgtagattccaaccattaaatttttgatgaagatggaaactatggtatgtcgataatcccgctgaactatcaaagatgcaagttggttagctagtgatgcaagttggttagttagttaggttttgttagttagttagtatgagctgtcaatgagttgtaattgttgttagttgtgttagttacgattgtaactaactctagttgttgtataaaagcttctacttgtattgttttaattagaatgaataaaattccttttgttgtcattacttctttctcttcttctctctatttttctctgtgttttctctaatggtgttcaagctgaaatggtatcagagccaccattaaagtgtggtattgattgattatcttcttcttcttcttcttcnnnnnnnnnnnnnnnnnnnnnnnnnnnnnnnncttcttcttcttcttcttccttcatctgtttggttgttcagggcgcaaggaggaagagtttaaactcgaagtactcgagatgatagtgactcaaatcaattttctgtccttggtgagaattcaaaattgacaaatgcaaatgatctctcaaatccttacttcctttcgaacagtgacaatcgtggagctgtcctagttccaaagattctcacaggaagtgagaattacagcacatggaggagatcaatgatgattgcattggttgctcgaaacaagatcaagtttgtaaatggaaagctaccacaacctaatgaagatcaagaggagtatgatgcttggtgtagatgtaataacacagttatctcctggattattcatgcgatatcagatgaaattgcagacagcatcatgtaccatgacaatgctgctgaaatttgagaagagttgcatgatcgattcaatgaaagaaatactccaaggatttttgaggccaagaagactatgcagaacttgacacaaggatctaatactgtcacaacttacttcacacgcctcaaatctctttgggataagattagagaatatagaccacaacatgtttgtagttgtggtgctatgaagattattcatgaatatcaagaagaagatcaacttcttcagtttctggttggcttgaacaattcttacagcaatgtgagatctcaaattcttatgagagatcctttgcctagtgttaataaggcctatgcagcagtggtttaggaggaaagacagagatgtctaacgaatggtgccagtagcaattctgatgttgacaagtctggttccagcactttgttaggctatttttagcctaagttttgggtcacattttatagttgtttttcttctttattattatttttggaatagaa

SEQ ID NO: 115190 - DNA, 992 bp, Cannabis sativa
aacaaaatcgtaaaaatatttaaaattccgtgaaaccgtatttttgtgtatttgtgaaattaaccctttgtaaataaacaagaatatttatttaaaatttcaatcttctttgtctagtttaccataatggataagcctataaattcttgtattgttgaacatcacatcctaattagagtaaaatttattgtaattaatataataattatgggttttaaaattttatatattaaaagggagtttgaagtaatttagtaccatgttgactatttaagttttaaaatgttgccttttttaaaaaaccatttaaaatgttgtttaattaaaaaatatacatcataagttagctcaaattgtatcttttcactaattttgatgaatattttttattgatagaatatatttaaatataaaacatatttatatatttgttgtgaaaagaaaaaaaaaaaagagagagagaaatatttaccaaaattgatggaaatgtatattttcaaattaatttactatataggtattaagtaaacaacaaagtattaagttggatttaagagttaagacaaacaacaatatattaaaatggcatgtttaatttcctacattaaaacattaaagtaacaatttttgattcatcaagattttgttggatttaaatattgctaaagaattatattgttgttccaagttggtgaatctcacttgtatcaaatttagttgtttaacaaaaacatcatgtttcattccaaacattaaaaaaagtaacatatgtatgtatatagtatatattttaagatttatataaagccatgaaaatcaccttaaacactttcacactcacaaaataaataaatctaatattgaactcattcacactcacaaaaactttttttttaacacataattttaatttgtatattcaaattacattaaaattcttaatactatatcaataaaattatttttaaataaatataatatttatacatgta

SEQ ID NO: 115191 - DNA, 1292 bp, Cannabis sativa
aactttctagagtattcttgatttctcttacaaatttcttagaacattgtaaaacattctaacatattctagatttgataatgatttttaacacatgacaatcaaagccacaatattacaggtcttttatttacatacttggatatggttctaatgaattccaagttcttatatggcaaagatggtgtctcttgttttctccttttataaaacttgaattcttcatgaatttgtgtgggatcttaacacaaggcataaatgagtaatacattgttttctacatgatgctcgagcttccgagaggctcctcccacgaatacaatattttgataagctcaccatgagccatccgattaacaagaaattatagcgcacatgactacttgcttctaactaagtagctcaatggtgatagccggccaaaatcgtacctgagaaatagtgttcgaggttgagatttgatgtacctaagaaaaaaataaaaattattggccacttaatgaaagaaaaatgtgatatttttgatttttttttttaaaatatgtatttttaaaaggaataaaataaaatttggaccctgcgctaggtgggcttaggcgtagacctagcccaagattttctagtgctagtgggagatgttccgtacctcttttgtcacttgctatgcagcgcaaaactactttttactcaaaatataggcctccctttcaggagtaaatactaagatatcaccaagaatagataacgactcagataactttataagatcaaaaagaaaaaaaaacataattacatcttgtcagcttgtgatacgaccatattgagatacttatgagtctcgaatcgattgagactaacaagaaaataatggatcacgatccaagataagataaatatccgagatgtgtgtgcatccgagataaaagaataatctcaggagagagaaataatgaagaggaaagtacatacaattttcgatataaacaacacttcgttaagggccgtatggcacaatttttaaagaagttaaaaattagttttaaaaaaattgtaataaaaagatagtaagctaaaaaaaaaattattgaaaaatttatgaaataattacagctaaaaattaaaattggcacaatctaatttttagcaaaaacttttttaattaaaatacttaataataaattattttatgctaaaaatgtttttaattatttatgatatattataaaaaataaaaatatttcttttgaaggaaaaaatatttaaaataaataatatttaaatttcttattttt

SEQ ID NO: 115192 - DNA, 1868 bp, Cannabis sativa
  modified_base (1795)..(1806): a, c, t, g, unknown or other
gggcataaaacccaacagataggccttgtgatagttatgaattagggtttggaaccctattaactatttgagaattagttatctccaaaggtggattaggtctatgccggttagagtggatggtagagaattgagtgctgacttagttaacctagccatagaagattttgacatcatcttaggaatatgtggcaactattgattgtaaaagaaagatggcaacctttcaacgagagagtgaggaaccatttgtgttagtgggctttgttcagggttcttgtatcccaatcatttcagttttaaaggctagaaacctattgcaagatggatgcatatgattcctaagagtagtgatagacactaatagatctatgatagttggacctatagatattagagtgatgaaggagtttttagatgcatatcctaaagatttgtctggtttaccaccatagcagtagatagactttgttatttacttagcccaagagcagaaccaatttctaaggcaccttataggatggctccgtagaacttaaagagttgaagttacaacttcaggggatgcttgacattcgatttacctgacttaatgtatcaccttggggtgctccaattttgttcaaaaagaagaaagatgaatcccttcgtatatgcattgattactaagaattgaacaagcttactatcaagaatatatatcctctttctagaatcaatgacttgtttgataagctttagggaaaaacattcttctccaaaatagatctttgatcgggttatcatcaattgagtatctaagaggaagatatcccaaagatttcattccatacaaggtatggtcactatgaaattctagttatgtcctttgagataaccaatgacccttctgcctttatggatctcatgaaccaatgattcaaggattttcttgatacatgtgttatagtatttattgacgatactccagtatactctcaatcagaagcataacatgagcatcatttacgaatggttttacaataattgagggaacgtaagttatatgccaagtttaagaaatgaaaatttgggttaccacaagtagcacttcaaggccatattacaagtaaagatggtattatggtagatctcgtaaagattgagtcaattagagactggacaaggcctaaaactgctatagaagttagaagctttcttggattggcttggtttatcgtcgctttgtataaggattttcaaagattgtcacactcttaacaaagttaacttgaaagaatcagaaatttatgtggacaaaaaggtgtgaaactagtttccaagagttgaaacagtgattgatttcaacttctgcgttaaccttgccatcagatcaagaaaagtttgtggtttattgtgatgcctccagacatggtctggagtgtgttttgatgcagtgcttctaatatgtgaaaggagtacgagaaatgttacccaaaaaatagttagttttatggtacttaatcaggaacgcagcagaagagttctgttttatttgattatcattgtaccatagctcctagaatctccagatgtgtgtacattaaatcaaaacaataaaaacaataagtttagagtatacttgaagcctatcaaggtatcctcaaaacttcttgtaagttgtatccttaatccagttgattaggaacttgcgattggactcacaccagtgtcttccaaatcaatccaccacacacaaggaatagtgtggactattagaacaaagtatataacctgttgggattttatgccctannnnnnnnnnnnttcaatataatcagatttataaattaataaaatatcataaataattttatgttgcatggttc

SEQ ID NO: 115193 - DNA, 2785 bp, Cannabis sativa
  modified_base (44)..(45): a, c, t, g, unknown or other
caacgagctgcacagcatgtttaataatcacgtaatacgcctannttagttagggtgttacatatcacaactattaggaaactgataaataacatactagaaaaatgtaactgacatcgttaagaaaaaaaattaataaagctttgatgcattgatgaacaatggcttgtatgttaggaattttttgtgaagaaacaacagtaagaatattataaaccagcgtgaactcaactaatgttaaaatataataatactgaccacattagaaatattttgtatgtgagccttgtgtaggattgttatgtaaaataattgcaaataagataaaccattgtaaagttatcagcttgtaattattgtctcgtcaattattggagtgttgataaaacgaacgagcaacaataatacaactacatagaattacaaaaataaaaaaataatgctgccaaatttgtggtgcaagatgaatatgaatgtactctattactggcgattgaaattgaataaatacatgattgaaattctttaaaacaacgctaatgcaacatatataatattaacttctgtagtgataattgtttttgaattatatgtgatttggattgatagggagctcataatctattttttttatcttcattttattatgaatctactaattgaatttatgagaattagttttatggaattcaaattataatttagggttgaatttaagttttaagccagtttttcagcaaatttttgcatcagtcgataatttttgttgttcgggttgattttgttcttcttcttaggtgacgtcaccaaaattagtgatgtttcttggcctgcctaagttgattcatcgttactggctagtttcaattgcatgaagattttgtttctatgaagcatggatcgtgtgggttgaaggtgtatgtaagatgtatttttataattttttttattaggttgtataaatatttatttgaatagctcatagtatttatgtaatattattttattttttagttataactaaaaaaaacccttatttataagagaaaagcgttatgaaatttttataactctcaaatgaacaattgatttatcaaataattttatataaatattttaaagtaataattaatggggagttcttaaaaaaaaattaatctctattaaagtataattagtttgaacataaacatatatttttatataaaagtttatcaaattgtgtctctaccatttgatatgcatgaattggattggattagattatatgtatttggtgcaacacataactagataaactatttttataaaataatttttttattaaaagtaataaaataaagactaataaggattcttgacttctgaattttgacatataccaaatcatgttctctgaacttttttggctgttaaaaatttctcttgaactattgagattgttgaatttaaagaattttgtctaatttttttcaattttactaattcagtgattattgatgtacaaaatcatgttcctctgacattgatattaccaaatcatgtccctcaaactttgacatgtaccaaattataccctttaaactttcatccatgttagattttccttattaaaattggaaaaaaaatccttacatccaacaatctcaatagtctagggaaatttttagcgaccttaaaagctcagaggatataatttagtacatgtcaaagttgagggacaaaaatcataattaacctaaaataaataatccaccttttccgagagagaaaaataatccaccttttcttttatttagagaaaataatccaccctttaggtggcttaatatattcccaaactcttaccataatttagaaagattacataaactatccattcctactcaaatttaaaatggtgcaacataaaatgagccaaatatgagatgtgataatttagttttatttcaagtatagttgtaaatatgtgtactgggccgacctgatccatattttaaaaagtttgcaataatatgagtcgtgtcatgtcaaactataaaaaaatatgagtcatgtcgtgtcatgtcagcctataaaaaaatatgagtcatgtcgtgtcatgtcaacctataaaaaaatatgagtcatgtcgtgtcatgtcaacctataaaaaaatatgagtcatgtcgtgtcatgctaatattttaaaaggtaagctcgtgatggctcgtaaacctatatttgttatatcgtgctcagattcgtatcgtgtttcattcgaactagtctgtttttcataaatgaatcaactcgttttcttatacgagctcgaatttaggcctaacttttccactatatatttttttttatagttaatgagttaattactaaattatatatattttttacagtttcaattgtttgtatacaattttttaacaatactctacacataatcatataaaaaattaattataatgattaaaaattaaatatttattagtaaatacatatgcatataaggatgggtgtgcaactaaaatctcacattagttagaatttggaaggatcatgagtatataaggatggacactatctccattagtatgagacattttggaaagctgccaaaaaaaaacggagagggcttagactcaaagcggacaatatcatacatggagggagatgggtggtggctgaagatccttgatattgtgttgggttttgtaccctaaataaaactcatttcaatttaattagatttactaattaataaaagatcaaaaatcattttatgttgcat

SEQ ID NO: 115194 - DNA, 3242 bp, Cannabis sativa
taacttttatatagtgacaactaaataataaattgtatcaaattttaatctaattttttatataattttgtatgaaaaattaggtgtgtacaaatggactgatccaacacgtatttaccaaatctcgttattataatggaagcaaaacacgacctgtataacataatgttaggcttgacccctagaattgtaagaaacatggataataatagtaataataataacatgtgatagtaaatatatataatgtgtttttttttaataaattattaatttgtagataaaatattaaaaatgggagaattaaggagagaagaaaaaaataattttagaaaattttataatatttaatctatcaaaaaatttattcatcttattttataatttttactttataataattctccaagtcaatctaatatatggttacaaaacccttttcatttaatataaaaaaaatatttaaataaaagtatgtgagtgctcttataattaaatagtaaaaggactttttggtaattaaatgaaagttaaggatatttttataatttaatattagaaggccaaaataagcattctcacttttatataagttatagatatacatattatatacagacacattttacttattatgtcactccctctttagtctctatgtgtatataaatacacacgcagtgacgcagctatatatgaatatacacacaaactactacatctactgaccttccttctaggagcggagccagaattaaatagtaggagggggccaatattaggtggcatacaataattttaaatttcggtgattaaaattcacttgtaaaagtgcatatcaattgaagaatattttaataggttttaattttataaatattttagaaaatgtgaatcaaattaatattttataattttttattaaaaaaagtagtgtaaaacaaatattagtttaatatttaagaatggtgtaattcaataagtatagtaattataaatttttagagaaaaaaagtagtgtaatacaaatattaatttaatataaataagtatagtaaaattataatattattattttattataattgtggaacctcctttttaatatatatatattatatttgttgaatatgtaaatgtcaactctttatcatttcctttttttcatgtgttgtatataactcttcttcatttcattggatatgtgttagtatatcctattattattattatatatatctctaataggtatataactaagttttaaaatttaggggggccacaacccttgtaagggtacatgtggctccgcccctgcttgtgttgtagttgatttggaagatcaaggtgtgagtttcattaccattccaaagatacaacatacaaagagatagcaaggacacgtgatcggcttcaagaggtaaaatatttctattcatctttttgtttctaatttaatatatgataatcactaaaatacttttgctgcacaccgtatttggtaccataaaacaaccagatagtaccagagttgatttcattatgtatataaatgttgtgtgagtattctgcattatatatttatatatatgatatgtatgtaaatggattattatgattattttgaatgtatggttgatgatggatcgtttattgtattatgatattaggtgtaggaattgtttttatttttcttagaaaaattgtaagccattattggggcatatgagattttttatataatttattttttttgaattattttacgtaaaatatgattacgttgtaatgtttatcgcattgagctcggatttgatttaaaatctcggtcgtgctaccacatttgccatcacatggaggagaataaccgttcaaataggaaaaatgactaggtgggaaataaccgcaccatacatatgcgggtatggtgcgggtacgatattagcatatattgccccatacctgccccaatatatacatacattgaatatttttattaatatatatttaatttaatctatttatatgttgtcatatcatatttttgattaacttcttaaaactttatcaaatttatggttattgtgatttttttttttaatattttgatgtgttcacttaattttttttaacaataaattataagggtttatgccctaaaatcaaatatttaatggataatatattagagaatatatgaaatgtaaatatattataaatgaatatatttgttattccaattttttcccacatgacgtggaatgtccacataggcaagattgatgccacgtggagtacaacctgtcaatagatgaccaaagtcaccatgcacaacttatcaattgactaagggtccaaaagctcgagcatagaaaatggccaaccaagagggtctggtcagaccacccctggccgactaaagaaaggcatgtgctggccagccctagacgaagggtaagccggccagcacctataattattgccgaaaagaagcccgattgattgatgtttctacgaccttcaccttggatgaaacatagctcattcccagctgcgaatccactccaacaacccgcaaaaatatggattaaaccttaaatatctacctattctttaggagcaattaattagctatttttaatattaaatatatgataagggagtaatatcttctcattttaagggatattaacctattttgaatctagaactttttataagctctaacctatataaagagcattaggctagaaccaaaaatctaagctctaagttccgatctcgagactatactctttctctcacacacacgagtgcccctagtatcgacactaagtctgtctccttatctcattcgttcaagatctgtcttacattgttcttacttttgtagaattcatagagtgccatactatctctcgaatcaatacaacaaaaaatggagtaggtcattacccactaatcaagggggtcaaacctctataaattactgtgttattttctttacttgattttattatttacacgtggtgattttaatcataaataaggcttcactgtcagttgaccaaatttgaggtcaacattttggtgctctcattgagagcgttatttatcaactcgatcaatcatcatggctgtattaagaagaatgacaacttctaatttgtaatatccagtttatatacatatattagtatttggtatattaagtgtgatacaattaaattattattattatt

SEQ ID NO: 115195 - DNA, 2996 bp, Cannabis sativa
  modified_base (1425)..(1427): a, c, t, g, unknown or other
  modified_base (1899)..(1903): a, c, t, g, unknown or other
  modified_base (2697)..(2708): a, c, t, g, unknown or other
tttcataattaaacataaacaactgctaatttccaaattaactatgcgggctttacaataatataaattaaaaaaaatatggtattggttaacgtgataataagttgaatagaattaaacgttacattgacacaatcaatcattgatatatagattatggctcttctcttttccctccgccacccccggctaccataccttgctgaaccccgcctcccaaaaacttgataaagattaactgtgatgtaaaagtgagaagcgagtcgatgtgtgggattgctgtagcagggatcagatgggatcagttttgtggattgtctccaataggatggacttctcaaatctgctcattggagaagtggctgcctggaaactagctattcagaatgctattggtctgaagcatcagtatgttctcattgaaagtgactcagagatagttatcaaggctttgaaaaagcaatttctgtttggagtattgataactatgtaacaacctctaacagactttctagtttgtttttaagttgtaattttgtttatttatcgaaattttgtaattttatggcccataatattgcaaaatgggtcgatacaaacaacattacatgattggttgatgtttcgactattcctactaatattttctataatgaccatgaggtctaacattttttttatagtaattcactctacttttcctttaaaagaaaggtctataaaaactgagaaaaatccttttatatgagatatatgtgttaggatgaatttttcacataaaatgatgagtatagtctcgtatttaattgacatgtggatctagttttcggtaggaaaacaatgacgtgtgaagggtataaaccccgataggttttcatttcatgctataaatatgcgagaagatgtgactaatacatggtctagtcgcacactatgtgtctcatagaaaatagaatagaagtcagtatagttgcaacatacatcgaatatatgcaatgactcagtgtttctcccccacgccctatgtaaagaccgcatctttacatcgatttgtccaaaatgactactgtacgtgacacctcattatggacccacgagtcctatgttattagtacatgaatgcccaatatgtcattggtataattgcagacattttataatataaaattgcagtaggttcacgcatcttaataaaaacttcgagagtttcatgtgttatattatttattaaataatataatatttaagattacaattgtggtctattatatatgttataatgagtataatatataatgtgattgagagttgcatacatataataattactatataatgtcattgggaattacatacatgtaatattcatataagttgtaacataagaggtggagtaactcatattttgtaacttccacatgatcnnnaattaactgtgtaaagagtggttacacaatttgattttttgaaattcaaagctataatataaatatagctgttgagaatgatttgaaattgtttggagagttatttacaaatgctgaaaaattggataacaagtaactagttactgtttttatcagctttaatatattagaactttttttactatggggatgccttttaacaactcacataatcttcaaatcacccatttaatcttatttacacccaattaaaatatggtaatagccattaggtgtaggatgtttgaatttcaaagtgtgcgatcctaaacactataaatagagaccttggttcatcctttgtgacatactcttctcttctatctttcaaacacaaagctagagagttctaaggcttaataattcccagaactattcccacaattccctaagtgtttcatagagggaaaaataatcttcttggataaaggtnnnnnaactttgttaaagcttttggtgattcacatatccactttgggtgtttgatcttctattcttatccactttgttacattctctagttttatattgttctcttcttctcctataaatactcttatatatatgtactatcatctattttgtatattctatatcatatatatacactattttatatatatatatgtttttatatagtttacttttatttgtatctttaagatttgagttgtaactctatttctttatttgtattttatgctttgggattgtaactccttatttaatatatctttcttataatattttgcttagagttgtaattatcttggtcttttattcatccattgtaatctctattttattatttacaattaagaatattatttttttgttttcaatagaaggagaaacaatcaagatgatgaaccaatagttaatgagatttgaccgctttgatggtactaatttcactagattgtaagacaaggtgaggttcctcctaaccacactcaagattgcctatattctttactccaccttagagctcttacccgcacctaccgacaaggatatcgatgaggtcaaggcacaaaggaagaagagaaaacataaaaatcttctatgtagaggacacattctcaactcactctcagataggctttatgacctacactgacactaaagatgccaaagagattggggatcacctttaaaagaaattaaaggctgaggaggaaggtaccaagaaattttttaatttctcaatattttgatttaaaatttcttnnnnnnnnnnnncttttacctcaaattcatgagttttaagtaatttttaacaaattaaaagtgctcaaaattgaacttctcaaggcattccaagttggtgcaatattgacaacattgccaccatcttgaaagaattagcagaagagttaatccttcataaaaataaggactaatctttgcaaaaaatcaaaaaacatattcaaatcgaggagaaattaatatgtagggataagcttgtggaggggtctaataaagaaaattccaaagtaaatgttgttgaaaattattttaccaggatct

SEQ ID NO: 115196 - DNA, 3270 bp, Cannabis sativa
acaatgatcctattttcactgcacccactgatgtctgataagtgtattcaagtttataagtctcctcttctaaaataaaattaaaacaatatatcctgattcacatatttttgtaacttatttattttttctcaacatctagtaagatttgtatttaagagactaaatttcttatcactattgaaagcataacaaaattatttggtacataaacaataaccgagttagtaatattgaataaatctggacaaaagtccttaaatccaaccatcttaatagttcaagagaaaattttaatagctagaaaagctcaaggaacatgatttggtacatgtcaaaatttaagggacaacaatcctaattagctttaataaaataaaaaattcactctacgtcacttttaatacacaaataattttcaccacatactattccatggcaagtcaatttacatgaagtaaggttgagcgtatccgtattttataaaatttatctaagaattcgaatcgaatacatacacaaaagtattacacagaaatatattaataaaaattatttagtaaataatctaatccttaataattttgattaattgaatattttttgtcacccctttgttcatattcatcttttaggtgcacatatgaacaatacttaattaaattacatctagaacgaaaagcttatactaatgtctctctgttcttaaattgtctctctcttttgagtgtgtatgtgtgagtgtgtgattgtgtgctctattctatgccattcttttgtacgaatcatatccttgtacttttccacccttcgactgtcaaaccagcttgttgtgtgccatgacgtctagtagtcaggtaaaggatcttgaagatcgctggaaggatatacaacttgaagaagaagagaatgaggaagtttactatgatgagaataccggtggtgatgacgatgaacaagccattgacaccagatggtgcctcgtcggccgactgctcacaggaaagatctcggacttttggctaaatataagggtcgatttgttgaagcctataaaaggcatgtatatcaaacaacttgatcagaatcgattcctgtttcaattttatcatgaggttgatgttcagcgggttattacgggtagcccatggacttatgatcagaagtaaattattattgtccgactgaaagatggagacaatctcaggattctaagcctaaattctattaatttgtgggtgcaaatacatgatttgcaatcacgattcttatctatgaaggttgttcgtcatgctggtaattacttaggcacttttttgaatccgacccaaatagttttgttggagtttggcgtaaatatcttcgattgtgtgtatctctatctctcaagaagccattgaaaagaaggatgaagtttcgtaagtgcgacggtgatagtttttatgctacgtccaaatatgaatatgtcccagttttttgctttatttatggaataataggacattcagaaaggttttgtccacaattatttgacacaccgccaagctctttggttaagccgtatggcatagggatgaaggccacacctcgtcgacaccgccaggtctctgtttcacctttcattcgctccgaccgatcttccaacagctcacctcctgcagcaaatcccaccaatcgtggagccaattctgccaattaatcatctactgctttcatggacgaatcctctcgtgatttagcacaatcacatcccaaaaataaagggattgtgatttatgaaagccatgaagaggatgaagagctggtaaatgttaaactaaaaaggaaacattttgctattgatcatggtaatactgctactactaatatcatgggccgaataaatgaggggcaaaaaaatgtgaatatggtgggtcctggtgctcatgcccaccaaacattatgagtttcatcaggtggaattgccgtgcgcttgggaacttacgggcttgtaaattcctaaaggatattgtttttcaaaagaaacctaattttatctttttatgtgaaactttatgcaagaaagatgtggtggataggttaagagtctaattaagttttgaaggtagtttttatgttgaggcgcaaggccacaaaggatgcattgctttgttatggaaagcccaagaaaaggtctgattattaagctattcacaaaattatattgatgctgaaattttggtgcccaacactttggtttggcatttaataggcatctatggcgaaccaaatagaagcatgcaatacaaaacatggcagctcattcatgaccttgctcttgcttcccagttaccttggtgtttaattggagatcttaataacattagcagtcaaactgagaagaaaggaggtcggccctacccctcgtccctcattactggtttccaagaagtcctattcagtttctagttagtcgacttggagctttggggctaccccattatctgggaacatagaataggtacgccaaattgtgttgaaattcagttggataaagctcttgtctctcacctttggctcgagtcttttccccaagctactcttactaatggcaatttttcctcctctgatgacactcctatcatcctagaactaaaacctccatggctgtcacgtaagatatatcatctccaatatgagaactgctgaagccatgagcccctttgccattagattgttaaagattgcttggaaagcaaaaccatcttcttcttattgacaagatcaaagcctatagcatcaatttagatacttggggcctcacacttacaggtaatttcaaaaaatgcctgtctcatagcaaacaaaagttatctcagttaagatttagtactgatgctactaatatgcaagattttattactgagcagactaattactttgaaattcttgcccaacaagagctatatttgaaacagaggtctaagaaaaattggcttcatggaggagataaaaatagcaagtacttccatgcgtatgctagcacttggaaacgtactaaccaaattcatactttacaagacagccacaaggtcatgaaggactgggattcaaggctagaaaatgtcatctccgactatttttcaaccttgtacactactgtcggtgtttcacaattttagatggttgctaatggtgaaccaccctaaatattaaaggcgtgttagcatgatttttaatgtactgtgcagctcgttgctaatcaaagagattatttgagaccgtgaataa

SEQ ID NO: 115197 - DNA, 1959 bp, Cannabis sativa
  modified_base (27)..(34): a, c, t, g, unknown or other
  modified_base (60)..(67): a, c, t, g, unknown or other
  modified_base (94)..(101): a, c, t, g, unknown or other
  modified_base (128)..(135): a, c, t, g, unknown or other
  modified_base (162)..(169): a, c, t, g, unknown or other
  modified_base (1910)..(1929): a, c, t, g, unknown or other
tactttatatgtgtttatttaatatcnnnnnnnntttatatgtgtttatttaatatcgtnnnnnnnnttatatgtgtttatttaatatcgtttnnnnnnnnatgtgtttatttaatatcgttttagannnnnnnngtttatttaatatcgttttagaagttnnnnnnnnggatgtttaaacaacatacttgttaataaatcttagatccttgtaaaatatttccaacaaaaatttcttcaatttgtaccaaaccttcactctcaatgaagtctttaaattcgtaattcatcaaatccataagtatctctatagagttttaatcaacccaaggaatactctaagaataaaatactcatagcaagtaccaaaagtaaatttataagtattcatttctcaattcttcaactgataatcatcatattgaaaatcaaccttaagaaaaatgatcttcccttgaattagtcaattagatgacccatccttaataaaggatgcttaccttaatagaccatttataaactctttggttatccatactatttttagtgacctatcctttatcttaacgaatactctgatgtatcccggatcaagtgcacagtctagtataccgtaagtcaagcatatctataactgaatccttaattcattttattttaccaatactatttaatacagatcttaggacctaactctatccctcaacattactttaattttaaaataactttatcgtttagtagtaaccctgatagctttctatgtacacatttacaaatttatgttcttcttgtacacccctattccttttgataacccttgtgtattagttaccatactaacttgtaaggagtctctcgttgttggtgctatcttattggaatctgtagttcttatattctttcaaagatatgaatggagctttgttctctttttcaaacatttctttccctttcctccagttaataatatctccatattaagcaaactgatccaagcctcatattatatctaattatacactttattgtttaataaaacaaacaaactatgttatctaataagataattgatgaccactattacttaatgaagtaaccaattatcttatgttgtctagtaaaataactatatctaccaaacaacgtgattgtagagtattaactctatcagtctcattgttacttaataaactaacatgatatctctggtcgtttcataagacaaccatacatacataacccattctctatactcaatagagaaattaacctcacttacaggaggtaatcaattatctcgtaggttaaaacatacaacacactcttgataatatgccacatggtcaaaaaatcctaccatgaaataagtttaaactgaattctctctttaaaaaaaaaaacacctttcattttttttctaagacatcttgggtaaacttacccgtcttatttttgttccaacagaaaattcattaccctaattcttttaattaagacccacatcaagaaggtcatttcagtcataatccttggctaattaaaaattgaatagagttctaagaatccttctggatattactttctcttacagtagatttctagtccagtccaatagaaattcctagctcaaccacttgagtatatatttgttaaacgatgggttgcttggtcatcccaatcatagcccaggctatgaactcttccattctttgggtgaaccctgcctttctcaagtcttatgttgcctctacgtacaccaagttgaccatctagtcaaacttaggggcatattccaacatcatcatgttacattgaacgatctaaataatctccttcatccttgtaacaccacagatctcataatcattctgttgggttttataccttaaataaaactcatttcaatnnnnnnnnnnnnnnnnnnnnatatagatcagaaataacattgaatgttgc

SEQ ID NO: 115198 - DNA, 3635 bp, Cannabis sativa
  modified_base (170)..(175): a, c, t, g, unknown or other
aattattcattattttattttattataatttgatgtatttacatattatatacacacattcataaaataatacgagttttttaatataactcattgttatattagtagtacaaataattagagaaaatttaaaaaaaattattttacattatttatttaactaagaaagnnnnnnttattaaattatatgatatttgatacaatactataattattttagtttttaaataattaaaacaaatttaaagattttttttttttaaatgaagctcggtttggtcggtttaaactgaccaaactatggattaaaacgatcggttttttttttttacatttatataatagtcagttgattttcggattataaccataaaaactgaaaatcaaattttaaaatttgtttgtttaaaagaccgaccaaaccgactgttactcaccacatttttaatatttttcattaagaatattgagatacaataaatatttttctatcaatagaaccagcacataaattgttttcatcattaagtggatgtcagcaacgcaacaaaacacgtaagagagcgacgtagaagttctcttttctccaacagtagcctaattgatgcccttttggaatatacacatacgtaacccaacaaaacgatcaactcaaatgggacgtgagcaacacgatcacacaagcaatgcgaaatgcgtttggagtggttacaacagaaaaaactgaaataaagtttttttattaaaaaaaaaagaaaaaagtttgtcaggaaaacgacgaaaattcaagcagagggaagagaggtaggacccagagccctaactctacggttagcaattctttaacgcgggaaacagctgtatagaaataaatacctattcttacacgcactctcacgtccacgcgcatccctcccctcacctaaccctgtccttttgccgtactcctcacgtgaatcattcaccgcacgaatgcatctcacgtgaggtccacaaacaactacaacaacgataaccctcaaaattcagtcagtaatgaggcagcaatatattaattgggaaattttaaattttatgcttcatgcgaggctaattcaaaaaaatccttctaatgttaacattataaatatatgcttatattctttgttaggttacaataattactctgataaatcgaataaatcaaaaaaaaaaaaaaaaaaacccgaataacctaacaaaaatcttaaaccgtccaataaatattttaaatgaattgaatattattctaactgtcatataactagaataaactatactacataaattatactacataaattatatttaatagttaaactattttgtattttatagtatttaatttaaattttaaactttatagttgataattttgattttatttagatattgtagttaaaatttaaaattcacaggatatattaatatattttttttttctattttgaaagaatattatttaatggaacacttctcaataggtattaccaattaatggttactaaaaaaaattaattataaataattttaaaattattaacccattagatttttatctgatggagaacaatgaaagagaaagtgaaatttgtatgcttaatttaactacttaattaaaaaaaatatatatatcaaaaaatacctcttattactctatatcaaaaatatgtttgtataagaaaatatttagtcaaactcaactttgttttatcttttttttttttccaaaaaacttttttttattattttatttcaattgatggaacaacgttagctcatgtaagataaaaatgagagatttttttaattaaatagaaaaaataagcataaaattactcagatgttcctaatatcaccattgatagttaatatccattaagaatgcactctttgtttaatatattaatatttatccaattaatattgggataattacataagacaccattttttgtataaaaaaattgtattttaatgtttgaagaatttttttacatttttacgatttttcatagaaacaacacgaaaacaacataaaagtaatatgaaaataacatctaaataacaacaaaaaataacatacaaatataaaaaaatcaacaacaaattaacaagagtacaatataaaaaaactgtattttctgtaaataaaatcaaaaaatcgtaaaaatatttaaaatttcgtgaaaccgtatttttgtatttttttgttatttttgtgtatttgtgaaataattccattaatatttatcttatattatgtttttaatattactttgcactataccacttttaagctttaaaatttttatacggcacatgtaatttttcaattctaattatttaagcaccaaaaaattaacaataataaaataaggaaagatcagttagatgggttaacccgaccaaacttacaaaattattgggtgagcgagaaggtcttggacgaccaactggatcagcgagaaggtgtcataaaagttggcccaagactaacttgacatgtcttggaccaagatagtctgagactaacttggcatggcgataagccagcccgggtgactaacgtggtctggaaacaagttggtcccagagtcttggggtcttgaagtctcgaagtcctagagcattggagtttcaaagtcttggagtattggagtcctagatcttgttgttccaaacattgggaatttaatgttgacatttctcagttttatgccaacataatttatcccatttttggggaccattcttctactttatcgggctgctacctcaccttaactcccacattaatatgatattgaccgcattgggcctaagctctcatggttttgtttttggacacctttccaaaggcctcatactaatagagtaggtagaacacttatatccaaagtaactcttgcctattcttctgatgtgggacttgggttgatagcccaacaatcctcctctcaaccacggaccacatactcgtggcctcccctccaataaaaccacctcatgcaaccttatgttgccactatcactaatggaactcatcgcccgaccatcaaccttgtccacaagacatttgacacagggcctaagactattataaaataaaaaattcttgacaattttacaccatcttgtaaagaattcttgatgatttataaatttatcgcctatacaagcatcgcgaatactaggtagaattggcaacagtggaaaaatgtcggtataaaagaatttttgatggtttaaaaccgtcagctatagttgagactataggtcattgtttaaaatcgtctcctatactataggcgaaggttttaaaccatggcctatagtatagccgacaattttaaatcatcgtcatcgtggatttccaaaaaaatcattgctttcaacctcctccataccaagataggagtttcgtttggccttaagatccccaaatagtcgagatctccaacgatttatgaaatacaaaaaatctcaaaaatacataaattcctaaataaaaaaaaataataaagaagttacaagaaagagtggacgagatagagatgattgaccggtgctcatggtcacgcatctgtcttcgaacaagagagagagagagagag

SEQ ID NO: 115199 - DNA, 1460 bp, Cannabis sativa
tgttgatgacttagtctagaagaaattcattctagataaagataaaatgtcacaacaagatgtccataagtaccaatagtaagaagttaaatgcacacttattaagcatgcattaagccagactcctactgttgagtaggagcgatcaaaaatgtaatcaaacagggaacataagaagacaatcaagaaagaatctctaaaggtgacctatatgttagatgatatgggtgtatttagaatccttatatctacaccaactcagaacttaatctttgggatgacgattactctgagggtagagaaattaattattctggaagagagtgtaaaaatccatctataataatttagatacatcagtgaagctaaataattgagttgcttttaaaagacactaaaaagtatggttgaacattgggcgggttcaccgggttttaggttcgcagtttttgggtccaaaaaaatgaatccgaattacccgaacccaaaatagggtcaatttggcaggttggcggatccgggttggccgggttgacctggtcaactctttaaaaaatatattatataatatatataaatttttaataaaaaattatagataaaaaatatattattaagaagaaaaaaaaaagaagagaattaaaggatgtataccttgagagttacagggcgtaaagattcgcaaaaaatgaagttattagatgaatatataatatttattaggcgaaggtgtagattgaagtacttgatcattattattatcttcagccgaaaagcaaaccggggttggttcggcgtggactgacgtagtggtagtaattgtagtgattgcagtgatgaggaagacgccagaagaagaacactactctactagcttggctttaccgagggaaatatacatgatgaaataccagtatgtgtttatgatccggtctatctcttttattaaaaaaatttattatatataatatatataaaataataagacatgtaataaaaaataaaaatatatataatatattatataactgtgggttcgggttcaacccgaaaatcggtaatcattaaaacttaacccacaaacctgtctgatggagtatcggattgaacccgacctgcccgaatatatatttttttttttaattttgtgggttggtcagatcgggtccgagtggattgcccaagtttgagttaaacctgctcaaaatattcagtcctactaaaaaattattcaaactgaaaaaagttgttgattgttttatctctatttttttgtttcttttgatagaatgagtcaatgatagttgtatctttcatgttcaaatccacttaataaagagtaaagtattcaatattcctaaagaagtaatacatgtaaaaaatatatatgagacaacaaaattttttaaatcatacataagcctaggtcatgatatatatgcaaaaaaaaaaaaaaagaa

SEQ ID NO: 115200 - DNA, 3627 bp, Cannabis sativa
  modified_base (26)..(37): a, c, t, g, unknown or other
  modified_base (3548)..(3584): a, c, t, g, unknown or other
ttgtacagcttacccggtatttcccnnnnnnnnnnnngggactactgactgtcacagcagtgatgttgaagcctttgctaatcacctacctagaattactaataaagctaaaggtaaagatgtggctggtgttaaaagagatatttttcttcctcaaactatggtggttggtgactccttaagaaacattctcaaacgtgctcgggctggtcctactattgctgaagtctcatctgctatgaatgcatctcttgtgttggaatgcttgagggttgaggagtcctgaagcattctgtaacctctccctttttataaaaaagagtaggcctaactttctttttgtcatggaaactaaatgtcctgctggccgtggggacaacttttgttataagctaccttttgaccatgttttgaggtccctaggaagggttaaggaggggtattttgctattttagaaatctgatgtcaatgttaatattttgaattactctcttaatcatattgactgcattgtaacctttaatgataatataaatgctcatgtttcttgcttttacggttctccttatgctcatgataaaattcacacctggacacttttagagagattttatgataatgccccctctctcccgtggctcatcttaggggattttaatgattatttgtccataagtgatcgctcatgctctaataatccccctttgtatgctatgactaattttcgaaactttgtcaataagttttttctgtttcccctccatcctattggtaataagtttacttagaaacatggccctttatgtgagagattggattggggaattgttaataaaaattggcaaaatctctttcctagggttgctctttatcatcttggtttctatggtttggatcatagggttcttaaggttgtgcttgatgatgacaggctgtatattaataagaataataggttcatgtttgaaaatttcttgcttaccgagccatctttttttgacatggttaaggaaacttggaccaagccccctctccattctataaacacttccctcagtcattttctctccaagtagcagtcttgtattgctgctattaaagattggagttcttcttttaaaagtctatcttattgtatcaatgctcttgagatttccatcaatgctatacattctaatttgcctaacactagagaggacgttaagcttatctctaccttgcaatctaagttaggctgtctcctttataagaatgagattttttggaagcagcggtccaaaatccattggcttaaagctggtgataagaatacaagatattttcacaacaaggccacatccaggaaaaaaagaattatatccggacacttaaatgtgaggatgggaggcagattacttcttttcctagcatctgtcatgaggtctgtgcatatttttagaacttgttacagccattgataaaaccttgtctcctcaacagattagttttttggacacccattttgatgctcttgaggtgcagcaagctctcttccaactttctggagataaagctccaagtttggatggcctcaaccctgctttttattagaaaaattggtctgttattgggcaggaccttaccatggttattcttgatattctcaatggcaatgccagtttttcctccattaataatacaatcattgttttaatcctcaaaaattataatgcttctacttttaaagacttcagacctataagcctatgttctaccatttccaaaattgtggctaagataactgtaaataggctcaaacttgtacttggaagtcttatctccccttcttacggtgctttcctttttgaacgagtcatctttgacaatatttatatcgcccaagagcttgttcatgccattaatcatagaaagtagggtaagcaaggttgggttggacttaagcttgatattaagaaagcatttgaccgtgttgaatggaattttcttactgctgttctccagcacttccattttccctctaaattcactaacttaatttatcagtgtgtgtccacaacatgaatccgttttagtatcaatggtcaaatctctgatcaaatcttctcatcccgtggcattagacagggggatcctttacaccctatcttttccagctctgttctgagggtttaactgctgctttgcgtatccaggaaaacttgggttttttcaagggtatttctatagcttgcacgacccctgctatttctcatctgctctttgcagatgacactcttatcttcactactgcctctatttcctcctgtaattctcttaaagaggctcttaacctttataaccttgcatttggacaaaaagtaaattacaccaagtcctctattctcttttctcccaatactccccctgctgtctcagcttattttttgatacccttggactggagccgaaacctttcattagcaagtatttaggggttcctcaacgttttggcaggtctaaaaaatctagttttgattttatacttcaacatgttagttctcaactctcaatttagaatgaaagattattttccaaggatggtaaggaggtgcttttgaaagcagtaatctaggccattccctctaatacaatgtcctgctttaaacttccaatctctgtttgtcatagaattgaaaaaatgatggctcagttttggtgggaatctaaaattcattggaaagcatggcataacctttgtacctcaaaattctttggtggtttgggtttcaggtctttagttagcaatcatggcgtgtcttctttaatccaaattcccttcttgttgctgtctttaaagccaagtattttaaacacactagttttcttgaggctagtcttgggcactccccctctttcggtctagtcttctttgggggtagggatctccttaaaaaaggtttgatgtggaaggttgggaatggatgttctatctgaactttggaagactattggatcactgggcttagatttcctaattttaaaagtaatgatcagcctccttctgataaagtaaatttcttcattgatgagaatggtcattggaatcgtgcaaacttgatctttattttgacaatcatacagtctcttcgatcctccaagtccctattggtggctgcataaagatgaccatcttatctggaataaagaccccacaagcattttttttgtcaaatcagcctatcatttagctaacggtgtgtctctccctccttctacctctaactcttctttcatcaaaaagtggtggactgcgctctggaccctgaatcttcctcctaaaattaaaactttctcttggagggcttatcatcacattctccatgctgccctcaatttgttcctcaaaaaatctcttccaaacccttcttgctctctttgtcattgtccaagtgaaacggttactcatgccttgctagattgttccagtgctgctaagatttggaaagttccccacttcgacacttttatatttcttatagatatactgattgttgggttttatgccctnnnnnnnnnnnnnnnnnnnnnnnnnnnnnnnnnnnnntaatatagatcagaaataacaattaatgttgcatggttcacat

SEQ ID NO: 115201 - DNA, 1222 bp, Cannabis sativa
tttttttttttttttaaatcattcttatttctgttgaaatggtttctgcagaagacctaccagtttttgctcttcaagatgatagggttgtggaagttgtcggtgaacctgctggcgtgcacaaagcaattgaactgattgcatctcatcttaaaaaatttttagttgaccgtagcataattccaattttcgagatgcatgtgagtttcctgatttcataattgtcccagtttttatttgattttcaatgttcaaatgaacaatcttatcttatattgtttaccagatgcaaatgccgaatccctctatggagcacatgcaatctcatcagtctcatcagtctcatcagtctcatcaatcatgggggcctccacctcagggagctgtcccaagcagtggaggtcctggaggtcctgtatatggacatacttctcatcctcaatacatgccaccaccaagacaacatgaaaattactatccacctgcagacatggcaccaccacccatggataaacagcctcatcatggtatattagcatatggaagagaagctcctatgggtgtacattcaacttctaatgctcaaacaacaccttcaatggttacacaggttattattccttttttccttatttgcattttcaaattcattgtgatgatattttgtaagatcactttgtttgttaggttttatgattgcttttgggttattatgcatgcggtatttttttacttctgtgtttgagttgacacattattgtatattctctttttattttctttgagctcaaaaacctgaggtcgactggtaaatattggctcctgcttaatctttgttgaacagttacaagaggcattgcttttcctttctttgtagaagcataattatgtaatcttctttgttgcagattacacagcaaatgcaaattccactatcttatgctgatgctgtgataggaacttctggtgcaagcataagctatattagacgagccagtggagctactgttacaattcaagagactaggggtaatcctacagaaatgacagttgaaattagtggaagtgcttctcaagtccaagctgctcagcaactgatacaggtaattcttgcttaacaagatatgttgctttttatgaatctgtttgtaatttgtatagggaaatttgattttctatacttaaaaatgttcaaattttttttttgaaccaatacatttta

SEQ ID NO: 115202 - DNA, 2500 bp, Cannabis sativa
  modified_base (66)..(85): a, c, t, g, unknown or other
atcatgtgaaccatgaaacattaaatgttatttatgatctatattaataagtaaatttgattatannnnnnnnnnnnnnnnnnnnggcataaaacccaacaggaacaccttttgccacacgataccccattaaccatcgactctgcacgaacctcgtaaccaatgatgagaacccctcaacacagataagaaagagatagggggacaataaatccccctgacgaatacctctactaggagtatttggcccaaaaacatggcccccatgagtgatcctgtatgtaactatggaaacacaatgtattatcaatgatactattttcctatgaaaacccatatgcaacatcacatgctcaagaaaaatcccactccaccctatcgtacactttactcatatcaagctttaaagccatatgcccttccttgcccatcctcttcctcttaaggtagcgcattatctcaaatgagatcataacattgtctaatatcaaacaccttgatagggaggcgccctgagtatccgagataacaagaagtgccatcatgtgtctcattgcatcgaaatcgattgttctaccagtgagaaactttcccaccaaacaccatatatcatcaaaagcttgattctcctccccttgatcactagtaattaagactccctcctcttcctcttctagttgaactgtgcatatctatccaccaagtcaccaccatggtgactgcttgaagccataatagaaaggaaaacaaaccagtaacatcgatatactctcaaaatatgtcaaaagacaagacctttcttattacattttaatagctactttctctgccacttattccacaccaccagcttagcctttttgaagcacttgtactgaaaaccattacgtcatagaattaacattattattaattctaatataaatcataaaatatttgcacacatattatttctcaaatatgtcacatattattactcaactaataattttaaaaaataagtacaaaataaaattgacaatagcttgttttacttaaaaaaatatatgttagtacgatttttattttaagataacatatgccatagtaaatagtaaaagtagttctatcaaaaaataaagagcattgttatttagtattatggtgcccaacatcttacagatgtggcgcgttgttagtggctaatagatttctatataatttatcaaatcaaaatatgtgagacctaatattaaattgcacggtatgccacctcttatggtacttgacaccttaaattatctcttaatatttgttaaaaacaaataaataaattgctgttgaaaataaataactaaataaaaatacaatttactttactaatttaaaatattattttaatagatcatatacaataataaaattatattgggtcggttgctaattttattaaattttttactcaaggttttttttttttttttttttttttttttcaatgaagacgtataaccataggatatcaaaaagggaaattttaaaaaatatgcataaaataccctaattttttttttctaaatccataataccccatattccccataatacccctctcatttgaaatcccaaacccaaaccgcctcctctctcttcctctcgcccaaacccacggtgaacccatcccgaacccatcaatttaaacccacggtgacagtgccccctactatcgacgatggacccaatctcaaaccggctgtgacagctcccccttgctcgcgatttggacctgtgattttcgtcgggccccatgtagtccgatgcaggcccgatgctcatgcgaatgggttggagaagacgaagatccgatgggtccgatggggactcgatggggtccgatgtttgtgttagaaattatatttctcattgggtccgatggcacccgatactgggtccgatggggcctgatggtgttgagtgatttttcaaaaaaaatgtgtttggtccgatggttctgatggtgggtccgatggggcccgatgcctatgtgttgttatcttttttttggtgtgttgggtctgatgggccaatggtgggggtcggctgcatggacggtgggggcggtcgggtgtgggcggcttgcgtggacgggtgtgggcggtctccgtttgtgtccagtgtgagtacggttgagggtatgcgagagaaagagagaaagagaggggaaagagagagggggcagtttgggtttgagatttcaaataagaggggtattatgagaaataaatacggtaatgtggtcatatatgagaaatatgaggtattatagatttagaaaaaaatatttaaagtattttatgcatattttttcaaatttccctataaaaaattattgaggtttgacatctctcaaaaataatttaccatggggttggtcttgggggccagaagtttatctagagaaggctctttgcaacctcatattgttgaggccattggtatcaaggaagctctctcttggagt

SEQ ID NO: 115203 - DNA, 1682 bp, Cannabis sativa
tttttttttttttttttaccatttgaatatcttataggtcattttatatatgatagtgacattcgaccagtttcgaataatttatggtgggaaaaataaaatttagatatttaattgtgtatgcacttatgcatataataaactaagtaaactattttgaacttaattttcttatgaagagttttattccattactaaaaatttgtaggatgcctatataagttagtaagcctaaaaacgacactcgactactattgttgctaccttttgataattaatgtacatatatagtcaacccactgatatttattaatatttggtcgtgatctttcctttatcaatagtaaagttttaatttatatcaaagtcctaacttttaagtaggttataaaaataagaatatttttattaatgctttagtgggtgtgcatgtgataatggaatccatgttcatcgttcaagattataatatagctcaatagctcataagtagatatatatataaaaaaaaaaacttacagtacaattaatgtgataataattatatcatagataagatatcctcttaatttgaagtttgcacacgaacgttttttaacaatacaattaccttaagccagctgttcaaatttcttaaatatttacttcaaagttaaaaaggtcgtaataaagggggtactatatggcaagaatatatatatattggagttactgaataatctttttggcattttaaagaatattaatttaaatttatgctgtttggtagtaatattatagagtatagccagggacttgttttttggttggctgctttacagctttgttgttctactgtgtgtctgctctactttgttggattgaattttcaaaagtagccttcttacgagataataatagcatgaaaggtagagaagaagagtagtatataatgtatagtcacgttgtattgcctttttctttttccaacatcacttcatatcattatcatatgtctccctttgtctctccattattatatataactaacatatattatatacacattcattatatatgagccaatggtctttcagtagagaagtggggtttggtaatattgattaacttagctaatttgatatatatcaataatatcattacctctttcccttgatcatcataagatattattccatcccataaattaattgcttttctttgaattcaatgaaaaattaagaagcacgagtgaacgtgttatagtcatgtagtttaatatttaattttaagaaatttaaattttaataagaaatattaaaaatcatttactcttttaaaaaggtaatttgcagctaaactatttatacttttatatttagtacgattaaccttttgactaaaattttaagagtaaaatcctttcaaactataggtcccttttggtttttggtgttatgttggtttagctctattaattgctattagttgggtgtttattcgattcaaaccaactattttgctcatagtgcattcggtccatactaagtgcaggttttatattttggatctaatacaatcagcagagtaacataattccaatttaatccaatctgcaaaagtgtagattggatcgattattttgaattgattactttttaataattatttaatatttattaaaaaatatttttttcacataa

SEQ ID NO: 115204 - DNA, 3210 bp, Cannabis sativa
ctggattttcgaattgagagagatattgagagagatcaagaattctcactatttttcatggacccaattgaattcaatgatatctttcattcacatcttttccatcaagatgtgaatgaaattgtattattttaattaaaattcctaatgaaattatattatttcagtaatcatttattacttggactatatttgcaattttaataatataatataaaactattattttcctaagtaggatagaagactttcttgcacaattcaaagggtacagtatcatgaaaatttcaatagaagaaaatgcaacagtagacgctcttgcacagttggcaagcagtacaatcacagacaagtcaaatttagtctcgattcagttcttcaaagatccaagcataacaagcactgaagatatcgagatggtggatataaccccaggctggatgacaccaattgcggcctacctaaatggtgaactaccgattgatagaaatgatgctcggaagatgagaagaaaagttgtgcggtacctaatagtgaatggagtaatgtacaaaagagtttttctattccattattaagatgtgtcactaaagaagagtttgtgcggctattatctaaacttcatgaagggttctgtgggaatcacgctaggggaaaagtttgtccaagaagatatgaggtaaggctacttttggctgaccataattgaggattccaaggcttatgtgcaaaagtgcaataaatgtcaaaggttttctaaagttcctcgagccctgcccaatgaactgatatagatgcaaagcccatggccatttgcaatttggggaatagacctaatcagacaactatctaaagaaaaggggagagtgcaatatgcaaatgtggcagtagagtactttacaaagtgggcagaggccgagcttttggcaataattacatccaaaaagtgttagactttatgatgaaaaacatcatattcaagtttggactcccccataagattgttttagacaacggaaaacaatttgatagtcaaatgtttaccgatttttgtcttgaacaaaggattgttaagagtttctcgattgttgcacaccccaggctaacagccaagttgaggtcatcaataagacccttaaagacatgttgaagaaaaggcttggataagcaaaagttaattggcctgagcaattacctgaagtactctggtcgtacaaaaaaactgagaaaaatgccaccagagaaacctcattttccatggcatatggttatgaggccatgctgcctatggaattagatcccccttcccacaggagtataacatatgaccaggagataaaccatactctcttgacgaaatcactcaacaaaattagagaatgaatgggcgtggcagccctaaagttaaaagccaaccagcaaaaggtagcttgttaattcaacaaacaagtaaaacagagaaatttattcgtaggagatatgatgtagaggcgagtcttcttaaactccaaggacaatgcggtagatgtacttggacccaactgggagggcccatattaagtaactgaagtcagtgagtcaggagcctataagttgggttagtataatgaaaacatggaatttattctagtcccaaggtactagaacggtgaacacctaagaaggtattaacagtgaaacatcacttccaaatggtggccccttgtgtggatgtcgcataagggttgagtgaaactttttgtacttaggtctgttgaccactttcaaagtacttttaaaagtttaattttaatcaaggctaaagacccgctcaggtcatgtactagctttgatatttaataaatgtaagttacttaatagtgactgcacttattttccaataaatgaaacatgatttgattattaaaattatgtctttggtaaaaaaaatgtgaattgtgttaagtcgcaataaacacaaaaaattgcttaagatgcgcacaggaaggtccgcccgatattgaatattgaaatagacaaaataaatgcaaagttaaaattgtaagtgaccgagagtcaaaattttgctcgatcacttgggggcacctatgtccaaatagcacaaatgtaagtaagcaagtaaaagtaaaaaaaatagttaagttaaaaaagcatgattgaagttcaggcttaaaggctgcttggccaaccacttatcttaaaagtaatccatgaataaaagctgcttggttgacatatgtctaaaagcaaaggcatgtgggctacataaaaaaaaacaacaaaaaaatattagtccattagagtagctgggttgagcgggtcaaaggcattgtcttggtcagctacagagaaattggtgtcggcaaaaatagacacaaaggaacttccaactttggttgtttcctttacaagtttggcaacctcctcttcaactcgtttgactttgatagcctctgcctgggtgaacatgacatctttgttctcctttagataattaaaattggtttcaggattggccacccagaactcgtaaaacacctcatttgcacacactaaaaaaggtcatcaatctctttctcatcttcagttaaaaggaccttgtgctcctcctcgttctacacaaccaggttttggagttcttccttctcccctttaagttggtttatagtcttggtagactcttcaagctctttctccaaatggggtaactccataacctttctcttatgcttagacaggtccccatcaacatgctccaaggactactccttttcatccaactccttaagtcactcaatcttggccttatcaatgacggtctgcttcaacaccaccttggttcaggaataaatatacccaacttgcaagtttagctaaggaaaaatggcaatcagttaaggtaaaagtcaaagctgatcggatgaaataaaaggacacaaatttaccttggtgaagtccctgagaaggttccccatcaagaagtcagttggaagagcatttgcactgcccaacaactccccagcgtctgcttggaacctatcttgataacggccacagacctcctcaacacacttcagcttagccaaatggatgaaggtttccttatccttgggcctctatgttggaaatattttactaggatctagatttactaccacgtatgtttcattaacatcctaatatgaattttaaaacaataaaataaacaca

SEQ ID NO: 115205 - DNA, 2128 bp, Cannabis sativa
gtgacatagctgtcagataattcacagtgttatgttaagtaacacaattgcttctagaagaagagcttctacaaccagagttcttacagtactgttgtttttccccagcttcgttctttagacagatagaacacttatctgtagttttggactattacacaatgcttagtggcatcatttacaaagtcttggaatactgcaatgaacaccttacagtagtaaaattcttgataccaaatcaaaatcaaacaaagagaaaaaaaattatacaacagtgttcatttgtttacaaagtgacccaagaacaattagtaccttgacaccagtcagagcttatttaaaaagggtcacaggagtaaagaataaataaataattaaaaagatacatcaacgaaaataaataaataaaaactcatacttggaacaggtcattcttgtagcaaaaatcccattctgaatctgccgaagcaagcaagccccctccatcagtgcttatggattcagcacacgaatatgataacagaggagttttagaattgaagtagtcttgccctttttcatctattctttgttcagtatccaaaatttcagcagaccaacaatcagatttatctgatgtttgattgtccatcatatttgcattgatatccaaacatccgccagataataattggtcctgactgcaaccattgacatcttcttcttcatctgaaagacatctgcagcaatcaaattcatccatctcatgtatctggctcattaatccatctctccatgatatcctcatctgggattgtgagacattctccagtgtagaacatgagttccaagaggcctgatcatcaagtatttgcttgaactgattaaaataaacagagctgcaagatgtactaacagaatcaaactgaaaactgaaatcaatgctgtccctatttggttcagtgttgttgggagacaagcttgtcttccgaagagactcaaccacagaattgagttcataatcaaatttacttttcatatgaccatccgtgcttaattgaattaagtcggaaaatctgtccgagttcgaatccaatctcggggtaagtataacatttccacttcctagtgaatccatagagaatggagaattttcgccatcaaaataatatgggcattttctttcttcattcaaggtggaattcgcataatcatgcgtggtaagtggagaatgatgattcaagggctccagtaattctcgaaactcagctattccaccaggagagtttgtagaaatattcttcctgccatgatgaacaaatgctgtattataaacatcttgatataactcctgactacttgagggcaaaaatggagaatggagactaatagaccctgaaggacttttagatcgacaagaacctatatccttcttgctcttatcctcctcactacatggtgataagagccaatgcattgaagcttcagaaggcaaagggatcaaaggagcatcagagtctgtacaaaccctctggacattttcttcttcatcatcatcataatcaaaactacctaaagctttacctttaccaaagcgtgaatcgttctctccaacagcgagaagccctctaggccggcactttctcttatctgtgatcccagaaacaacatgaccagctccataacaagctggtgtatttgttgaaaccacagacgacgagccacattgtatttcgggagacacagaggcctgaataggaggagttttgcttttttctttactagaattcacttccgtagacatctcaactctacaatctgaacgagacccagatgctaccttattcaatggcgtcaaagtttcatcgttaggacatggttcaagttcaaccaggccctttacaactgacccagactccacttcattggcagaaactccacttgagttcgaaattgagcaagttctgggttgttgccctgctgtggatctaggtttcttcgtagactgccattggtagagacaagaggagttattcttccgaacttttgtggaaatggggttttggggtttctccgaatttttcagaaaaatattacatttactttggttctccttggacttggagggtttggaagtgggcaacaaggg

SEQ ID NO: 115206 - DNA, 1523 bp, Cannabis sativa
  modified_base (40)..(66): a, c, t, g, unknown or other
aaagactattctaatgcatgatgagaaaaaatttaataannnnnnnnnnnnnnnnnnnnnnnnnnnttaaattttattctatttcattcttatttctattccgattcttattcccatttttgtgtttttattccttccaacctaacgcaagagtttacaacgtgactaagaacatttccaattatttagtggtgataattattaccctttccatatcatagtcaaaagtatgtagcaaggtagtttatagtatgtagcaagtggccctatctgtaggttgatgaatgataaggtggtctttcagctagtggtatggaatattatcaaagatcaagataatctttagagatttatctaacagagtctttttcttctgggcagacaagtagtttgtaaaatcacttaagatttatggtcaaaggcacaaagctcttgccaaaatttacgatggacttagcaatttcaagaagttggtaagattttatggttcaggattttggtggagattactttggaatggtggagtgctgattatcatgtagataatttggtatggttggattttcaagatgttgagagtcctttcaaatcgttgttggaagacatcaaattacccgcaaaatatttttagcagttgttgaaaacaaagtcgaaaagcctgacttcgaaaaagacgtaaggcaaatgcaagcaaaaaatcaaattatctgcagaatatttttagcaagtactataaacgaaatcatataaattgattttgaaaaaaaaaaatagtacgccaaagctaagtacgaatagagaaataactgctcgtgcatatgttcaagtttattttaatacttgaggaaataacgagtaataagaaatgagaaagttaataaaacgagctgcaattcataaatcatttaaaaattaagttgtgtaacttaaaaaaaatgataaatataaaagttttatttttaatgactaaactccaccacttcttgtcgagaaaagaaggaaggaatataagattaaatataacttgattggccattcaatcaggcaaaaattatcatacatataattaaaaacttggaataaaccaagaataattatctcaacccaaaaactacactacaagacgtttaaataaattcccacatgcactgtccagatcagcatgtaacaagaaatacaaagcaggaaaaagctaagaggtcgaatctaacaacctacagacagaacaaacagttagttgcaaagtttgttaaaactgttgcaactaactcccaactctctcttctaatctacaagctataaatacatgcaaatcaacacagaacagaagaggacagatcagaatttcggagaggaggagacttacagtggttaagtcttggagtcctagggttagagctcggagatccaaaccaaaggaagacatacacagagaaagaagaagaagaggattagcacaatattcagagagagagagagagagagaaataaacactgtgaaatacaaggagtaccaatcgtac

SEQ ID NO: 115207 - DNA, 2402 bp, Cannabis sativa
cacatattacctaattaacccataatataattataaaccttaattatttaccattaggcttatcgagatattacaattttatatttcttatttaatttttgggatattacatcactatagtaattgagcttattgagttttttattcatcttaattaaattgccccattatcttttaattaaaatactttcttttttattataactaattaaatatttttataaacaaataattagctaaaataaatagaaaatactatcatgactaaaaacttattgagttttgtctgattaattttttattttaatttaagtcaaattgactattttcattaattttacatagttaattaatttagttattttatttctatttcaagttgaacataatttaaaaaatttcaataattataaattaaatcgatcacataattaaagttagtttatcctctttaaacatgtcatgtttttcctcttcttagtataaaattctaaaattagccttgtcattttcttttgttctattggtcacttgagacaatagtttgagcttgtttagaagaatcatttatagataatgttaggaccatgaatacatgaattttagatctaataaacattagcataaatttactgttatattaattacttgtgattccattataggtttaaaattgcactcttaaattcatagaacgctatgtaacctattaagatatgttatccattgttataaccatcaacagtcattcaaacctctataggtgatctacataagtgggatacaatattactgttctattcctcagagtatttgatccttaaaatacttagttacttgtaaatgaaactttatttataccattgcaaatgaagtgagatctaattcatttaaattccttgaactaagatataaggaaatcaccctttcatttctattatggaaactatagatttttataactatgataaaatcagtcccactcaattatactaccaaattattgatccgaattctgagttgattcgtaggggtaagctgttcaatattggacattcaaggaaacattcttacagatgaacgatgtggtaaattttttattctatggtgaaaagagtaatgacaaaaaataatttcttgattaaccaattttttgcgaatttcatttttgtgagtttattattttgttttcgtataaccaagtttatacaatttcttttactttgatagaatttgtcggtgcttgattcatttcagtgaagcatacgaagcaatgaaccatgtgataaatttttttttttctattctactctattttaatatgtatttattatttatctataataattaaaataatagtgtattcaaaatgatcatgttatctttgagtttttttgtttggtgtacctttaggaaaagataatgacacctttttatctcactagtttttagacgtgcgttgcacgtataatatatatatatatagttgaagattgtatgtaattccgtttgaaaaaaaaaagaaaaaagaaaaaaaataaatataattttttttttacaaacttgaagctttcatttcacaaagaaggaagaacaaagtcaacatgtagaattggaaggcaaacaaccattccaaacgcactcgctaagaagcctgagaccgactttagcatgatcatgagctaacatgttatggctcctatgaacatgcctaacaactagtccagggctttcaactagcaaggctttaatacatttaactacatcacttagaacagaattattacaaaagacattattaattttttccactactaatttacagtctgaaagaaggatagaaaccggcagtttagtagcttgtaaccattgaaccgcagccaaaatagcttttgcctcaacaacatctggaggaagcactccttgaaatggaaccataaatcctgctttaatgatcccacattcatccgtgacaattgaagctaagcttgtcttttgagagaccacatcaatagctgcatcagtgttaacttgccaggtacctacaaccggggcagggattggatcttgagactctgaacttgctgtaccctgattgaagttattggcacgagctaactgaaattcatccaaaaaattacaagtagattgaaaaatatcttgtggctgaggccttttatgattatgaaacactttattcctatagttccgaattgcccaaacaaaacaaaaaatatagcaatatgttgagaatcaaaggtttcaaaagcagcaacaaaaaagctatccatggagttattcaaattactattataaaagctaataaaatttgaatttttccaggcttttctagcatacttacagtccaagatggcatgtttcactgtctccgtggtttgatg

SEQ ID NO: 115208 - DNA, 1472 bp, Cannabis sativa
ttttttaaagttttttattttttttttttaaaaatgttttttttttttttttttttttttgtgaatttttacggaattctatataaaaatccctattatatttaacggagcaacttaaaccgcaactaaaatccgtatagcataattcacatagaaaccagagaaactattttagaaactcaaaccataaatttttttaaaaaaaataaaaaaaataatatatgaagtaattttcaattttttttttccattttcatttatatatacacatagcacacatatttatataatttataatattttatttatttgtgtattataaatatagtaaattaacatcttgccaaataacctcctccattccttaatttatcccctttatcatcccccaccaggcatcttcatagacttgcaatttttctttgaattttattgcagttcaacatctttgttgctcttaggatgttataattgtaagatgtatgagttcatctcaaaaccaattgactgtgaggagtagctcatgcatcttatgtgccgtatgtaattttcatacattgtcgaacataggaaaaagataggacaatacaagtgggacatggacatcgattgggagagacacattaactgggattttaattcaccaagtttgggtagcaaagtttccatggtcatggaagacctaaaactatggtgttactggcatctcacaaggctcatttttctctgtcgctggacactactacgttgtgatgatgatcgatccctttttattaatgttctacgaatataacatatacactatactatatagtgtatgtatcaatgctctgtgactgttacaatatcatattatttatatcacaggattttattggttattaattcacagtgcagactagataagttttatatatatttttttaaaaatcttggtgttagttaatagaattttaatcgttttctatcattttcttggtttttgtcttaaaggagaattcatgaattttaacatgtaagaatgcggaagtatatggttaaggtaatagaataagtgagtatatggtaaggtacatgagaattcatctcaaaatcaattgacaatgagaagagtagttcattcatcttatatatgatatttaatttctatattatcaatgtgagactctctaacacaacaatgtgtcaatagcctcctacttttgccgtagatgaatcacttgcataatgagaacttctcgatactggccacttgaacacaaaacctcgaacatacgtattcttttatggccacttgaactagtatcaagtgtttttaatatgagtgtaaatgggtcaggtcggatctgatccgacttgatccagattatataaagatctgccccgtcccgccttgctagatcagatactcggatcagatcagatccgactcgacttattcggatcgaatctgatccgacctgactattttt

SEQ ID NO: 115209 - DNA, 2579 bp, Cannabis sativa
  modified_base (32)..(57): a, c, t, g, unknown or other
  modified_base (2517)..(2538): a, c, t, g, unknown or other
tttagaaagttcttatttaggatgttaataannnnnnnnnnnnnnnnnnnnnnnnnnctggtaaaataattccaacagcctaggcaccaggtgttctaggtgcttaaaaatgaaagttcttcaaatctaattttgatgcctctaatacttttgtggtatgtctagtttttgtctcagtgcaaattttgatccattttccctaagacaatcctagaaaatgaaaccctagttggattttaaacttgggagctgggtgaaaccttagtcccccgggttgatttttgaggtgttggtttgtgtgtttttagcttgtgggccccggacttggatgcttgatgtctttatggtaaaaatagtgaaagatagtgagttagaaacaacttggtgggatctaaacacccattctggtgttctcgaagtgaaccttggcgtagggctagggacctctcacagatggacttgctatgatccaggaatactcaactctaggatgttttctttcttgtcacatgtcaaacattgatgtcaacattatcagggctacttttggtgtaaacatttgcccccaagtcaacttgacacctgtgtgaggttgacttaatgatgtggactaagctcatttctctcgaaactataaggtggggatcaatttttacagtcttagacaattatttctattcattgcgcattcctactaatagtaggattttgaatccctattccctctttaatagtggaattcaaaattctaagtataaaaggagaagagaaaagatgaccatcatttcttatcatttatctcttccttttcaacttaaatttagatgactctttgagtgatttccattgatttgggatacttctaaaatgtgtcaacatttcaatgtcaacacttactctgatctttggttgttgtctaagcattggctctgttgttgcactgtgtgtttatgtgaatataggtgtagtctttgtcttttctttggttttagccttgaagttttgtagcattcccttggttatgcttacaacggaggttgtcttattcatatcctcgattcaataatagaggaggccttcttcaacttcttagctttatagcgtagggtgcctttatcatctcctcgactttatagtggaggaggccttcaacatccccccagctttgtagtggatgaggccttcatcatctcctgagctttatatcggaagaggccttcattattccatcgactttacaatagaggaggtcttcctaatcccctcaactattggcatagtagaggaggtcttcttggtgaatgtcaacgatgtgttgtaacatttgcatgctactcccttgcaccttacccacaaacactgttgcgttggcactaccaggttcgacaccactttccagaagtacgaaccgaaatcaaagcaaagtctccttctccaatctggaaaacatcgtggatttttaccttcgtctattatggaggattagggcacgagagttcccacatcattgaccccaagtgattagaacttttatagtaggagaaaaattgtgagccttgatttcaatgcaaaattcgattcgttgatcaccttagcatctcgtctttgtgaaaagtgtgattaacttctagagccaaattcaacaatgattagcttaacgtcaacattattaatattagtgatgctgttttttcactataggattgcattttctgaatttttcgttttaaattgtatttgctgctctattttgggatgcgaatagggttttttgtttgtgtgattgccatcttaggtagatttaagcatcacaaaccatgttgtcattataattttttgtttataaattcctggagttggtcaatttgcgcagaagtgctggaaaaatctcctttgaccccaaatccttctggttatgactttgtctttaatttctgtcatctttttctgtacatcattcttgacttcctatatggaatcagtaactcctagaagttctcatttctagatagttagtctagttggaacctgtcaaagaaatttatgggtgaggacccatagctccctttctatgttatgtagttaaggtggctaactacttggttttcttctttttgtatagaaactatgcctaagcaaacacgtcaagtgaaaggtgactcagaggaggaaataatgcagcaatgagatgctctaaaattgttcatgaatgacagtccatggaagttggaccaacatgtcaacatgtaacatattaaagaattataacaatctgaggaagtacgagaccctacgagggcttcaaagtgttccaaggtcattctggaataggatctccattcttggggagaggcccagtaagtgcgtggatggaggcttcggtgtctgtagctgggctcatattgagattagggcatgcttgccctcaaggtgctatttcgctaatttttgtgctatgaccagattagcatctttccagcttattcttcacgcatactgttggaattattttaccannnnnnnnnnnnnnnnnnnnnnatgttgtttaacatcctaatatgaatttctaaaacagtgaa

SEQ ID NO: 115210 - DNA, 1809 bp, Cannabis sativa
  modified_base (68)..(68): a, c, t, g, unknown or other
ataagctatcctggttcgaggaggttccagcgctggtggcggacgtgggcgtcgtaaattcatgagtnatttagatcactttgtcaaaaaaaaaaaaaaaaaaattcccacgccaaattgaaaacatgaaagcaattggagatctagccttaagccatttgaaataccttacccaaatggtgttgtgcaaacttggccatgaaggatacttttgaaaagtaacttttctcctctatcaaaagtccaacgaacagtggtgtatttcctttgtcgatgaacaccatatctgaacgcgaaagttgtcctccggccacccttaccttcttttctgttgccggtgcagaggtgcagtaagccaattgcacctccttcttgcgatacccagagggtgaagtcgtactacttctaggatcccaaaccatagacatttgacctaaatgaattattggaatctgagtaatgtttaatgggccttccttcatacctggatcccataagtcggtagcgtactcgaccccaaatcgggatcagaaatcgtgttgtaccattagtaacggcgttcacaacttgctggtcgtgctttccatgatcaaagagcttgtgagccacctttgacagcagcggtgggttgctttctggccacatagcatccccttgctgagcttgaggaatttcaagtggaacaatctagctcgacttctctttgtacaacaccggtcatccccggcatcgtgtccaacactgggagaccgatcttcgtctgtgacaatgcaagcttcatcgtttgattggatcaattgcttgatatgttcgctgcttctttttcagagagcatttttgattggaagccattactcaatcccttgattttcaccatttttgttggagaaacaagaagatcaacaagtcgttccctatcattctgcaactcttcctcctgtgtgctagtttgatgttgaaacctcaattgtatttcaactgagaatgccttgctgatgacatcgggaagtgtcctcagcttatatccacgcacattcgtcttcacctccgctggaagattcctaataaatatatcacaaaggaaggtttcggggatattcgacaattttgctgcaatcggaataaaccaaatgcagaactccagcactgaattatcatatcggagaaccatcaattcacctccgctggaagattcctaataaatatatcacaaaggaaggtttcagggatatccaaaaatttctctgcaaccggaatgaactgaatgcagaactccagcactgaattatcatatcgaagagccattaattcatcgaaaggatcgtcaacaattttcgggcagcagttgaataacattatgtggaattccaaccaattttcgattgaatcttgttcttccactgcttgaaaccatctccaggcaacatcctccaaacacgcttgagccacaactaccttattactctctggggtttgataaatctaaaaatattcttctgtgcgaagaaccccaccatacggggagagtgggaatctcgacgccatgacggaggccacatgatcatgctctaatactatttggtaggaatttcctatcatttaagcgtaaacagtagccaaaagaaggctactttaaaaaaaaaaaaaacaattagttggctaggctacagagaaagagaaatgaaaaaaagaagagtaatttgcggctaaaccctcccatctatcgtttcacttgcacttaaccatccaaccttaaattttggtggtaaaaccctccaaactatcattctgtttgtatttttaaggtgt

SEQ ID NO: 115211 - DNA, 1485 bp, Cannabis sativa
  modified_base (1418)..(1428): a, c, t, g, unknown or other
ttttttttttttttgagtgtatcttttcattgtttttcttttttaatataaacaaaagtatatgtaaatatttgttggttgtcaaactaaaagtaatgagaaaggctactttaatgctatctttttttttttttccattgcttaaaaaattctaacagaaacacccaaattttagtagggttatttttaacatacatgtatacttgaattaaacatataatatattattctaacaaccacacacatgttcattcgagaataaaaactagaaatatgtgactataattggttaagtggacccacataacagatagccatgccagccatttggtaggactcacacaactgtggaacgcaccatttattgaggaccaaacatatatcctttcccttttacaccaagttgtaagtttactttacattattacgaaagaacctctcaaagtgattccctaaatctctttcaaataatatacaatgacataaatattggtcttaaaagtgagtcaattcccttaaatgcttctcatttctttataaaggcattgatattttttttttttgaacaaaaaggcattgataattttgacaaacttctcatttcttttatcatctttattatcttaacatgatatagcaataaatgtagatatatgactagagtgagtgatagtgatatattttcgctagcttaaaagtaatttaggggattgaatgaatcaattggaatccgactctggtcaattacatgttcaaacccacaagtcgtttacttgggaaagtcctattttaagattaaagttaactatggttaggaaaaatgaaaatataggaatgaaattggggatgagaataaaaattaaagtagagtagaataaaatttgaaatatatatgtatatacatttataaaaaagaaaaaaataaaaaattattaatttttttttcatcatgcatttgaattattttttcttctatttcaaaaaaaaatggtaattttaccaaaatagtaaaaaagccattctattaaaattacataatttttgaaaatacaattaaacaaaaaatttaaataaaaattaatttatttccattttattatctccaacccaatgcaacttaaaatcttgcaatcgatcaaccaatcttagaggaggactaatatagtagtcactcataagtcataattcacactattttattttattttattttatttgataatagtataagatatttgtgaacatactcttacatgaattatataaattaataatttaaaataataccttcagaacaaattagaagacttttcaaataaaattacttttaactattttgtttttaaaaaaagatttttttttgtttattttgataatcaaaaaattttattttagtcacaacaaaatttgtaactaannnnnnnnnnnttgtgactaattataaattattgttcttatgttgtaactaaaaggtccgtagctaaa

SEQ ID NO: 115212 - DNA, 1444 bp, Cannabis sativa
  modified_base (1086)..(1093): a, c, t, g, unknown or other
  modified_base (1230)..(1233): a, c, t, g, unknown or other
ttgcgactaaaaatacatttagtcacaataaattgtgatttttgtggctaatatttttagctaccgactttttagtcacaatgtaggaatggtaatctataattagtcacaattttttcacttttactcacaaattttgttgtgactaaaagaaagatttttgataatgatactctgataatctacttcaaaaaaaaaataaagatcaatcaattttgtttttgattctatatcttaatgaattaatgagatatattttctatatcactaaattattcataaactatatgaattattaaatattaaatactttttagttataattgatttttattttagttggaaaattcgttactatatatccaactattaatttcattggactagattttataagcatattaattggattgtatgagaatttcacaaatagataatatatgcttaacacccatattatttatcctcgaactaatttaattaatacatattatttatttatttatttttaacatagtacttattgtatgaatgagtataaagacatgaggactttgctagggtttttgcttaaactctctgaagttgttgttgcccttattcttccaatcagggttcactgaccatcattggccttgggtgtggccttggtcgggaattttcatgagtgccctaactttctcaaagtgagggtggggtttccttttttatttgattggatttttgttttgggagatttttctttctgggtgaggggttttagggttgtgaatagttgactaatgtttgctttgtgtggtgttcatctgttatgattgggttagtgggtgtgggtttggtggctcctggtaatgggtaggcttctggacttcaacttttggatctagtttgatctctttgggatcaaattgtgtcacaaaggttctaggtctaaggcgaagcagtggtctgggtatggtttggtcgcttttgttgtggtaattttaacacgtaagtatacgtatcatttacaagtattagactcacaaagagtgaggtcgatcccacaatgatcgtagttaaatactttaaaattaaatctttacnnnnnnnnggttatgtcaaaattaagagaaaattaaatttagaaacactaaagaaacagtgaaattaagaagcaaataaatcaaaaaggaaattaatgatgattaaagttaggatttcgattttaattgtatctattgattatgnnnnaatatgattatcttcctattaccaatttctatgcaatagcaggtttactaaggtacgtaatttatagtcttctcagatatataaacctcaattacatacaaattttctacccttgtgataattaaacatgcaacaagtattaaacacggaaattctataagttatctaaaccatacaggtattctcgtcctatatcgaaattcaattctat

SEQ ID NO: 115213 - DNA, 2900 bp, Cannabis sativa
tgagatactacttgattgcgtatacttgcgtagtaatcataattttcgtaacatctgacgcaggggacaagatctgacttgatgtcaagcgaggtataatcgttgggagtagtttcggattaagtcgtagggcgcgtcctgggatagtcaatttcttgatcatcctggagtgctcgtgcttcccatttgactccaaatagcggaagcatcagactagaacttcaaaaatcactctgtccttcacaagggaggcattctttcaaacacttcaatacctttccgtgatcctatctctatatggggtctgtgatatcagtatatgatttgacgtggcacccttctaccgcttccatgcagaatccattcaggaatagggataatctttaccccaagctctcgagacttatatcaagagcttgcagtcttcccccaaaggttcatcccgagtttctcgtgcttggtgatatcacgaaggactcgctgaagcacaatgcttgattagtggagtcgtgggacccacgctctacattttaggcgcatttcttgagaaaacgaatgatggctggtttcaaaaagacgcctgtcctcaggtgccttggggaagctaccacaaaatgatgaataataaatattttattctcattttttatatgtattaaatgccaaccttttgtatccccaaccattggatgatctttccttcagtctatttaatttggaccatatattttaaaatcattccaatcgttggaatcgatataaatgtggtttttgacaactggagtcatttcttttacttcatcaataatcttctaactagagagaaatcctcttttcatacaaacttattgctcaaaaaatctcaaccttctcatatctcttcattctaatcttgacctctttctccccaactttgtcattgcgttcccttgacatataatatcatctcaagctgtcctgtaatcgaagctaggagagccattgtcgtcgtgcaagcagcgtgattatagcacatcaccaccatccccattcttacctcacaatacaaataagtactcctcaacttttagactgttttttcaatgctcagtcaaaatgtgattctcatttttgaaggaatttgtcactttgcgtgcataggacttgattttaggaattagggttagtagcatctagaatttatttgctgggttcgtaggcaaacatttctagttttaggatttttaaagaagtatcttcttttaggctcgaattgagatgcatgctcaagacatgaggtccctggttctgagggttaggcaggacatttttgagtttattagcagtccttttatttacttcttctttgattttttttatatgcattttttttgccttgccttcgaaaagaaagtctaggcctttttgttgctattatatgtttgggttcctgatttgtcatcatgatggctactgtacggtagtgattacgatgataaagagtcagacggggccctctccaaggagttttgggggtggcttccccaggtaccctatttgtcatttatgtagggtactgagtgcttgaactttgtttccactttttcaatgtctggtgaaggcaatgatttctatttggccttagtgaatcttgaggagaatcttgaggcatcatccgttgaagtacctcatgctgagagaaatcttagagatcccattccagatgagggaccttccgaacacgttcaacctaagtgacgtcgtaagggcaaaggcaaagctcgtgtagtatctctagtccctttagttcttaatgattatatctgggatatagatttaaggccaaacctgttgtggaattatggtcttgtggaggcatactcaaatgatagaggagtgcaaaacattccaggactcatgtggtacatgatgtctattcttggggagtcattgtccaagagtgtggacagctttggagcttggagttgggcgcatatctcttgcagagcccatctcccacttaggacctatttcatagagttttgtgttaaagctggaattgctccctttcagcttttgccagttgcatacaagctactcactgggtggtttgtattctgtaggtctcggggacaatctgctccaactccagaagagatattatacttttacgagttaaaatctcaacccatgctcggacaccccacaaagattggtttttatcgtctccgaaattacaaaacatgcctggtgtcccacgagcacttcttctcatagcctagactaccgtgaatactgattttttactatcattttttccatgaggcgagttccagcattatcattggacttcaaacttccgggtacaatcttctgctcctttttgttatttttgtttctttaatggttcataggaggattacatctcaagatctaactcttatttgttagttgcctcccttccttattatagagattgttctcagaacagagctcatggatgaactgagacaaagaatcacattatgagcctttctctaaagaagagttgagtgtagaggggctggtgaccactgagttgttacgctagtatggcttcattgtcacattccaacatattcacggaatcaatggcaggggacaaccttaaactcccagcaaacaacttttgtaacgccctatcctattgggacgccacgtgtgtaatattataaactagtttattactaataaagtaattaattattaaaatctgtgataatattaaaaattttactaaaataaaatactaaaaacggacatcataatcggcactaaaattgtgttctcgggatccctgttgtaaaatttttacaaaaaggttaaatatgacaacaagtcaaaatactaaattaaaatacatggtagatacagtccaaaaa

SEQ ID NO: 115214 - DNA, 1605 bp, Cannabis sativa
  modified_base (1385)..(1386): a, c, t, g, unknown or other
  modified_base (1428)..(1429): a, c, t, g, unknown or other
  modified_base (1545)..(1573): a, c, t, g, unknown or other
tagtccaacaacccatgctcttaattttctatcataacccttcttcttctgatgatgatcatcatcatatccttaaccctaaccctaaccctactaataaggatgaaagggttttcgagattgatttgaacctatttgcatggcctaattggcattcgaacaataacaaggagccattattgtttcagtgttgtgctaatggtatattttgcttcactagaaaatcatcttgtattaaaccctatttggttaaccctttgagaaaagaggttttggaattaccacctttaaatagagaatcttttgcgggattgagattccgttatttttacggattagggtttgataaattaaagagaacgtacaaaattatatgtgctgttctcgatttatgtgagagtaattttggagaatattggattatcattagtttttacacattgaaagattcaaattggattcaactcatcacaaaattatcattacaacctcatcgatatgttccaatgggatatcctacttggattgataataaaggagttttttattgggtttgttttgatcctaatactaattctactcataataataattgttatatggtgatggcctcacatattgagaaagaggaatttaggtggatttcattacctttaaaagctaactgtgattatttttttggtgttaatattaagttggttgatctcaattatggagttttgagtttggtacattatacgtcttcaaataacattaagatatggaatttgatcaaagatgatgaggaagaaatttgggttcaaaagtacaaaatcaaaattaggacaacacttatacaagattcttggccttatatgcctaattaccataaccctaagcattcatatgtacatatgaagtcatgggattcgtactctcatcatccctatgaagttatagggccatgggagaatgatgaagtgttaataagatatttaacagggactttcatggcttataatctaaacactaaaacatttaaaaagctcaatcttccaccaattgattcaaattgctttgcctatagctacttcccaaacttggtttctgtctcttggattcaagatcaacaattattgggaatatagatcaatgcttctttaatacttagttctattattttacattaattaattttatagctttcatgctttttatttttatttctttgtggatatgtatagaagaaaaaatagtaaaaaatgtttagtttatctcacactagggaacgatacccgacaacaattgtaaattggtatagttttgtaacaaattttatatattttttaacatatttctcgatttttatttaaaaaaaatatatattatacttgaaactataatcnntatattatacttgaaactataatcattattattattattatnnttattattattattatttaaagtgctgcaacttattattaaggattttaatttttatgtatttttaattttttttcttaatgataaaacttataaaataaagggattatttcacannnnnnnnnnnnnnnnnnnnnnnnnnnnnaaaatacggttttatggaattttaaatatttt

SEQ ID NO: 115215 - DNA, 3692 bp, Cannabis sativa
caatgacgagaacagggagttttttgggacttgcttccacagggtcatatggtcattcgcctgtttatgggtacaatggtctggcaacagggcccaccatgtctttctccaatcccatgtatggacctggtggagcaatcccctgcatgttggattcacgaggtacgttgatgcctcaaaatctggtttctactgcgccaccttttccccagcatccattcatcatgggcatggcgaatgcacatccaagtctaaatggtgctggaccttcacgccccaattttgatctaaattctgggtttgttgttgagggaggaggtaacagggactctgttttgagaccctttttcatatctggccagggaaggcctctggaggagcagcttaggaccaattcacagccgccatcaagttctgctattggtgggaaaaggaaggaaccggatggtgggtgggaagcttaccaatttagctacaaacagcatcaaccaccgtcgtggaaacagtaagtttttgttatcctgcacttttgtgtcgattcatgaatccaaccagtagagagacgcatgcgttcgataaggtcgaaaagattatccaaaagagtaggtaagcccttcggctttattgagaagggaatcaataaagctggagggttttatctatgtaacatgatttatacgattaatttctgaagggaaagaagttaggttcttgctttgattttgttttttatgtttaataattttccattttttttcttttctccctgtttcatagaagggctttgcaaggttagaagactgggatatatgtagctgtagtttcttgtccatgtatatcacaaaaatataggaacggatcttaaatgattttggttggtggtgcttgtggaaagtttctttcatgtcgagtctagttaatctatagattaagacagaattggtgtatagaaaacatcctcaccgtttcttctttttcaagtactcagaacttatttaccaccactgctactagccttttattttaattagagaaagtgtttaattttttttcctatccaatattagaagttattatctattttggggctgttcggaatgattttgttttttttttgtttttgtaattatagaataaagaatacatattttccatcatgttttgatatttaacaattaaattctgtttggttaaagtaattactattttttttaataaaataaaaactaaaaaacacatcgatgcgttgggagtacctattgatggaagatgggttctacgctaagggactttcgtctttaaaaatagacgtagcgttttgctgacgtctcgaatcaagcttttgttgcgacatactatgattttccctagcatcaattgcgttatcatgaataatggtagaacttggcaatgggagacatcctaaattgaagtttatgaagaagacgatgacggatggcataacgccggagctgaaaaggacaacaaagtttgtagagaggaaaaaatgaatagtgagattagagttcatccaagtatttccgatgacagttaaaagagactacagaagcatgaaaagaaaattaattagaacttgaaaaataaagaaggttatatacatatatattaatttcaggttcttaatacgacaacataatttcaatgattaggattggttttgaagagttagcctaataaaacattgaatttgtaaatgcacctagagatggaagattttttaacttgaaaaaaaaaacaaaaaaatatttagacaatgagatattttgattcgaagaggattttgtattgattgcgaagagcattgtaaatttattagtgattctaattactatgataaaaaaacaaaaaaattaaatatttaagtattataatatgaaaaacttagatattttcgcatcaataactcaaattatttcaatataggtaggtaaaatccaccactcaaggtttatgagatgtaagttgagagatataaattgaacaaatatgactccttactattgggatgtactactgttttcaattattcatgagtgacgacatcatcctttgtcgcacttagttatatgcattgttgtgtcgtaatcattagtcaccaatatgggctgaactttttgaaatgacaacctgggaggcacaagtatgacttgggacgaacaaaatatgagaatggatatgatacggtataaaaaatatgattcaaacacgatacaatacgataaacctaacgacacgatacgtaaacacattatatttaaaagctttataataataatcatttttatttattagttatatataatttaaaatagtaataaaatttaaatataacaagtattataatctatattaaaactatttaaaaatattaaataaaattatacatgaatttattgtaacagctcttagttaaaaatataagtacttatcagcaaactagttatgtacaatgtacgtatacttagttatattcttaactagaaaacatgccgtgcttcacatgcatttgtttacgaaaattttaacttatatatggacaaatttactttttttgtttgatgataaaaatacatactacgaaaattcactaaacacataattaataataacaccaaatttatatttaattcataaataacaaacttttattatgtttgccttattactttatcaacatttatctcacaattatttaaaacttattatttattccaaaattaattacctaacatttacttttcattaataagctaactaatataattatactttaccaattttataatatgccctcttaatcaaataactttaccactcataggttaaattgcgtgcctaatctcctaatccgagtccaggtcctcctcttacccaatcctatatgtactgaaaaaaaaaacagtaatttaacatgattctcttcagtagttaaacaataaagtaattgactgtaatcaaagtaaatttaaaattgtagctggaccacaagtgaagtcaaaggctaaagactaaaggtggctctcgttgaagaacgtaggtggttctatatatgttttctttttcttttaataatgaataattctatatatatagttaatttgaaaatatttaagatttttttttttttaaaaatatgttactattataagtttaattttgagatatttttgttttttaattattaattaatataaattataaaaaatgcttttgaaaaatatataaattataaaagatgagaatttaaatatgtgatggatgtcatttgagttacatgactatatgtatatttttaaaaaatatatttatttattaattaattataataagttttaattaattaatttagggtaaatatcattttagaccacgtgttttgcaaaagttaccaattggactctctgttttgttaaataaaaaaaacagaccctgtattttctaaaattgtagaaatagaactctaaactgattttttgttaaaataaaacttaataataatctgatttagagatgttatgacaaatctggttatattttttgtatttgttcatgttagaaattgtcttaaagttgattatattaaaaagtagaattattaaaaattaagctctgggtcctatttttatctttttggaaaatatagagtctattttatcatttagcaaaacaga

SEQ ID NO: 115216 - DNA, 4359 bp, Cannabis sativa
  modified_base (309)..(313): a, c, t, g, unknown or other
cactctttccctaatgtcacttttgccagcacaatggcaaaagtttagtattgcgctggtaaaatggaatttacttttgatgtgttggcaaaaaggggtggcgaattaacgttggtattaaaacttttttcagcacaaaatgaagagcgctaacaaaaatgactttttccagcgcataaatgtgctgctaaaagttagattttagccactgtaaatgtgcgctggtaaaactttaacctttttgccaacgcagcttgcgaaatgcgctagtaaaagttacttttattagcgcagtagcgaactgtgctnnnnnaagtgacatttcttgtagtgttaattattttttttagacagaactgttatttttgtgatcatatttaatggctcttcttatttgctctaatattctagcttagttttttctcttaagaagtttaaattgattatttaatttttactttttaatatttattgaaattttttgtgtaccataaagttaagtagtttgtttttgtgtaagttgtgacttattttattataagtatagtagtatgtgatcagtgtgttttgttgaattttaatatatggtggtggttgttttgtgtttatcttaagaatatcataaactaacagtgacacatgatctgttccgcagttagtaaaaataagtttttcttgataatataatatttcggaatatttttcgtttaaataaaaattcttattttaatattaccattaagtagtgtgctaattaaattttatatattttatataagtatgttttttattttccttatttggtcaacatgcaaagacttcaaaagataagttttattacaattctctttcttcaaaattttactatattattaatttatatgacataattttaaaattatttttttaacatttatttatgaaattattaaatttatttatttgatattttggttaaggtatcaacttttctaacagcagctcttgctttcttggttggattaagatggactcaaggaaatctcacaatgatttaggcagaagttgtagctctaataatggttcctagaattggactttctctcttttcttctgagcctgattatttagatttgatctctacttttttaaagagattttcttcctataataatttaggctctctatttaatgtattttttagtttattgtcaaattttcttaagacgtcccttattcatgcaaattattcggttaatatggttatacatgaattaactgcgcacacagttagggtggatggtgagctaatttcgatagagaatcttcgatcttttcttcatgatgtactcatcgctaattttttttctcaacaaaattttatttattgttcaacaaaattgtactttttctattttgtgaatttttagatttttttttttacattattttagtttatcattactcaactctagttaatatttgatctaataatacttatgtaaaagacttttaaattgataatccacctttatgagtcattttttattttttttatttatattaaattaatgcatgaccattaaaaatatatatatattaatgtatggaataccacacatcatcttgtttaaccacaataaatatttttatatattaaaagtggctatttaacgtcatttcttgatttaacggtgtttgattcagacggtatctcaaatggttgtatattttttttttattatttttaagttagtgttggtacaaaatcgacgaaaaaaggtataaaatatgatttttatactattcccgtcagttataaaagaacgcgatattttgataatgattgtaaaatcgacgtagaaaaatactttatctgcgtctgctagctgtatatacgtcggttagagaaccaacgagaatagtataaatatcagttaaaaaaagatgaaaattggcctttttgtaatagtgcttatcgagcctagttattatatactcatatgtccccacaaggaattttaaaggaaagtttatgattactttgaaataagaactggaattttattaatatataaattaaaaaaatttactccaatgtttgcaaaaagatagttagaattacaacttcattggtaatagagtcttagatgctccctgtttcaagtgttttttactagcgagctgtttaatcatgctagtttgtaaaactcctgctgcgattacagattcaacaatataaggaccttcctaatttgggttgaaaaaccctactgtaggatctcttgtgttggaaaatactcgcctaagtactaaatctccaacttgaaagtcttgactttactctcttgttgaagtaccccgtgatcctttgttgataaccgacatttctcatttgtgatttcatctctcacttcgtcgagtaggtcaaaagattcttgaagtaattcttggtttttctcttgatcataaaattctcttttatgtgacaagatttttgacctccactggaagcatggctttcgatccaaaggccagcgagaagggggtatgtcctgttgctattttttcagtagtgtgatgggcccacagtacctttggtagttcgtcaacccatcttcctattttagcgcattgagtttttcctttatggtgtccttgagggttttgttgactgcttcaacttgtccattggcctgggtcgcgagactgacgagaaaatcttaatgattttgtttctctcgcactctttcaattagaattccaaagctacacattaagtttttgaccacaaagtctagaacttttttagaagtgatcgtaacctatggctcaatctcggtccattttgtgaaaaaaaaactactgctaccactgcgtcttttgctcctcctcgtcttgtgggtaatgacccaatcaaatctatttcccaaattgcaaatgggtagggcaaagtcatcatacagagctttgttgatgggatccttggaatgtgagagaatctctggtacttatcgtatttctttacaaactcatgtgtatctttgtagattgttggccaataatagtcttgacggataattttatttgataaactctgccaaccagcatggtcgccacaaaagctttcatgaatttctttaatgatgttcttggtttttgttgataatacacatcgaagtaatggcattgaatatcctcttcagtataattttccttcgattattgtgtatctcgacactttgtacatgagctttcttgcctcattttttttctaatggaagctctccgcttaaaaaataattcatgatgagtgtcatccatgtcggattggcatctatcatctctacatcttcttccatctagcaaatacttggttccactaatttttcaataatgggaaccaagatgaggtcattatattcagattgcgatgccaacttggccaaagagtctgcgtcaaaaatctattatcgtagaatttgttctattttaaaataattgaattttctaagttttttcgaactttttctaagtacttggctatttttattccctttgcctgatattctccaaggacctgattcacaatcagttgcgaatcacttaggcaatgagtaaaaatagttgaaaaatagtgaaatgagagtgttttaggtggtggttggcaagggttttgggtttcagcaggttatttctagtggtttggatcatgaaatgaagaaggtgaagtggggagaaagacgaaatggtgtaggtttatataaccctatgtcgtcggtaagttatatagtgtgcctatgctttcgattatttcctaataactgacgggataggattaacaaaacccctttgcgatttttgaaccccaaaaccgactatgtaggtgtagttctattctatacctacaatttttataagataaccgcctcgaaatgtcaattttttattagcgggaatattagaggactagttccacattattttggaacacttatttataagtgtatatatagcgtaaatttgagcaattgggttggacccgaatgagtacccacttttgtggtgtgcactttatcttttagaaaaatgtatttattaaattatttttttattaattgaaaatagttcttaaacatttttaattaattaataaaagtgagacattttcttctcagattttttagccacaatccgactcactctctcgctattagaaaaaatgattttcttcccgttattcttttctatgcgttctctacataatgcattagaaccaacaggagaaaaatattcttttctcacaaaaaaattagggtaaatactattttagactctgtattttgaaaaaattaccaattagaccttttgttttgttaa

SEQ ID NO: 115217 - DNA, 1946 bp, Cannabis sativa
tgattatattgaaatgagtttgatttagggcataaaacccaacatcagcaaccaccctgcaacaatcatctgattgaaacctttgtctaatgcaacatccaaccaacccccctgcaaccatcatctgattgaaaccttcgtctaatgcaactaccgtgcaaccatgcaacaaccaccctgcaactatcatctaattgtgtaagtgatagtgtaagtggtattttggtaattaaaattacacaaaaagtataaatgcggtctttaccttatagaagtatttttgtaaataaaatatcaatttatattttctatgtattaattcctttgttttatataacaaaaacaagaaatactgtacagtaaaactcaagctctaaccaaaaaaatttctaatgtttttatttatagagattttctattgaggggctaaggtgggtgggtcacactactcgttggcccttcacacttacgcgcaagtgaaaagtgatatcatatcaatatatattaccactgaattagtatattgaattttagaatttattttgagtagtgatgaagcgtgcaaatcgacctagccgctctcaatcatcactatttagtttcatatgtatatcttgcacatgcatatatgagttttgttattcacgatcagtagtgtttttaacactttttaaaaattattttcttaagttatatgactcaattacaccgatagcagtatgatattgaaaaaagtattagacacaaataatactttttaacaattttctctttatattttatatttatacatatttatagagccgatgtagtctctcacatgggctgaacatgttctattttggggtaatgcatacaatatgactaatgtagtgtttctataataattaagtatttttaaggagtaccaaagtgtctagcaactctatgaggtgatcaccttataattgattagtggttttatataatctttattaaagtaaaataagtgagacttaatattaaattgcaccaataataatgttacacattacaagagtgctaggcacctaatgctcaacaccacattgaagtagtggttaatagttttttttatttttttttattttattaaagtgaaatttggacttccaaattaattcactcattaaatacataacaaaaatatgttatttgcaatattcctagtaattatgtttaattaggcatactttattaaatacgtgatggttaattaaggtaagattataatcttactaaatctaattattaaataattagcgacctttaagaaaataattaaataaacgtaatttattaattgtggaaattttattaggatatataagtattatatatgtcatttttgaaataaaatatttttgggttcgacgaccataaaaactcgatcgattggctaagaatatcacgatggcaatagaatgaagtttggtcgtaccaaaatgtttttagtggttcttctcgttgtcaaggtaattggttatgaccaaacttctcctaaccttatagtttacttaagagctaagttttgggtgctatggtcatttatttagtttatgggatattgtcttttcgtaggtttctagtaattaaggctgaaatagataagttagggtttattaattaagttttttttttttttcgaataatcaatatcaacctctttactcttctcttcctctctctctctctctcaaaaggcttagaagccaaaagaaaagacctagtttcaacttgatttcatccatgttcagccaagaaatttttctccaaggatagaacaattgaggataagctaaggtaagtaaaaatctatgttgttactagaatttcacaacaccaagaagtgtaatttagctggtaaaagatagaattatttgaaagaatataaatgcgagtagtcaacctaaaacggcgagcactca

SEQ ID NO: 115218 - DNA, 1767 bp, Cannabis sativa
  modified_base (1609)..(1624): a, c, t, g, unknown or other
ggcattcctgctgaaccgctcttccgatctttgaccttccccaggcggtgtgggattgtacagcttacccggtatttctccttatggatcacgggactacatactgtcacaagacatgttagaaacatcaaatagttcaatgagagagcataaatttttgtgcaaaaagaagaggcacataatgaaattaagctgatgaagtctggctcgggagataaacccagcacaagcactataacggcgagcaccgtgaccactaaagtaaaaaatccaaatggtttgaataccaagaggaaggatgaatctagagactcatccaaggataaaaagaagcaaaagaaacatgaaaagtatgtttcaatttattcagtgtatactgaattaaatgagacacgcaaaaacatttacctcgccaacgaaaatcaggtcgcattttacagagtagaactgatgagacatgcaaggaacaagtaagatcctactaagtattgtcgtttccataaagatattggacatacaaccaaagaatgtcgttagttgaaagacaaaattgaaagcccaatctcacgaggatattttgggcaataactcaaataaccaaggttacaacctccctatgtagagggcaaggatatcttagttatttctagagggctgcacagaaatagtgcacagaaaaggtacattaatgaggtaaaaaatgagacatcaacgtttgctccagcctttgaagaaagtaaaatcagatggactgcccattgtcttttctgaagaagacccaaaacatgtatgataccctcatgtggatcctctggtaataacaatttagctcactaataagagggtaaaaagggttctcgtggatgacaagagttctatttgactccctcaaaaaatctttgggggtttgcattgtttaattattttcatttggttctccattttgtacaaaaattttgagtagttattgtcttgcatctgtctttcttttattcttggttgacaaaatatgtttatgcttttgggtgataattagcttagtgtcttgtactcttcatacttttgaggttaggttaaaagattcaagttacttgtatatgtgtgatccggataaattaaagtattaatgtatagagttgagcgatttttgtttcaatttcttgtcaggcccttgttagaatagagttatatacatactaaggtgtgaaaaaccatcttttgaataagctggaactttgtaattaagagttatgaagatgatgcactataccatagaaaatgactaccttcaatatggtgtgacaacatccagttgcggaatcatattaaaaaaggcaaaaaataaaaatttagccaaggaaattgatcctatttttaatgcacactactttgatgttgtctaattttcttggtgaacaaaaaaaatcacatatatatataaattaggtcactctcatatattattcgttgggtatttgataaaatgatgcttaataatactaaaaggctaattaggattatttccttccgaactttgacatgtaccaaatcatgccctttgaacttttaaagtccttaaaaatactccctgaattattgagattgttgnnnnnnnnnnnnnnnntccaattttagtaaaaaaattctaacatggatgaaagttcaggggccatgatttagtacatgtgaaaatacgagaggcattatttggtagacatcaaagtttgaggagcatgatttggtacataaacaatcactgaaatagta

SEQ ID NO: 115219 - DNA, 1544 bp, Cannabis sativa
  modified_base (787)..(798): a, c, t, g, unknown or other
tctcatctattttatattattttatattatttcataacaataaaatatatttttgggaaatattttttacttttctaattaaaaaaaacgattaaaaatgtgttatcaatatagcattcttaattatttaatgatttgtcaattaatattccaccaataaaggaaacataaaagagagaaaaagatacccatccaccaccacatgatatatattcaacattcttcatcaaacacattgtgattatagactgaaaaatcaatgcctgctatcgtgcgtcacattgttgtcatccatcaaaacctatagaggaagcaacaattagaattcatcatccataaacccaatgagtattaaaaaatataataagttgtttcaaagaatgttagagatatttattagcgacatataaattaattagggaggttataactatttattaggtatatgcatattattaagtatatatatatttattattattattaatgagttttcgataaacataaattaaaataaatatctagtacatcaaatattacaacaaactacaataaaaaaaattagaaaaaaaagagtattttttgaacttttttaaaaccttatggccttatatctagattagattttgattaatgatcaataatgaaaaaaaaatttattagagttaatctcacattgttcatgtaaaaataaattgtcatatataagataaatgggttactctttccattatcaattggttttaagatagaacctcattcatcttatcccaaattctaacatggnnnnnnnnnnnnttgtgatccgttgtgagtccaaatgccaccggtccaaaaagtcttttctgatccggtgttgccgctccaaaaagatacttatgttatctcccttttaacctctattttggatctttcagccaatatgtgccagtttctagtgttgggtctttaacctatttcaaaatccacaaatttctcgacgtgtacacccataaatttcccgatatttgaccttgtgggattctttcaaatatcacgttccttgaaggtcgtttgttatacccacacttttcaagcccaaacgtgaggagagtgtattagagttagtcccacattgctcatatgtggaaataaattgtcatatataagactaatgagctactcctcccattactaattggctttgagatgaaacctcattttatccataattctaacaacatttgagttttatgattaatttaactagttaattttttattagaaaaatatatatctaagtccaactcaacttattttatctctttcaatgaatgaaataacctagtcatgtaatagattatttaatgtaaaaataagagatattttttaattagattgcaaaatttagtataaaaacctaaattttataataataatttattcatgataatacccattaaagatacattcagttttcattagactacattcaatatttttaagtctatccagatccgatccaattatatattggatgttagattttcccatccgatccgatc

SEQ ID NO: 115220 - DNA, 1463 bp, Cannabis sativa
agaggtatgtttcaaataaatataaaattagaggtaaatttaattaattaggcatttttcaacttacccttaataataagggattggtgttgttaaggatatattctcgtttcgtgtatgactatgattagcgagcgagtttctttctataattttattcactctccactcttctccttccccaaatttcgttcatcgcttcatctcctatttggggttcttcttctttaataataataattaataatattaactgggtttgaccaaaaatggcgtctttttaaagccatcatcgtccctttggttcttattcttcatcaaatgaagttttatccaacacccatttctagatttgtctttggtaagcgaaatctctatcctactcttgattttcataattgggtatctgggatttttcatttgattattaatttgtaaattatgaattcaaaaagagatgggattttcccggatgaggttgtccttcaaattctagcaagattacctataaagtctctttatagaatcaaagttgtgtgtaaattatggtatagattgtgttctgataagtatttccttcagctattcaatgaagtttcagctaagaatcccatgttattggtggagatttctgagtccttacatttaaagtctagtttgatttgtgttgacaatagattgggtgtttctgaattttcattggattttttaaaggacagagtcagaattagagcctcttgtaatggtttattatgttgctctagtattcctgatagaggtgtttattatgtatgtaatccaatgactcgtgaatttaagcttcttcccaagagtagagagaggcctgtgactagattttatcctgatggtgaggcagctctagtggggttggcttgtaatttatcaactcacaagtttaatgttgttttagctggttatcacaggaattttggtcatagaccagatgggacattcatatgtttagtatttgattctgaatcaaacaagtggaggaaatgtgtttcttatcaagatgatcaatttacacatatgaataagaaccaagttgtgtttgttaataatggacttcattggttaacaggaagaagtggttctggtatacttgttcttgatttggagtgtgatatgtggaggaagatgtcattgccatatgaagtgagtgaggagtcagggaatagagtttacttgttggaattagatggttgtttatctgtgatacagatttctgatacttggatgaatatctgggctttgaagaattatgagaaacatgaatgggttttggttgatagggtgagtctcagatgtattaaaggattagtaccaggtattttccctatatgtcaaactagtgaggtggttttcttagcaacccataagcaagtattggtgtatcaacgcaagagtagagtatggaaagagatgtactctgtgaaaaatag

SEQ ID NO: 115221 - DNA, 2331 bp, Cannabis sativa
ctgctctttaattgaaatgcgtaaaaatggtacaaaaaattgtggtagcattgataaccatcatcccctgtgctaacaagcaggggatcaatggactgttacaatcacaaatgagcctactctaatctagactagagaacagaaagaaattagtatacaaagaagatggagatctgaaaaaatctccagattttgcttcagtgcactgagaatcatttcgataaggtataatactaaaattatataccttaagttgacattcaaagttataccccagtgacatacaagctagctgcaaatacaatgtctcgttttatggcgttagaagcagtttccattttcttgtatagtgcagaattacccataattgacgcggcatttttgaattcacgacatgtttcatccagcctaacgatggtccgcacaatcataccttcaggaacatctgtaagttcgcagatttctgcaaagggagtgccctgccacaataaagaaacagtgattaatgaaacattatagaaaaggtatggttaagtaaaaaaaaaatggcaatgtgctaacctttgcccattcgtaaactacttctacaaggccgaatttgagattttctctggcatactcttcaggatttatctgaagtttaaacccagcttggagctcaccaagttgtatcgcggtattgtacaatctggagtaaacaaaaaactcaagttagatcttaatatacaagataaaacccacacgttctcgcaaattataaaggcatacccttccagttacaaatacattatcttatctttagtagaaaatcatcatcctagaatcattatatatatacagccatttaactactgatatacatgcccaaacaaattaccccatttctcatttactgtttactataatagcgaggattttcctaaaaaaaactgcaacttcactcagcaatactaaaatcataaatggcagcacggtctgataatccaggtttattggcaaacaatcatacttcccaatattcatgattcacatttaatctaaactttcaggcaccaatatagatgtgcacgtcaaagagtaaaaaaagtaagggaagcatgacctttgtttggcctgagacagcttgggagtgagagaagggtcggatgcattcttctgctgaaaaacaaaggctgacattaatgccactgcttcttctggttcgaggtcatctaattgattatcgaataaacactctgtagctattaactcctcccccgaattcatctcacatgcaacacgaccttttatttgaactacaaggtcggcgtcaatacagccaatttccttcagtacgtctatctgaaaaaacacaaatgactcatttaaatggattccttattcattaaacataaagcatctacaagaaatcagataatgcaaaaaaatgtagacgaacccggccctggaaatctggcatttgttgaagtgcttcatctgacatctcatacttcagtgctttaacttcctccttgtgtttctttatctctcttgctaacttaatgtgctcctgcaattttatacacccatgacacttattctttgccatcttttgcagtagatttgtccatttgtgatatgcttggataagatccatgtctttcaacttcaaatctgaatggtattaataacgtaaaggtcaggttacattgtgagtaaaatcccaaacttaaaacgtttctccaattctaataaactaaaagaccaaaataacgaagtgtaaaaccaaatgagtaatttcattccacaataaattcttacttattctagtcttcaacaagacatacctttcactggatctaatgctggaggatatttgccatcagattttttatccaacagctgttgaactgtattggagtaagcagtagtgctagcatcttcaagaagccggacctggtcgatctttattttgctattacataggcataagaactcattgatatcaatggctcgaacctcataacccataccagctgcaacaccactgtatggtagctttattttaatagcgcctgatcctttgcgagatgtggcagaagaaaaatactcttcttcctgagcgcgttttggttttagcacataataaccaccactttttgtatcttttaaatcaccactgaccgagggagtaatatatggcaagtcaggtctcagtactaaaacaatgtgctgtttgttgtaattggaaggtgcttttatgacgaccccgagcaagtgatcctgagcctgccattatgacagaatagagatttagcaccacaacaaaatagaaattaaaaaaaaaaaaaa

SEQ ID NO: 115222 - DNA, 1402 bp, Cannabis sativa
cttaatatatattattcacatatatttatcacattttaatctactttattattatattataaaataatataacaatatatatatatatataacactggaattgtaccaaaaagaagaaaattaatagcttttttaatctggtacttcactttttaatttaacaggggaattacttcatcttcatcctagtaaatccgaacttagaaaataaaaaatagtaggattataaagaaatacataaaaattataaaaaaaatatagttgtatagaattttaaatatttttatggtttttaaaattttatttacaaaaaatatgatcatttactattttatgttttactcttgttattttgttgttggttttttgttgttgtatataaacttttatgttttttcgatgttttctcaatacttttcatgtatctagtttgcttattatttttatttatagaaagaatattgaaaaaaaaacataaaagtataatttttttatcaaaaataatattttgtataaatttcgtaaaatagtaatttatcggaaacaaaacgatgcatgcatcttaataaagtagtaaattttgacatatatatgaccctatcaaaattgagcattgttataagataatagtagtgtttgttacgttctagacgtatcgttttgtaattggtcagcgatattcacaaaaaaattattatattaattaaattatatagtaccacatatttaattacaccaataacaatactaacacataaaaaaaaatactaaacatcaatagtgcctttaccgttcatcaaattgaataatattattgttataccttttcaaaggtcattgcatcatttcatttgcactcacatcaaaattgatctacatccaatgagctaccagttgaggagttttagctcaattcttaaagcactcatttacgtacttttttattctatttttttaaaataatttattataatcttattttttttctatcttacctaataaatttatagggatttgattttgttatgttattgtactttcacggattgtaatccgtgatgtacggcagccatcagatgagggagttatttgatctgacggcggagatttatctaggggtaattagggttaaaaagtagaaacgtatcctgacactcatttaatgtacccagagacccatctaatatactacggaatacattccgtgaaagtacatcacgggacaaaatcatatcactaaatttatattacaacatacattatttctttcattttttctccatatcatttaaatataatattttcaatatgtttttgaaaaattgaatttttgcaaatatcaataaatattacagaaatatattatatactagcaaaaagctacgtgcgaggcacgtatact

SEQ ID NO: 115223 - DNA, 5556 bp, Cannabis sativa
  modified_base (4830)..(4836): a, c, t, g, unknown or other
tagttatatatgaccaattttaataattatgtatttagaaaaaaaaaattaaggtattgtaagcatggaattttaaatttccctatacataacacacatgatagtatgaaacaacttactataccattgatgttaatctttaatttaatttatgtgtcactttaccacatccaatatttcatttataagtttatttttataaaattttactcaaaccatccaaaccccaattaaattccatcaatttcaatataataaccccatttttcttttttaaagaaatgtttagaaccaacttttctgttgcaaactttttacagtaaaagtatgaagtttttattaaaatattaagaaaaaaatttgttaaaattatcaagtatttaatataataaattcgatcataactattatgttatttatgtatttttgcccttattatttatatttacctatttttatcattttttttaggtaaattgccattatattgaaacaaatagttaaaatacaataagcataataggagtaggtaaaacatgattgtaatatataaacgcttcaataataaaaaaaaaaaaagttaggagtaggtaatttctcccaccatgaataattagtatccacagaaagagtaaatttggccaacagatgagccacattattagcagagatatatatgcgagatttgagctccaagaaaattggatactaaaatagaattgttgtttaacaaacaataaaaatctgaaacaacttttgagaatattgcaatcttttaaccacttaaaagagagtcggtctttatatagtgaactggtaattgaaggtctttaaaccattgcaaactatgaagaagagccattgcttccatcactttcggtcgaaaacatccttgaaagggcatagccattgcagctacaatatctcgcatgcttttacgaaggagtgcactgaaaccaaacttgttgttcattgagttaacaacaacatttgtgtttaacttcagtcgacctaagggtggattcagccagtaagaatcctgctatagcagctttgaagatggaactaagggagaagttccagtggttgttttgtttcgagtagcatgatattcttcaaggtagtcaactgcaaaaaataacagtatttcaggcggtttaggcttgttaccatggctttcgttatttttctcactccaaatactccaaaggattgtagcaaattgttctaattgctttgaggaccagatcgtggatacatgtagcattaattccttcaagaaaatattgtttgacaggtattcttggagagaaaatgaggaaaattaccattcttttcgagggcgtttacagtagaacagagcatggataatggattcattattaaagtgacataaagagcaactagctgaattgctaatatgacgagcatggagtataccagcaactaggagacaatacagatttttgaaggtaaagacaaagaccaaaatttttccaccattgtagggcctggtttaaactagcagtaggctgctgctcctcaagtcgagtagctaaagcataaccagatttgactgaatacaaactattagattcatagtgccatataagttggtcttgttggttacacatagttgatggtatacactaaatcttttgaacatcaaaatccaaaaataattgttctagcaaggagtgattctattgtctcgatccagtaatcaaagaagagactgtcacaactttattcgaatctttaaaaatcaaaagcttaaaagaggtgaaactaggcagccatgggtctgaggcacagaggatttgagttccatttccaattttccaacgcaaacctttacatagcaattcttcactccaaataatgcttctccaagttagcgaaggataagatcccagatcaacatccaagaaagaattatacttgaaataacgaggcttgagaaattagtgtaaaagtgatgaagggttggataaaattaaccatgcttgtttgactaataaagcttgattaaagtgaccaaagcttttaaatcccattccccctttaactttcgagtggcaaagaacattcaaattttccaattaattcccaaggacagaagaactggacccccaccaaaatatattcatcataatctcaatttggtaaaaattagagattttgaaagacaaaggcaactcattgcataggtaggaatagattgggccactgctttaaggagaatttcttacctccaattgaaaataatttttcctgccaagctgaaagtagattccataaattttctttgatctccccaaaaagaattttttttttgtctttatcgttcatgacaaggctttatcggcatctacaagatttgttggacattgatttgtattgctggtagtgtgtttagaggaaaggataaaaccgatttacctgcatttaatttttgacctgaagcacgacaataatagtcaagagaatgtttgatagcatctatggaccttgtattagcacgactcagaataagactatcatctgcaaagaataaatgtgacactgatggagcaccacgcgcaactctcaagccttggagattacaacagtttttctcatattgaaaaagccttgaaagcccttctacacaaataataaataggtaaggcaacaggggatcaccttgacgaatatcacgactaggaatcacttgaccttgcattgagccattgatcaagaaataataaaaaacactatttaagcatctttgtataagatctactactgagggagcaaaacccatgacaatcatcatactgcaaataaaatgccactctactttgtcaaaggctttactcatgtcaagcttcatgactgcataactttctctccccctttttaaattttttagggaatgcaataactcaaaatccaccaacacattgtcagtgatgaggcaagattgtaggaaagcactttgtaaatttgaaattaccatagagagaaaaggctttaagcgaagcataatggactttgaaactagcttgtagaacacattgcagaggctaatagggcgtctagtaggtgatgaggggatttctaaaaaaggggtgatagacatatttcttggctttttatcttttggaatcaacgtaatcaaagtcttattgaatgaagaaggatcgacccctcattgagaatatctagaatagctttggtgaccaaatctcccactatatgccagtaattagtataaaacatgactgacataccattaagaccacgactgctatcttcactcatcgattttagggcatagaagacttcttcaacagtgtagggttgagtaagaaactggtccatatcggttgtgattgtacatggaattgaagaaataacatgatggagagcttctaaacctatgccatcaatagcataaatatcgttgaaataattttaattgttttaccaataccttgaagagaagtttgttcaatgccttgatagtgttgtaagagcacctgttatttgctttttaatggaaaaatcatgtatttgagtcaccagactttagccaaagaaactcgagaatgctactgccaatattcttcttcctatgctagaagttcatctaagattgattcactcaatttcaatatgtcaaaacgagcagggctagtttcatttgagttgtttaaagaggccactttgtcttaagtaatcttgattttattagggagatcaccaaatttagagtgatgctaggaagatagataacaagagcaagctgagatgttttagatgatttgggcagcaggattcgagtttgtagcaatccaatattctgcaatgatatcagagcaagcagcctgttgcagccatattttttcgaacctaaaccgagattttgatttctgtacagccacatgttgcaagggagtaattttggttttcaaagctttgtggtccaattgataaaaatccaaatgagaaacaaaaatccaaatatttttctagtccaaaattgttggactagaaatgtttttctagtccaataatgttggactagaaaaacaccccttttatgtcccaggctattatgtccaacacaaaagggactcgaaaaatttatatagtccaatattgatggacttaaaagggggtttttctagtagtgatctaaaaattaaaattaggacattaattttgtgtgaattaaactggatttctgcttgtatttagtttcgtagtagtttttctgtacttttttttttcatgaattcgaaacagcccgtgttttgattgattctactcgtcttctcagttgaagttgcagaaattaatgataattctctttctcaggtgaagaacagtaaaacagaagaggcggagaagaagagaagagatgaagagaagaaacaagaataggcaatagggttttttgagcctttttattttatacatggagctttattacagtcgggatcctgccggtattagtgggagccatcgataataaatataacggtaataaaataatcaattaccagcggacctcgccgctaatagtccgctggtaacaggccggccctgaaaatttatgggcctaaggtaaatttgactttggggcccttcaaaatatacataatttttttttttttgaaaaaaagtgttatgtgattcaaacctatgacattgtataatatgtcatacaccttaaccaactaagctatgaatatttgttatttacaatacgcctaataattttttttttttatttttttattttggactctcgaaaggtgtgggccctaggcacgggcctannnnnnntatgcctagggccggccctggctggtaatatattttcaaactaaaagagcggtaaattttttgctcattcccattttttattagcagcgagtcactctgctaggaataactaaaagttcgccagtaatactaaaaaaatttaattttattgttttctttgactattaccagcgagaagcatattctgccggtaatactctcattattagcggtggataagttttgtcggtaaactatccgctcctaattcttatttttcttgtagtgatattttaaactttgtttttaatctcatattttttttttataatatttatttatgtcatataaaagtaaattctactatttttttcatatatggattgattataacgtaaatattacttacaagcaataccaattaaaaaagatcaaagaattatattatttatgaaaaaaaaaatccctatttaaaactgtccaaactatttgatgtcaaaaagtcaatttcttaaatttataatgtaagaaataagtgctgaaatagttgctacatacacacccttttggaacttgctatgattgcttctaccaatccacttgataatattaccaaaagaactctaagagcatcttcaaatgtgacattttttaagagtattaaagccatccacatcatactataaatactacatttggtgataactgtttagttacaaataatttttttgtgactaaatg

SEQ ID NO: 115224 - DNA, 1196 bp, Cannabis sativa
ttgctgagtcgtcaattctaactcaggagctagtgcacacaataaggaagaaaagaggtttgggaggattaatggcgatcaaattggatatgcacaaggcatacgatagaatggagtgggactttgttcgtcgggttctaaaagcaaatgggtttgatgatcgtgtttgcagccttttaatgtcgtgcattacgggggtgtcatactcggttattttgaacgggtctcctctaaagaagtttaagccacataggggccttcgacaaggagacccattatccccattcatattccttttgtgtcaagaagttctttcgaagatcattcaatgccaagaaagaagaggaaagattcacagagttaagattgcaagagctgcgattccaatttcccatctcatgttcgcggatgatacaatcttatttgcaagagccaacaaggaagaggcatcgaacctaatgcagtgtcttaagttgtatgagaactggtcaggacaagtctgcagcaaagacaagtctagtgtgcttttctcaagcaatttgggacctgaaaagaaaaaggaagttctgggaaaactttccatcaagcaatcagatggagaagagaggcatctaggcaatccttttgtttttaaaaggaggaaaaaagaaagttttttgaagttaaaagagagcatgcttcgaagattagagggatggaagacaaggctattgtcttacgcagggagattgactctaattaaaacagtggcatcttcaatgccaatctacactatgtcaacaaatagagttccattatcaacctgcagggaattagatgcattgatgaggaaatattggtggcaaggagaagtgagacaaggtaagtttatggcttacaaggcttgggacacaatatgccaaccgaaagcctctggcggcctggggataagaagattagaagactcaaacagagcccttttagcaaagctaacttggaacatagctaaaggaagggataagccgtggattcagtgtcttctaggcaagtattgcagcaacgaaaatttctggggtgttaaaaagaagacaagtgattcctatatttggaagtgtatcctggatgtgcgaaacataatcctgaagggttctatggctattccggctgatggaaggaagatagatatttggaatcaaccttggataccttggttggat

SEQ ID NO: 115225 - DNA, 2450 bp, Cannabis sativa
  modified_base (143)..(149): a, c, t, g, unknown or other
  modified_base (2331)..(2340): a, c, t, g, unknown or other
cacaagatctaaaatcaacggttagaaaaaaagttccctaccggtagggaacttttgctaggtcctaccatagtattaccctataattatatatatatgtgtagttgtttatgctttgttcatttatatatatatatttatannnnnnnatatatatatatatataaacgaccactactactattaatcttacaatatagcgtgcgaataatgctccaaccacaaccattgggttagttttatagctcaataatttgtgtgccgcagactagctatgagctatatatagctacacctacaaaaatataattttaattaaaaatttggttggtgtagaaaagtattgttatgacattgttattattcatgttcataaataattaatcgtctctatataatatagagacaaatgatgagtagctgtctggttttgtctcactagaaaatatttaataaagcaaggtttaaataagttacgtatgtagtaattatatacaaatacattacgtaatagctattatatactagctagataagagtgtatgaatgcagctcatgtacgtgttgtactaattagcaggctaaattaactaattaattaattagcaatatttctgtggtgacccatcatatataggaaatgaaatgaaatgaaatgaagtgcattatgtatgtattaattacttaaatttgataagtataaatgccaaaacatttattcagaaagtgaccattcaaccttacacattaccaccataattaattaatttattatttcattaattgcttgttcacttaaaacattttctttgctgatagagactagagttgtgttgtgtgtatgagaatttatgagaatgataaaaaagtgtcttgattgaaacagatggaataataatgttaattttatactcaataattttgatgttaaagcatatttgacaaaagaaaagagcatcaaattatttaacatcaaagattatatacattggaaaaccatagtagtataaattaatgaaaaaatatataaattataagtccaatcttaagctaaggtgggctacgttcttgcgtaaggcccatccaaactctcatccatacttcaacccaataatactcaagcactagttttattagaaaaatttataccaaatactatttttctttttaaattttataattatactttattacatttatattttctctacttaatttttttaactatttttttaaagtttcaattcttttttatcttttttatatttttttagtcagctttggctgacatttttttctttctattttttttttctagtttaatttctcttttttttttttctcaaactaattttttttatctttgtatatatataataagtgtacgtttttatatctcgttcttttaatgcactttatctctcttaaaaaatttaagagctgtaagtatgtcaatttatgcagaatcctctccaaactcattagtcagctatcaaaaggattctcaggtgtgttactgtcactatccactatagcatccaaatgaaacaacttctaaattttgagcttgaagcgttttgtgatgctgatcgggctacaaatgtggatgatagacgcacaacctcagattttattttcttttttagtggtaatttgatctcctagaagtctcaaaaataacatacaatagcacagaagttgagtaatgcagtttagccactgttgtagtagaactttcttgaattcaatctctattcattgagttacacattcattaacatactcatcttatggcctggtgttgcaatcttagaacaattatgctcacaacaaatccggttctccatactcgaacaaaacacatagaacttgatttgtactttgtttggaaaaagattcataatcatcaaatttctgtcaaacacttccctaccattgactagcttgcttatggtcttactaaagcaatctcaagtcaacgatttcctctatatattcaaatccaaactcacacttattagtgaccccaattgtgagtttgtgaggaggtgttaagggaatcaagtttactagttagttaaaatttagttaatactaattgttagtctcttgcaattagttagtaatgttagcttctttttattgttatcaaaagttagttagattagcttgttaatcctaactctctataaatacttgtacttgattccataataatgtaatgaagacaattcttttgttttaatattctctttctctcatctattttttctttctactcctttctttgttttcacttatgtctagacgatcactacaagaaatgtcacnnnnnnnnnnacatttttgtgctggcaaaagttggtattgccctggtaaaatagaatttacttgtgtgatatgttggcaaaagggagttggcaaatcaatgttggtattagaacttttgc

SEQ ID NO: 115226 - DNA, 1747 bp, Cannabis sativa
attttttggaaaaccgtaaaaatgtaaaaaaatattctttaaacgcaaaaatgtaaatattttacaaaaaatggtatcttatgtaattattcctaaatttatttatgtatatataatgagatttaaataagatattaattgttcaaaatacgttgaactaataaagattacaaataaatatgaatttattatcaacttaatggaattgcttcactcaacagccacctttgaggtaagtgtgatttttgctagtgttacatagagtttttcaaaataataatttaatattttacatagaatttgccaataatcattttaatttttattcaatagtaaattgatattaaagttttattaggatatttttgcatgtccttaaaatagacaataaattttttaaaatagaagaaaacgttgtgtttttttgtatagaatatatctttgttattttaattttttatcgatttactaaagaaatctcaaagagctgtataaattttgcatcaaaaatggcctaaacaacattacgtgtgccaattatgtattatgcaccctaatattaaaaaattaactatgattaatttttataatttttcttttgtgtatgcttgtattaatttctcaataattttgttatgatgttttcacattttaaaaaaaataatatatattttttgtttttcttctaaaagtattatatatatttcattttaattttattgtctcaatattagaaaatatatttcatctgtaatttttttataatgtgaaaagaaagaaaaggaatgataaaaaaaatatgagtataaactaaaattatttattttcacaaaataaaataataaaaaagtggaatattttataattttttttttttttgagtgcaaaccagttttgtaaataaagtaaaaacggtgtgtcgttttaaaaccacttgttttaaatctaaaacatggttagtcaaagataaaacggatatttatgagttacccacagtattattaaaatgattaattaattaattaattaattacaaactcaaacgaaacgacaaatttatattaattaatagcactaaatatacggcatgtcgttcacactaaactaaacacacgatatatcacctaataagttaaaaacataatatattttcatttgtatttattgatatttccaagctaaagaaaaaaaaaacatttaaatcaaatggaaatgacagtttctaaaataatcgtaatattgtaacgtttcttcctttaaatcattaaaaaaaaagtaaattatgaaattaagaagaagaagaagacagagagttgaataaaccaatgcaccctattatcttttggacccattataggttaatgagcattttacgattgattagtgatattctttaaaagttattttcttaagttatatgagaatcaatacataattataccaatagtaatatgacatcaggagggtgcttagcaccagtggtacgttttagcaattctcatcggttaataccattttagaccatatacattacaaaaattatcgattggactctctattttgttaaagagtaatgctagaagaaaactatggtacttagcaccgtatcaacttataattagttagcgattctctataatatttattaaaataaaataagtagggtccgatattgaattgcaccaatagcaatagggaaatttacaaaaatactggaatttgaagtcacttttacaaaaatactgtc

SEQ ID NO: 115227 - DNA, 2950 bp, Cannabis sativa
ggggttcattaaccatttataagatgcaaattaaatacaaggatagaaggaggaggacacatgtcactccattacaaaagtttggaccaataaataacaaaaggcaaaacaaaattacagagctaaataggaccacatgggatttaaacaactacttataccattagtctgctaagtatttcttagcaaaatttgatgaacaccctatgtataagtagaaagcacaaacaacaaccaatacaaatttttcactcacataacaccatgatgtggttggtccacgtcatctaattaatcatgattagtactttcataaccacttggccttggcttatgcctgtagatttggataactccatcttccttttccttaaatagacttgaaaatggtggtttcgaatgtggtggcggtggcaatggcgtcggtggtctttcaatattaataccaacctcttttggtaaagttggaaatagtattggtggcgatgattgtggtagtagttgtagaagaattttaaccttcttcctttgatttatattgcttcttcctgaaaattgtactaattaataatttatgtcgaataacattttgcttccataatttaatttctataggaaattaaaacgtcactatagaaaaagttatttttagttacaatataattttttttgtgattagatttgatttttagtcacaataaaaaattatttataattagaatataatatttagatacaagttgtgactcatttaattttagtcacaattcttgttgtgactaaaaacatatttaatcacaacaaattataatatttgtgattaataattttactcacgaaatttttactcacaacttaagaattatgatttataattaattataatttttttacttttaactacaaattttatcgtgactaaaagtaaaaaaaattatagtgtatatgtaacatgcataatagtagaaatctctctcatctatgtatcttaccaaaacaccttgttttttcattatacttgactttttatgttattacattatacacacgttaaagaactatggatataatagaactaaattaaaggagatgtatataatagagctatgaatgttataagtactcatggaaattactcaagtttattataagagtttcttttagttgattgttatttgtgagctggtagtaatattaatgaacttattcttatttaccaaaaaaacatatgatattacatatataaatatatattattaaatattatatttttaatatatataatatacataatatattagcaaaatgaatatacattattattacagtgtttgaaaaatgaatatatatatatatattttattattatataatataatatagatgtgtttaaaaattaattacctggtaataagaggattcttgcttgtgcaggagtataaactgtaataagaagaagaaatgcaaagaaaagtagctgaatattatttaaggccattgaattgaagatatgttacaactgaaagaaagttatatataatattagtattactatatatatataaatagaggcttgttcgaggaaactaattaaggttcgtatatacaggcacacaaatagtgaaagagaacatattaatatattatgatgaccatggtagtagtactacgttaggtaagtatagcaatcaagttaattaattagtaatatatagagaagatattgtaacaatatgtaattaaatcaactaaatgataaccaagttgcatcaaatttccttattatatattttaggaaaaattgcgataaaagtccccaaaaacttatgtttgatgtaaataattaagtcttcaatctcaaaaaattattggcggtaataattgtgaaggtcccatttctcgtaaatccattagtctcttttttttctaacagatcccattaaatactaatatatatagcatattacgtgtcaattttttattagtctaaattataattttaattaaaaaaaattgatttttaaataaatattttttttagtttttttttattattttaaattattttttattataattatgatctggattaataaaaaaatttacacttggcatattattcgtattaaacggatcagttagaaaaataaactaacagacttaagaaatgacaaacgagacctaagaacaattacagtcaattttcaatgttgaagacttatttatatatcaagcataaatttttccaatattttatatcttttacttattaagaaaataataataatataaataaataaaatatatgtgtatcatgtgtacattacttaattaagtcaagtagagattattccaaatataaatgtacttgtacgtacgtacgctaatatttgtctgggtcaatgttgatattaaattttaaaaatatatagttgacttaatatgtatcagtattagtttatttttttcttgtagaaaaacgttgtctatatatgcatgcatgtcatgcatgttgcttaatacaaacaacgagtttacgtaattgatttcgacgttgttttgtaagtgatcattatttatatttattatatatacttgtatatatattatattcctacgtacgggaaagatatgttaaaataattattgatcacatatgaaactaccatgcatgtctggtatatatatatgttatgtatttcattaatttacaatttattataatatacgtataaattataaaataatttaattttaatttattacaaataattattttgaaaaaaaaaatacatatatagcttttaaaggctttcaacgtgagttttaagacaaagctttattagagtgtgtaaaaagagcactctaattaaggaaaatttacatggtatattaatttttactattttttttaaaaaaatactgtcggtattttttatttttttactat

SEQ ID NO: 115228 - DNA, 1869 bp, Cannabis sativa
aattatacgtataattattaaaaaaacacttttgaataccaaacttgataggtgtgtactataaattttttctaaattttattagtaaaataatcatatttagtatttaatttattgtaaatttgaaaataatgtttatttcggtattagaaaatattttttagtcacttatttttttagaagattttaaataatttaaactaaaaataaaagaaaataatcagatgtgcaattaaatactaaaattatatttataatattaaatattatttaaatctttttaaaatttaccaataaccttaaataattactgaaaaaaaaatcactcttgaataccaaacttaatatgagtgtactataaatatttttaaaattttaaaataataatatttattcgtgcccaaaaattattttagtctcaacataaaatttaatgtaattatttttctaatttactatttttttttagtttggcaaatttttgactaacctgtaagccttgtcgtcagatcctttatgtgtccgtacaacatgtaccaacctatatttggctctccgccgttccgatctccggttggagaggagaatggcggcgccgcccattcggaagagacaattgggcaaaagcatggctctctcattcccctgataataatttggggtaataatttcagtacttatcacaacagcgttcgaattggggtgaacctgtagaagatcacgagctaagtcgatcgagattactccggcgctacatcccataccggaaagattaaagctcttgatattacttctaagcttgtatttattaataaccatggcggataaagaaggagtaggcgagaataaactgcaattaacgattaaaatatcgatatctttgggtttaagccctgttttttgtaacaaatcatccatggcggagaagataacaagctcagcttcacctctagcagcttccatagttggattaggaggaatgtaatgaatcgccggaggtaaacaagtttcttcacccaaaccagaacgttccaaaattctcatctgaaactcaacgcttttaggattgttcttcaagatgagtcttgaatgttccatgaaagtagagaaaggaactcggcacgtgactggtggtttatagcacgtgtaatcgactaaaaagacggttctgggttttgacataaagtaaacggttgcaacaaagacgataaggaaagcggaacagaggatctgaactaagtcgaaatgaagagatttccaaaggcttaaaatctcatcaggacctaaacgaagaacctctaaaccaattcctaacatgattggtattaaggtgagtgtgataatgtggtttaccaagtattggtaacccaatttcacgtacttaagttttactgaatttgaaaagtctggcaaggttggagccattggaaagaaagaaagatgggatttttgttgtttaatttgggattttgattgatataaagtattggtagaagaagttggggggatttaaaggaagaagagggcaatgaattgaagatggcagatgagaagattaaatgaaggggtcttcacgtcactcaacgctcacttaactttgttattaatattttcataactttattattatcaatatcagcctccctcttgaaatatttagtgggtcacgaatttttttttacttttatttaaaaaaaaatgtgatattttttaaaattagtaaaaatatgtgtacttttaaaagaaaaataattttttttgagttcctcgactaggtgggcttttggcgcagggtcgggtttcatcaatttatatatacagtaaaacctctatccaataatacacttgggaccaagtaaattatattct

SEQ ID NO: 115229 - DNA, 1592 bp, Cannabis sativa
  modified_base (33)..(39): a, c, t, g, unknown or other
  modified_base (1544)..(1552): a, c, t, g, unknown or other
agaagttcaatattaggttgttaaatcaacatnnnnnnnagtagatctaagatccttgataaatataataccaacaggatagccctacgtgtatgtgttcggtgctcgatgccccaatttttactaggccacttgtattacactccgaattgcttgcgaggcgaccaagtggaaaataactactcttgtccttctcagttgattgacacacaaagtcattgccttgttttataccataagatcgtataaaagggctgacatatgaggccattaaagttacttttgactcaaaatatttagcctcgaattacactaacaaattttggggaaatttaggtttgcgagcttttggtggggccatacatgaaaatttaaagtacctgatcaaaagcaatattaataggaggtaagaacaaaggtttggctaaagagaatttaataagataaaggggctcaggccacatggcttcacgcagagaagaacgtttaccctcgatgatttcacttatgaattgactaaatcaagcaaatatatttaacatgtttaatccctcaacatgagcatgaattttcacttcatttttctcaagtttagttttagggattttcaagtttggcttgaagggtagggcaaaagaaaagtaattttcgtgatctaaaaattttggattttcaagttttaagttaaatagattcatttaccttcttttaaaaagaaggaaaatgtaatcggaaaaactctacgcaattagaaaaactaagctattggaggccttagattgaatggagtgtgcagttctttggagtcccaggacgtctaatggcagtgcccatgcacttgcaaattggggtcttttcaccactactacaaaaaataactttttgcttcagtttttaagtgacatataaacgatttgcgtcgattggggtaaccgtcgtaataactgtagacgaaaatagtcttattttttgctcattttataaccgatgctaatttttttttgcttcatttaataaccgacgccaaaagtattacacattttgcgtcggttattaatgaagcaaacaaatttgcttcatttaataaccgacacaaactaaaaaaaatctaatcgaagatggtttcagatctgagacagttcgatccaccaccccgaactaatcatcccagaatctagcagcgcgccaccacctcgaacctaaaaaaaataccagatctagtgcgttgtgagagagagagagagagcgatcgaaaataccatatgtgtgcgacgactctgccatggcatagtgcgtgctgcaacaatgacgccaccaccccaaacctgcaaaaaaaaaagaaatcaaaccaacattttcaaaataaatgaggaatgagagagagagagagaaagagacccgttatttttctcgtagagatgaagatggtggtagggtgcacatagagaggagggttggagagcgggtggtttgaaaccactgagagaaagaggagggacggtgttaatagaggtttttgatttttgaagagagagagagagagnnnnnnnnngagagagagagagagggagagaaggagagaaagaaggaat

SEQ ID NO: 115230 - DNA, 1875 bp, Cannabis sativa
cataaaacccaacagtacattcacttctctctttcgagaccattacttgagaggcccgagccttgtgaagcaggtggcgatgggcatcgtactcgtctagatggtcggatagtttcatcgatagggtcagtcacagatgacatcatccttctgtgagcatttatttggttttctcttctaatggtcacaaaaactcaattatctctcatggtttggtcttccaagccttagctatttccacctagatgatgcctagaggctgaaggtgggggctctcctttggcagtgaccaattggtttctatctacggggatcttgatgtctcgtagatattaggaaggtcttggcatcttcgaatattattgaaaaagtaagaaatcaacatagctttaaactttgtcgttcctaatatgacgctaaattgttgacggtaagaactcgtcaataatgttaatagtcagaaactcaatgcaagtgtatcaaagagtaagaaggtagatgagatctaagagaaacttaagaaaaatttggaaaataacaatggtgaaaagtgagtatcttgtattatcagcttaagggctatggctacaggaattcccaacctctttgaatgaggggtgagcctctatttataggtaaaaaatcaggttacgtgtggtccctggagagacaaatcagcacatagtatgttggtctgatggcagtaattagagtagtagttgtagggtgttgttggtcgggtgtaccaagtgtttcagggtgatagcaacacaactactcgctcagcccttgtcttcacgtgtagtctgaaattgtggtccttctctttcttgtggtccatgttttttggtctaggttttgtgatctttatacacacactcttatcaaagctcgatgtcttgtctcacctattcctttgacatggactaagtgctcgggtctataacaaattgtatctatattagttgaatcatttgagcattgttgaaacaaaggaaggtaatgaagggtcttcaggtgatcaaacccttgagtctttgcaggtcaccctcaaagagggtcttcacgtgtactccaacgggggtcttcgcaggtaacccaaaggtgatcttcataggtcccccaaagggggtcttcggaggtctctcaaagggagtctttgcaaggggttgatgcatccttagtggacttaatgttttgaccataactttcttgatatgactcaaaattagatgattcgagatgtgttagaaagataagagagagatataaggcttttgcttttatgactggatctaattctaaacgtatcattgtctaaatccactaacaagttcttcctggtaagttagtcttactaactttactcgtgcccaccgacctccatttaaaatacctcaaataatcacaaacacatgataatccttttaataccctcataagagtgatgtctcctaattttaaattactctccatttagaataacttcgatatttcatcttacaaaatttcagggttaacaaagctaattatttgcattaaatatgcatatatgagatactaaaataattatatcaaattctaagttagttaataaagttatatatatacatttaaaaattaatttattttttttagcttttgagatttgcggtgtagtgagaaattataaaaattgtatatacagtttaatttgaaaaaataactaaattcaccactcgcaacacaaatacccagtaacccagctcaattatataccatattcatagggaaatttcattaattgaccctaataaaataccccatttcaaaatatataccctccactaatttatacaaattaattccactattactcatttgtacccaaaatac

SEQ ID NO: 115231 - DNA, 1889 bp, Cannabis sativa
  modified_base (1830)..(1835): a, c, t, g, unknown or other
caatgaactttcttggatgaaagaaatctctccaccttctgtgtaacttttgttacccttgttattttaacctttatcggttacctaaaaaaaaaaactattacggtcagtccttacaaaaaaaaaattattacagtcaaaatttaaattttaacatattacctttttcatataaaaaaataaattttttttaatgtgcatttttttaacaaaatgaaatattattaaaaaataaaaaatttatcaatatttgattaataataaaaaaaatcataaacatattgtatgtaatttaattaaacaaaatacaataaatagatatgatatccattttagtcattttatatgtaatggctatccaatcttctagtttaccaagtactcgtataattttccaactcacaatacgtctaaagttttaatttaccatacttaacatttttcttacagtataattataattgtttttttttttttcacagctacagctacagttgttttttctcacagcacaactgtaccaaattggttcctagtggtttttgagtctttcaaattttttgcaaagatttacaatattttgcgatataatttttgatttggaaggtattttgcgatgtttcaaatagttgcaatacatttcttattagtgtttgcaataaagggaatttgttatcttgcgatgtattacgatgcttttttgcgatattcttcaattttttgcaatcttttcaatgttggttgtgtgttggtggtgtgttggtcgttgttatcattttttgatagttttatgatgatttctcggtggtttgcaatactgttgtatatatagtttgcaatgatgttgtatatatgattggtttgctaaggaaatgcttaatttcttggattcgatcttgatcttttgataatttccaatggtttgctgatgttttacctattactcaaaatcaatttccttttgttttttttttctttatttattattattttttttttttgcagttggctcatgagcttataattctagtgtcagatcatttcacaggtcgtatctcttacatgggtaacaaaatatttaaatggataaaggaaaagtttaaagctcgtgaattgaccgcgagggtggaggcaagctcttttttagtgcgttggtgcacaatctactcttgtacaaaatgaaggttaaagaggaaaaagaagatggagtatgattttatgtgggtgagaaagaggttagattcaagcgggttgagtttggattgatgaccaacctagactttagtaatggggctatagtggtagatattaatcttaaggtgactttttgaccgtttacggaggtgctatttcaatagcaagtagagtatcaactttaaaaccctttgattggtttcgagagatgcgagatagatgacatcttcaaggtaggtttatgcgcttttgttgagggtgtattactagcccgtgagaacaatgtgttcatttggactgacatattcaaatttgaaaacattgaattcttctttaagtatacgatgaggacaaagcaaactttcaacacaaggtgaagtacattgtatatggctacgtctctgtcaatattaggcatttgaggccatacaagatgtgagaaagaagtacaatcagtgcaaagagaacaatttccctaggatgacgaattggaacacctcgtcaatgctaaggaagcaagacatgaagcaaagcaacctgacaacattatttgttaaatgggtaaatgcattttagttagttagttttgtttggttttaatttttttatgatttttttgttagactttttatttgnnnnnncattaacttttattggttttattaaaacttgggttgattggatagttctttgct

SEQ ID NO: 115232 - DNA, 3779 bp, Cannabis sativa
aaataatttccaacagtctaagggagaaggaggagaagtgtacatgcttcactctcctaccaaaactcccaaagcaatgcatgccaactggccatggcgataggtgtcatcaaaacctaaagcacctggccaaccactcaagtgaatcactgaggctcagccaatataaggccacatgtcaaccaaacatggccatcaaagtccaagctctcgccagcttcatggctaaacatagaagcatatcttcctaaatctctcaaagtttaggaaaaaagaaagagcccgagaagaagcgagagcaagagcaagacaactcaacgtagaaggtgcattgaccacctgcccgatggatgcatgaccctcagaacacctggggtcaatggatgcgcaaggaaataaagatcagtttcaaagcttctaacaatgaagctgaacatgaagctccgaatgctgggctcaggctagcacacgaagcgcgggctaaacacctaaatatacaccactactcttaaatagttgtaggtcatgtgctaggtgaatatacaacttaatgaaaaaagatgatggcctatttgagctaagacttgttaagtcagctcaaatgctgtattaaaaggcaagtccctaaagatgacacaacaactgacgtattcgctcgactagctagctatgccttgacaaccaaggcaaacttggtacctgctcagttcttcaaagaactaagcatccatgtttcaaaagaaatagacatgttggttaatcaacatggatacacctatagcagcatacctctaaacaaaaaccttgccagaaagcaagggtaaggggatagctgctaggtggccaatcctggacagcataacgcatagacatggtaccctaataccacctataagaagtgttaccaagaaagaagttgaactgctattgaatggagtgcataaaggctctatggcaatcgtattgggggacaaagctaactgagtgtagaagggatcaaactgtagcattaacctgctctctagaaggttggccgaccatggcctcagcaagctggttggccataaaattaacaacctggctggccactacctccctagattggccggccatagcctcatccaaaattgcctctaatctcttttcgactctagaaggtcatagtcaaaactttcactgctaacctggttggtataatgatcatattggaaggaaaactctaaagattcacttaatgcaaagattcgggaagacaagagatttttttttctatagacatgacatctatattggacagatcatccaggtaaaactacacatcgcttgaccagacaaaggataaagcttaaaaagtccccgtgcagccggaagtctccacacagagttcggggcaaatgttatcccaaaaattgtcctaacaatgtggcatgatgtcatatggcacatgacaagcatattcaatagtgagtggataaaagatgaatacataatttacttagaaaaggccaaacaaaacatgcacagattgtacccgttcgatatcatatgactaacattcggaacatgatgtatgtccttatgagaaactagaaagattcgtgggaatttatatttgaattctctttcccatgattctctccctttattttaggaatgtattcaatatttggtaattaaatggaaaaaatgctagagtcgcttcccggtgagccatattcactaaaaaagggagggttttcttgacctgaagcactacgaaaaaagagagaaatacttagaaatatctataagctttcgagagagatcaagaaacttacttgcttcttttctcacaagtaatccaataaaaagaagagtaagctattaccattatcacggggatgaacctctataaaattttatgttattttctttacaaactatcactattatcattattataatcgttcccatcgctttaattgattcagtgttgttgactaaaagcgagatcaacaatgtattatatatatataaatttaaaaaatttatgtagtacacccccttaaaggtagttctggtagacctccaatttattttggcgtacaaaaatgttttttagtcacttttttttattatttttatgatcgcgtacgttgtagatatttaagatcacctataaattatttagaaaatttcaaataatttaccgtgtcaaaaataatgtttaatataatattttatatatgtatacatgttagtatgattttattttaaagatccaccaaataatatactattctatgtatatatacatgttagtatgattttttattttcatcttcatatatactaattgttattttatttatatatatctatgtttatacaagttaattaggtttaactcaaaataataaaaaaattattattttgatttttatgtatatatgcttcactacactcgaaatataaataaaattatttaatatgtatatgtatatatattgtacatatatttttaattttactgctaagaaataattaaagagaaataattatcttaagaaaagataaaaacaataacaaagaaataagaagaaaagaaaaaggctgaagtgaaagatatagaagagagaaactaataaaaaatgaattaaagaataaacaacatgttctaaatctaagtactctagcatatgtaagaaattaaggttgtgtttggtttacatgtaatagaaatggtaatgagaataataatggaaagtaataagaatattaatgagaataatattaagatatttggtttatttatataatgaacatgaaaatgagaatggaacatataataaatattatattgacaaaaatatccttacatttatgaattaataaccaatttaattttaaaaagcaaaggtacgttattactattacatggctatagtaatgtaatgactattctattaatgattacaataaaaaaactattacaatagattcaaagacaaagtaaataatggaatgtaacttttaatttcattacaccctttatttcttcagactagacttatactaatgtattatagagcatttgttggagcttctttttggtttagttctttaaaaatttatagtttgttgtattttataacagctattgggagtgctctaaatccataatttctggatctaattcatattaaacccataatttctaattagcttaagtactgtataaaagctcaaagaaaataaaagttagaattaatttattatgcattctgcataaccatacttaattttaaatatacttttacacataaaaatataaatgatttttcgtcacttcaatttttttcataatatttttaagttttaaaattagtttattatttttaataaattgaaagagcataattttttggatagtagttagggggtgaaatatttatttattttatattattgcattgatgttacaatgacctgtgccattagcatgccaaggccttatgtgccaaattagtctatcaaaataagaaaaggtcttactgtaattgaaatagtttaagagaatatttagtgttggtgacagtttttcgataataattcaaaaaaaaatataaatttatttttataataatttaagttgtaccataattattaaattaatcatgaatttaaacaatgatagtaaagtcactttaactaataataagaggagatcattgtagctataatatttttttagggattttttatttttacactttaaaataattttttttttgtatttt

SEQ ID NO: 115233 - DNA, 2046 bp, Cannabis sativa
caacatagcacttgtgagtcacaaaaactttgtaaaaaaaagcgataacataatatcataaatcaatacaaaaatatcatcatctaaactcaaattatcacaatcagataattactggtatataaacatttggtaatacacatgtaataagtcatatttgttacttcataaagtaatcaatctcgttgtagttaaataagataaacctgatacctaatctgaaatccaaatattattctcgttttatcataagacaaccttaatacctattttgacatccaaattatgtcactgttgttacctaacgagataattgacaagtaaaaaatctaacaacgatttcaattacagtcatggcttttttctcacataacggtaatgaccgtgtcttataaacaataataattgtatcttataaacgataataatcatatcttataaataataataattgtatcttaacatgacatgctatgtagtacgattgtacttttttttttacctttaatcgaaattcatgcatgccggccaacttgagtggagaaacgcctgaagatctcgactctatgccacaacaacggtaaatcgatcaacaacttgacctaacctgtataaggtcttaaattcataactgaaagtttctctattaataaatagcgtgacaataccctaaatattgagaagatacgaacatcaagatttccaagcttcacccaaaacattagatcatttggaaaaacgaaaagccatttttttgaattccttgctaggaaaaacagtaaatcattttctcaaaaatggtctaccattttttgcaagaagcaaaaactccgagtttcacacatgatctccaacattttcaaactcaaccgaaacctaccaaacttcccagaataatccaatatcatcaatacatcaaatagcacagctcacacttagagctcaaacttaaagctctcaattaaacctgcaacaaagtaccttaagcaactctctacaactcaaatttaagctttaaaacacaatctcacctatagcaatctatacaaaacaaaaacacccaaactctaaactttaactcttataactcaaagagagactatggtttagaatttcgtcgagatagggttgagttttgtgttctagctgagcaaagagaaagagaaggtgagtataatttattttttcttattgatttatatatcatccttcttattgatttatatattcataattaatacgtaaaaaataaagaaaaatgaactttgctacaaggtgttcaaaattaattatttgactataagaaatattatgtaggagaatatatataattgtaagaaaatgtgtaaattgtaagaaatattgtgtaggagaatataattgtaagaaaaagtgtaaattgtgttgattgtatagggtaatatgtaatcatattcccgctaattgaattatactgtttgtttaagtacaaaaactttatatattattttaaaaaataaaattataaataattttttattagatacatttaatgttaattatacataaaaaataaaataatttttcatataaagaaatatatttattaattagttaatattaaattttattatatttttattaattaaaatgaatatttatatatattttatcattatgttatttatttttgttcgttatgtcatttatgtacactatatatttacataaaatttatgtataatgcatatatatataactatatattattgcacattaaaaaaaactcactaaaaaatgatctcatgacagactaaatatatatatcgttatattttggttataataaattataatattaaaagtatttaaatttatttattaatttaaaaatgctattaaaattaataatataatagacgcaaataatttaatctcactatttttttaacattatcctcctcaaaggtgaatcaagattcactgttaaaactgatgtcttatattgtattaaactaatttaagtttgacacgtcaactataatttaatttatattaaatatgtta

SEQ ID NO: 115234 - DNA, 831 bp, Cannabis sativa
aaggagctagaagcagagatgcaaaacctgcgtcgaaagatatatactgcattgaagggagactaggatgatgatgaagagttcgatgaagagttcgatgaagaatcacctttctcaagagaaattcaaattgaaccacttcctccgcacttcaaggaatcgtggatgataccatatgctggtacaactgattagaagttccaccttgatgcttttaatgagctaatgaagatgaaaaaagtgtcatgtaaggcaagatatcaatgcttcgcattcacactcaaaggagctgcatataagtagtttaaaaggctaggactgaggatagtcacatcttagaagcaactttcagaggagttcctccaacaacattaggctgcatgtgattaggtcatgtctgtcacaagtattaccaatgtaaagcaagacaaacaagagagtttgtgaatctacatgcaatgcttcgacgttgaagttactaaggtaaggaaagtctccaaagatactcaatatggctatagccataagagtacgtcctagaagtgggctataggacaacatgctaaaaagagagttgggtggcctagatgacttccatgaaagagcagagaagtacatccgtgtggaggagggtaatggaagcttaaaaaaagatacaagtgagtgctcaccgggaagctcgtcagacccttacatggtctactagatgatgctcactaacacttataagttgatatacttgagcaaagtcttttcccccaccctatatgttgggttctatgccctaaataaaactcatttcatataatcatatttacttattaataaaga

SEQ ID NO: 115235 - DNA, 4699 bp, Cannabis sativa
  modified_base (39)..(51): a, c, t, g, unknown or other
attcatatttatgatattaattcaacatacttgttagtnnnnnnnnnnnnnggtaaaatattcccaacaattatatgattatgtgaaagtggaattagggattaaccctattttcgaatcccgagaattgtgactagaattaccggtacttgttcaggagcactcgagaatttagaatctccacatacttgggacatcaggtaaaacagtagttagcacgtacagttaagcacagtggcactcatgtttgatattatgattgtgactaagtgagaactaggattagggttattaccctaaagtgagcggttatatggcctaaggttattaccctagtgattaaatgattttgaatactatgccatgctatagatattgaagtgaagaattatgtgtgtaaggtataattaggttacactaggtaactagaattgagataaactattctaaggcccatgccacatagacataggcctatgccacagtaaataataccctgtagcctgtattcaaccgcttgtctaatcctttacctcaaatagtgtcatcactacccttattacctataaccagtactgatgttctaggacctataagtgttacgtaagaaactacatggacccataaaaccaggtattagaatgtaatctccaaacctaagacatgctaggaaactaaacaccctctttcaaaatctttgctgccaactaaacctaaatctatcaaagctactcttcttgatcccaaatggtttgcttcaatgcaacaagagaataatgctctcatcaaaaataaaatatggactttggtgccttatcagcatggtatgattgttattgataacaaatgggtgtacataatcaagttaaaagttgatggtaccttggataaatataaatcgaggttagttacaaagggctatctctaaacacctagaattattatgcagaaacatttagtcttgtagtgaagcctacaacaactcaaacagttctttcccctgctgttacttttaactggtaggtcaaacaactagatgttagcaatgcttttctgtgtggacaacttcaagaaacgccctatatgcatcaacatcaaagggtttgttaatcttgagaagcccacacatgtgtgtcatcttcataaagctctatatgagcttaagcaaggacccagagcttgaaatgagaagctcaaccagatgtcaattgagtggggtttcactgcctctagatcagataattctctatttctttcaggtttagattctatgcaagttattttactagtatgtgtggatgatatactaattatttgtcctaactccaaacttatttccaaggttattcaagatttgaataattccttttctatgaaggaccttggacttgtgcattacttctttggtggtgagatatataaagattcaaataggatgtacctatctaagagtaagtacattattgatctacttgtcaagttacatctttagggtgccaaaagtaatatcccaccaatttttcttagaaattgtctttaactaaaggagctgcattttaggacattactctatatagaagcacttaaggtgctcttcagtatttgacacttattagactagaactttctttaattgtcaataaactaagtaaatttattcatgcccaacagaggtttattgggaagcttgtaagatgcttctttgatatcttaaaggcacactttcaaatggtcttctactcaaaccagctgatattttgcagttttatgcttatttcgatgcagatttggcaagttgtgtagatgatacgaaatctactagtagttatgttgttttttcttggtgggaatctcatatcttggtctgctaaaaagcaacaagtggtagcaaggtctactattaaaagaaaattcagatctcttgtcaatactgttgctgaacttaaatggtttatttactaatagaacttcatgtttctcttctagaagctcctatcatttgggttgacaatcaaagtgtgctcgttctaagcacattaaaatcgatcttcactttgtgagagatcaaaatttagacaaaattgtcccttcaattgatcaagtggttgatgttctaagcaaacctctttcaacagatcgtttttctatatctcaacgacaaacttcaaattgcttcaacccttttcatttgaggcgggatgctagctaatatagaaaccagtttattggttgtttcaagttgttagagttagttagaagttactattgagctatcttgagctctagttgccacttgtaattatatatgtttataaaggctctctcaattcatgatagataagctttttcggatattttctttactttgctctcttctttagtttttactttctttctttagcttgctttagttaagtttctacacttagaacacctacatcagtttctctattttatcttttaaaatatatcactaaaacttctcattttttttttgttattttatgctattttaaaagaactaaagtgagtgctcttaccgagtttttttttagtggcgtgatataaatttttatatatttttaaataaattatatgaaccaaataataataaaataataaaataaatatataaaatcctatataccggtaacaatttctctaccaacaaaacaacatgttacatgtgatcattggaattgaatacagagcatctctacagttgggctctggtttatagtgtggcccatctcagcccaattatgtgttaatcggtacaagatttctctcgtcattttccggtaaggattcgaagatgcacgaatgtggattggattatatgctgttttttcttttcgtactactcaccagcattcattgtgttcatggtggtgggggagttatttttacggtaaataattattgtatacttttatttttgaaaaaaattattgtatgattacaatttacaaccataaaatctcatttatcaagtgatcactggtaaaaacttaccatgatgtgttttaagcaaagtttatgactgattatgtgcacttgaagcttgcaaagataataattttgtttgatagatataaatgaacttcatcaaatctgatgaaaactatttaagaaaataagaattataagtgtcgttttcttaactagtaaactaaaatttctgacaagttagttttaaacatatatttgcttcatttaatctgataatcttgttagaaaagtcaacatgtaattaacactaaatgagtcaatcatggttttactctttatatgagaaaaaggaccgcgacaatgacagtcacctgtgacttgtattctatttgcataataatgatagttaagccttagattgtgtgtctattaattacagaagcaaacaaaactattgtatggtaaaaaaattattcttaaatgaaacttgctcagcctaatacttaaaatgggccttgaggttaggccaacatatatttttctttttaaagaagaaagctgtgtaaagggctaccaccacttggggctgagtagttgagtaatgaatatggttagtgtttttacttttttttttagaaggtaaatgtagaagatagtaacaaaaatatatacataagagaggacaaggacaaaaagcagtggagcagttggtcacatcagaaggggacctctttgttgtattagttgaggctctttaatggaaaaaaaacaggttggcttacaacaacctacatgctccacgcgctattacacgcgcctccagaaagaccaatgttttcattaaacacaattgtaaggtactagctgcgcttagtaccactgagaggtaataccttaaaataaataacaatatttttaaaaaaatctattaaattatatcaaattcatttaccttataataaatgatctaaaataataaattttttaacttaacatatgttttacttgtacaaataaataatactgagataacttattttaaaaattatatcatttattcatggttaaagaatgaatttaatttttagatactaaataatcggatattatgttaatgaaaataaattattgtgcaactttgtttatcatttttaaatatgttaaacaaaaaattcataggtggttcgattaagccacacagctcaagaatgagtagtgggtggtaatttgaatgtgtattcgttcaattttaagctaaccaaacccttctcaaaaaatatctagtccaaccctttcaactttcgactttcttttgaagtctcgattttctactttcttctctagggctttgtcacttctcttttctcgttctctcagctggggccactgccactcttgtcgcgtatcacatgccagctatttggacactcctaagtatacgggacgtgcgacacttgttggcacaccgagctagcaagtcagcctaaacgcgtgtgcatgcaaacaaactcaatggttaggcacgatatatgtctcacacatattgagtgcaaacacgaagtatgaggaagcacattataagttattacgatgatcaatctcacacaacccacaaattaaaacataggcaaatggcacataatggcccaacaaaagcaacacatagacaacatagaggtatacatagggaagtatggataaacatcgtcttacttgtaaagtccttttttggcaagttaggtgacaa

SEQ ID NO: 115236 - DNA, 2709 bp, Cannabis sativa
  modified_base (328)..(345): a, c, t, g, unknown or other
ttttatcaatgatatttatatgtatactatatgcacgttaaagaataaaaagtaaattatatatatgtatcagtactagaaaaatagttacatttagtgataattttttagtcataatataaattttttgtgactaaatgtaacttttagtcacaatataaagttacttgtaactaaaacatagtatttaaatacaagttgtcactaaattagctttagtcacaataattattgtgactaaaacatttagtcacaacaaattgtaatttttgtgactaatacttttagacacgaactttttaatcacaacataaaaatgataatttannnnnnnnnnnnnnnnnnttacttttagtcacaatttttattattattaaaagtaagatttttataatgttgggtcagatatatggtgcggatgctattaaccgcgctcccgtcccattttcgcttcaggtattgaaattattcctaactactgtccattaactgccaaggaaattttctgcctattagtataaatttttatctcaaactattaattatcaacttttaattaagaataaattaacaaattgtacatatgcaattatcattaccaaatcgtatcctacagagttaaaacaaaatgaaaaattaaaatatatatattaattatgttgtttatgctattttttttttcaaacctatatcaatataatttttttcttcaccagatattaattacctaacaaattcacttcaccaaatatatattgtccggcctctcttacctttgccgactcttcaatgtactctatacataaaaccataaaaattaattaatataaaagttttaaagtcaatttatggggtttaatgataagattgcacacataaagacaattcttttcttcaaataaaatagtttaatatattaattattttctcgccactttgcataaataagcactcgttaaagaataggataagtaaccccggccaaagatcgatccaaaatacatcaaacatttccatgttgaaatttataataatattattattcctttcatatatcaatctagttagatacagccagatttaatatttttatataagaaaataaacttaaataaaaaggaggtcaataacaataataatagatcaacttctctccaaatggtacaaaaaactgtgttaaaggttgatctttcatgtctaaaatgcaagaagaaggttctcaaagcagtgtctacactagaaggtatattacatatcacataaatatacataaaatatatttagggtattatatatgttaccatatatttatgcatgtgtgactaatatttatatggttaaacaaattatataggtgttgataaaatagaagttgacggagccaagggaaccctaagtgttaccggcaatgctgatccatacaaaattataataagtgcgagaaaagttgggaaacatgcagatgtggtgagtattgggcctccaccaaaaccggcggaaccccaaaagaaagttgtggtagaagagaagaaaaatggctcggatgagaataagaataaaaataaaaataaaggtaatgaaacagaaatattgattcacaatcctcacacttgtctccaatgcgaaaccctagttttggtaccaatggatcgttggaatgagccttacccttcgtgttctatcatgtaacaatgatcaattcatgcttattataatttacttctcatatgtagctcaaccttctagataaattggagtatataatatacatatatatgtatattatatatatgtatattatataaatatatgtaaattataactatttatatcttgtgtgaaatgggtgccgcggagtgtaaaacgattatcagtgaagaaatctattgaggtttgagagtgaatacatcaactttgtttataaacgacagcaaaaataagaaaacgacaacaaaaggagaaaaacgacactggacaatataaaataaaggtgagatctccttggtgaaaatgattcaaattgtggtctagattgaatcagctgaacaaattaaatttctgttttatctgatgcaaggattttggtaaactctttctctggaagataacgcctgcctgccttggtttttatggagtctttctattctagtcgtgtttttagtttaatttaatcaatgagattgaaatttgtaatttaacttttattagtagatcgctaagttatctagtctttctattcttattattaaataataaattataatattttttaatatgtcatattaacttatcgtgtgtggcaatttttgagttagtctattcgtgcttatgcgttatattttttgtgctttttgtgtcgtgttgtttccaaacttatattttttcatgcttaattgtgctcgtaccggtttcatgtcgtatcgaaaaattcaacctgtatttacaacactatttgacttcttaatattttccaaacccaccaaaaacagcttaaaggacaataaataaagtaagaaagtgaataattaattaactaaaataagttgttatttttcattaagaataaagtaaataaaaagatttgaaacaagtgcttctttttgaaatgtcaaagacaacacctatatcacaaaccaaaaccaaaacaaataacttcaagtaactaagagcatgtttggtattgttttctattttttgttttaaaaaatt

SEQ ID NO: 115237 - DNA, 2866 bp, Cannabis sativa
  modified_base (2815)..(2838): a, c, t, g, unknown or other
ctctctctctctctctctctattaatgattatcttctttaaatcaagatgattgttgatcgtctcattttagtaggtcttgctatttctgtcaaagaacatgtagctgcaaactttaaaggtctcccataagactatgacacttttgtcatctctgttaactctcaaaatattccttaagcagttgctgagattgaatctcttcttctctctcaagaatatagaaaggacagtcataccaaggatcctgactctgttaatcttgcaataaatcgaccaaatcgtggaagaagctcatgattctctaattttctaggtaacacgcctccgtctcttactttttctagtagaggaacatggaatctatatgttgttaatcctcatggtaatttatcgccagattactctacacctccaccaggttttggtcgaggcacaacaccacagtctagatcatctttaagtccaaataatgcaaataggcctatctattagctatgctctaaatatggtcatattgcctctcgctgctaccagaggttcaatcttgagtttacaggtgttggtgcagccaatatagatcgacaatctactaatattactacctttgattcagtcaatgatccaacatggtatctagacttaggagcaacatctcattgcactacagatgtgaacaatttcactcaaaaggatccttactttgactctgagcaggttcatatgggagatggtgcaggcattcccattcaaaatgttggtaaggccacattcacaactccttattcctctaaaacactacttcttaattgaattcttcatgtccctactatcacaaagaacttcatgtctgtttcaaaatttgctagtgataacaatacatatttaaattctttcctaagcactgctttgttaaagaccaggcttccaaggaagtccttctgcagggacatcttaatcaaggcctttatgtcatacatccctcacaaatgcatctctctcaccattcatcttcaactttatcttcaagtccttgtcaagatttatgttctattcataattacactgtgcaactaaatgtaccatttttttcaaaaaaaaatcttatgacatagcaggttgggacacccctctgctaaagttgtaaagagcatagtgtaatcttttaacattttagatttaaataaaattgttcatgatttttgtgaagcatgttgcaaaggcaaaatccataagtttccatttccacattctgatactatctatactcaccccttgcaactaattcacacagatatttgaggtccttctcctactctttctttccaaggctacaaatattatattcattttatagatgccttctctagatacacataggtatttttatctaaatttgaggctctacctacctttatacacttcaaaactcaacttataaataagtttaattgcaccatcaaatctgttcaattagattggggtggtgaataccaatctctagagccttacttactgaaacatggcatttcccatcgggtatcttgtccaacaactcatgaataaaatagtgttgctaaacgcaaacacaaacatcttatagaaatagctcttacctttcttgctcatgcttccatgccactttcatattgggatgaagctattgagaacaaaaacatttgttatcaatatgttgccaactgttgttcttcaaaataggcgtcctcttaaggttctttacaacaaaatgcctgattactcttcactaagagtgtttggctatgcatgctttccaaagatcaaaccttataatcaaaataaacttcagtttaggtctgttaaatgtacattcctaggctatattcttaagcacaagaagaatatacatctcttgagatgtactctttaatgaaatttcatttccttttgccactacacacctttctcccttttcccccactgcacacaaagcttctacactttctaacattcccctcatcctcactcatcctccaaacacacctgcatccactatctctacttccaacaattcttcttccactactccttctactcctaatgtttccatatcagagtcttcctcatcttcttcccattccaccaccccttaatcaactttttctcatcatatggacacgcctaatagtgtcacctctgcacctgcacctatccctcctcaacctactacagcacccaatgtaaacactcatgccatgactactcgagccaaagtaggtattaaaaagccaaaagtttttcttgcttcttttgtacctaactccattactaaagctatgcaagataaaaaaaatggaatcaatctatcaactctaaaataccaactttagtttgaaacaaaacttggacacttgttccattacctcatgggagaaaagcaattggttgtaagtgggtgcttcgaataaaagagaaccctgatggatctgttgaaaagtataaggctagacttgtagccacggcttttcttaaagagtactgctttgattacatagagacttttagtccttttttcaagccaaaacaattagaattatacttattgttgccttgtcaagacattggactatcaagcaaattgatgtcaacaatactttcctaaatggtgacctgcatgatgaggttcacatgttgtagcccctggatttgtgaactctaaaaatcctcatccattttgcaaattatacaaggcattgcatagattgaggtaagttttgttggaaattattttaccaagatctagatttattaccaagtatgtttgattaacatcctannnnnnnnnnnnnnnnnnnnnnnnaaacacataagagtttaagaaaatctta

SEQ ID NO: 115238 - DNA, 1136 bp, Cannabis sativa
aatgtcaatgcagatattttcaccccctttagcttccctttttataaattagattgaaaaaagggaagctaaaggcttagattgtagtagtgtaataagatatataaagtgtactgctgctatacaaaataatatacatataaaccatgtatattatgtatgtatatgttgtctgtattttctaccaagaacacgtatcactgtcaaagggctcttgtaaaccatactgagcccaatgattgatggttgctcaagtatgttgaggacctgagtccacaattgtgggccaagacaaagccttggtcttggacaacatatattgacttgaattgggattaggtatcacaatatttgtccccaacacaatagtgtcttcggcttcatccattcatcccggttcattgaatcaggatccttcctgaacttgccacagtgaatagtatacctaccgttagtgttactgtatcacagttagttaggttagttaaaattaggcaagttattaactttgtcctaattttttaataaaattttgttattatgttttcattgtatgtcagctgaaatttttgaatatacataaaagaaagtctcaccttatttcaaaactagagccattttcacatttttattcctcaatctagctatatcttttcttttatctctgtaaaataagctttttatagctttaacttggtatcagagctgatggccatgaacaccggaccaccagttgctccacctgttcaaaatatcatcgttggtgctgttatcgttgctgttggaccataatatctacaatttacttcaaattgcgattcaactcgatcaaaaaacttcacctattggagatattgctcatagtaatttccatctttataatatccatctttaatttcaccatcatcttcgccttcgtcttctgcatcaccttcatcctacagatttccttcttgatcacccatatcatcttcatcaataggtttctcatcgacatatttttcctaaggctaggtttccttggctagacgattgccaataacttctgacgtttccttgcccttacggcgccactacaaaaaatgtcacttttactagcaccgttcgttattgcgctggtaaaagtaacttttacc

SEQ ID NO: 115239 - DNA, 1884 bp, Cannabis sativa
aaaaaaaaaatggtagcagatctgatgggtagtccgatgggtggcccgatgggtggtccgatgggtagtccgatggtgtaaatgagggtgatgtaaaagggtattttagggatatcaagttgtcatatccaacaaatattagttattatttgtttagaaaattttttttaaacaaatgtaagcataaaaaatcaaatttcccaatacatatgtaactgcttttatttgaaataaaagaaataactgttgttgttggatagacttttcctgcgttacggacgagctggtttatagcagtacttttcttcctcagggaaacactgtaggaggctgcatactagatatagactctttgtcagtcaccttggtcctgattccaaaccttccaaggtgatcaacaggaacaggcttgtagataagttttgcatttcctcgtcaacaatatgtactccaagttaaacatatgatttattcttctcctcaatcggatgtatcatacgagatgatttttcctgaattgtgcctacgtcactctatcatttaagaagagagaattttcctcttatgtttgaggcgaccttaaatattttagtctattgcgagttgccttaatcgtagtggattttcacctaaccagtatccttcgagatttatatgttgaatctcaattctttgatgaggttaatttcattaattgtgggatttgatacatgtgttgcacaactgaatctatatatttattactcgaaatatgggtataacatttagtaaataacatactacatatattaaattttatttttttcatttattctgttatatttttttattaatttattctaattttaattactgtttagtaaatgtaccataaaacaaaaatacataacataaattaatttaatgtcatgtaaatttttattcttatttggcataagtaattatactgaaaaattatactacataataattaactttttaaaagagtaattaacattttttttcctgaattatgaaattaccaaatgatgtttttataatatgcgactggttaaaaatacctcttaatataatataattgtagaaatttgccccttgttaagttttgttacatttacccatttaattggtgatgtggcatttcactaaagagtaataaagtaaccgagtccaatttaaaaaataaataaattgacatttaaatacaaatctttatatatatgtataaataaagagattaatgaaaaaaaaaataagtcattttagaaaataaataaataaacaaacatctatttttatatatatatatataaaaaaattaattttttttaaaaaatcttatattaaaaaagacattaaaaaaatatttatatttatataaagtacatttttttttattaaaaaaaaacccttacattacattaaaaaaaaaaagacataacaaagaaaaatttattaattttttttgaaaaaatctttatatgaaaattaacatcattgataaagaaatattatataaaaaaggcaaatcttaatttaaaaaacaatccttacctcagaagatattaataatataaaatatttatgaaaaaaagtatttttatataaataattgacattaataaagaaataaaattatatatatataaagaaacatcaattttaaaaacaaataaaatccattaatgagttaaaaaaacagagaagacaataaaaaaaatctccattttcaactttatacttggttaatttttcttattttttttttttcaattaacgttaagagggtaaaaaatatcagggcatttactttacattaaggtagcgtttggttggaggtaatgaaatggaatggaatggaaaggaaataattttcattccatt

SEQ ID NO: 115240 - DNA, 4560 bp, Cannabis sativa
aacttttctgtgtgacagtattttcgtaaaaatttcgtaaaaagtacctcaaattcaactcaaattcaagtatttttgtaagtttccctaagaaaagcccacacaagcctgaaagtgataaaataagctcaaaaaatgactttaacaaaaaaaggaagtgaaagtgggataagatagacaccctgaagatatcactaaaacccttctgggcaataacatgaggaggcttggtagacactaacttcccctagctctttgccttagaagtaaacaaggcctctctagatgccaacaacattgtgacttgtgcacgcaagttctcctcaagcttcgacttacaagaactcgactcagctacatctatttctattggagaaatgaccatcgaagaagtagaaggctcgtcctcgatttcaataaccttctctttttctttgtgtgaatccctcactggagaagaatttttagtcacaatagctttgtccttcttcgtagacttctttggaaaggcagaaaaagcggcatgaatggcttgcacgacctttagattaggaggttggtcagtcctggttggaggtttctttctcttggaataggaagccatggaagcaagaaaactaatcttacctgtgaaataaaagaacaagtggttagtacataagaaaaatatggaaagcaagacaagaaatcaagttaatgatgactatggcaccggaaccaataaataatcaagctaatcaagacaaataatcaagcttcaatgcgacccaagtttcaactttggcttcatcactagaaccaactccattaacattttggtcaagagacatagatactctccttgaataatttgagtcaatacgaggaggaccatcgtcttcagacatcacttcaaacccgatgacagcaccacttagcccattttcttcatcttccaagggcattattcaataattatcagcaaagcgagcatcaacatacactcgctggcaagtcgctatcagccctacatgatgaaggttgtcatcagttaacaacatctttccatctctctcccataaatcaatgttagccaacgtggcacgagctctttgtttcatgtcaacccatagagcaagtcttttaaaggggccagccttttggaatgtgacatatcttgaaggaataatgtgagtttatagagactatagttgatcataatgatgttgttaatgtacacactaaactgatagatatggtagacgccattttctttatggatggcacttcttttcaaatcacatagaaaattgatctcatgaggagttgaataggctagttctgcatatgataaatgatgaaaaaagttgactgaatttggtaactgtttggattcatttgataaggacataccccgaagtaattagcgatcgacacaaactacgggtgtagaggcaagaatgcacctacgttcatgtgaaatctcaaccaatcactacaatagggttttcgagaaccactaggacacctgatcctggattttttgacaacagtgtcaggtaaattatactcatctcaaactattaaacccatattttaccaaaatatgtagcaagcgtacggggatccacgtggcagaggggggccattcatggagagatcaacattctttgtagaattactctacacccagactccctgagtaaaggtgcatttgggagtaggtctccaatatcaagataaatgatcaagcaaatatttagccatttgggaggtgctatgctcctggattataggtcctccgagactccatcatttgcctaatacaaattccaaagcagatcattatacatgactgttgtagcacataattaacatcattacgcaaccaaactattttgatgactcattcacctaggaaagaaaatatgcactgccacatcagtcgcacatggaacaaatcttctctcacaaaactcctaccacgaaggctaagtagcacctagagacttaagggagatgtaccttttttcctcccttaacccttctttttcctataaatacctggaactgtaatgagaaaaggaaatttttggactcacacacaaaagtgagctctcatactgtaacttgaatattctctaatcaagagaacattccaaccataaataaaaatgactcgtagactacagttccttaatactagaaccaagtaaaaatcctttctctaattttctcaatcatctttactaatacttattatgtggttgtcaaaaatctcggtcaatattttggtgctttcattgagtgttgtaaaaaaaaaagcaaacaaacaaacttgcatctgaatggcggcaacaagaaacagtcagcgacctccaatatctcttgatgatccaatacacctagaagagggggtagcctcctaagtagatggtgaagggggtgatactaatgatcctgaatattcataagaaggagaaacctatgaagacggtgaagaagacaagtatgtagaactcgtgtcacttagaaaataggctacacaacaagatgccaagttggcaaagcaaaaagaaatgaaaaggagaatgcaagaggcattagctgtcatgcagcaagctttggcttgggcaaacctccatgttgatccaacctctctcccaccaacacttggtgaaaatggaaaagaccccttgcaacactaagaaaatcatagacggacataaaaaatgcacaatcccatccgatatcctttcgaaggtcctccattcacgaaaggcaaccctaccacaatacctagggtgagcagaactcagtaggactcttgtaaggtccattctgatctcccacaagggaaaaatctacaaggggatgtgtttcctcatagtaaacataaaccccaagagagtaaggggtgtcaaagtgtgtttgtacattagggacaaaaaggaaggggaaggcaaagcaagcgagacccgctagtggatttaagagaaatgattaaagaaaaacaaggggaacttagggaacacattaactcttgaaaagttactcaggtagtgccaaagaaattttaaatgaaggcatcttggcataaatggtcatcctcaggaaagacataactaaagtgtcccaaagacaaaaaggagacaattctgagtgtgattgtgagaatagggagtcatgcactagaaacttcctagaggcgaagctccccaaaaacttcaaaatgttagagatgactcagtacatagaggacacgaatcctagtgaccatttctcaagattcaatagagtaatgacagtgctgagagtgagcaatgatgcaaagtgcatgtgcttcccattaaccttgagaggatttgtagaagaatggtttaaaaagttagagctaggttctgtgagttactggaacaaactacaagctaacttctggaggcagtttgtagctgctaaaaagataaacctcaaagtcaatgccttgacaaataccacaactacctacagaaaccttgtactaataaaccttttcctttgtcctttatgggatcagaagttctagggtatgtagggtttattttctttgtagtattatcttttcgaggagcaagttcaccaggaatattttcattaagagccaatttctctaattcaatcatgacctccaatctggttaaagtttctctcatttgatgagagaagtcttctggttctgccaatttctttttggtttagcaagttccttagccatcgaataacctcgggatctggctcatagtaatacccttcctcttctttgttgtcaccatcaccttcaagatcgtcgtcctcaggatcatcatcttgctcttctgagttgccttcttcattgatgggattctcatcaacatatttctcattatgttgagttttcttggtaggacaactagttacttcagatgtatctcccacaacatctacttttgcatgtacagtaggagggttcatgtcatccatcatgagcacccaatttgccaaaagtggttcttgtggctaccactgttgcagtttacaacttgggtatcaactctttttttagctctcaataatgcaccaaaaaatttactgagatttttaaaaattgggtataattatattaaagctaaagaaatagataaaaaatgaagaacaatacaagagattttacgtggtttaaggattaatgacctctagcccatgagtcaatattattatgactggaaaagcctttgagtattacacaaatatttgccaagttaacaattcctagaatttgccttagctctcaagtatcaccctttgcatgaatgagttttcttatatttatagacttagggttcttatctataaactttgcctactaatggggtaaatacaaatgacatatcgactttgggtccatctggtggagcttaacccatgagacattgatcttttgcttacgtggatgccacatgatgttgatattgtcaaaatatgtcaaggttttgtaaataatagagacacatgaatgctttcttgacaattactgttgacttcgcttttagccaacgacaatga

SEQ ID NO: 115241 - DNA, 1767 bp, Cannabis sativa
  modified_base (285)..(291): a, c, t, g, unknown or other
tccatgaagcagtcagagtgacgaactcgtgtataagagccattactccgtgggtgtaaggacccaatggaggcttgaagcggggacgttacactacaggtcctactgaaccaaaattctggttcagtgtaggaaaacttcaaaaattccctacaacttcaaatcaacaccaaacatcacaataacttccagacctgctatttagacctcaaagaacataatcaacgtaacaaaacacttctacaaggtcagtatcaaattccaccattaaagctccaagtttgnnnnnnnaaactcaaaacttggttaaatccattaacatccattaaatcatgcataaatcaacatgaaaatcatactttaacttctgaaaacaacatctaacaactacagcaacaatagtaggtaaaatcaccatttcatgcaaaaaatctatttctttatatttaagaaacttaagagagagtttgctaaaggctttacctttgcttgaataacactaagagttgctggaaatcactggattgaagcagaaaatcaacaaccctacctggttctaggggtttcgaaggagagagagaacttgagagaaaagtttgtttaaatctaattttttatattttgagaaaattagaaaaatacttagttttattaaaataaatctcagcttaacattaattaaaaatatgatttttaactaaaacaaagtcaactaaaggagaagggactaattggacaaaatgaccattttgcccctcccatactaaaaaccagaaaaggccacctaggggtatctatgtcaactctaaaatctagactattcctgacattcccaatgtctaactatattgtcccgctatactaaaaaaaatactaggatgtgattctaatagccaaacactgcgttccaatgttatcgggcactaaatatgaaaaattatggaatttctatatattacatataaaatgcattatgaattcaaataaatcatcgtaaattaataatttaatactaataaataatttcatatttaagccctaattatctgctaatttccaaattaaagctatgcggtcttgataatccgaatatctctctcttagctactgaagccaattttatcaagtagaagctttacctatctaatcatgtacaaaggaccaagaaggcaacaagagatccgatgtcagtctgagaaggagaggatgtatctgaacaggaggcttcgagcaacaagaagaagatgaaggctcctccacgcgaccaagtacctattgagtgggccattaggatcaaggatggtcccaagaaggttgctcaatcttctatctcggtggttggaaagggaaaggccatcatggtcgagtaggaagaggaggattcttcaaacgaggataacccttccttgcttgtctcggagcgtggccctttccacgtataaggtattgtattttgtttttaatcttatttgtacttgtttgaatcatacttgttgtgacattcttgttctatgatgttttcggccaaaagtctccaccaaaacagtcaaaggtggatgatatgacgcccaagggtataattccaagtaccaagactcctcagctaactattgacaagacttcggatgtccctctaacttaagtttctgatgatgtggtctcggatataattccaccatccaagaagaattctaaggaggcgtttggttgggaggaatgataatataggaataggaatgggaatgggaatatgaataggaatggaat

SEQ ID NO: 115242 - DNA, 1587 bp, Cannabis sativa
tatatatatatgattaattattgaccatatattacatgttataaatttactttgtattattcttttataatacaaagtaaatttattttctctagtttaagtttctaaattgtattttatcattttggagagagtttgttttgtattaaaaaaacaaattactattgtattaaggttagaggttatccatagaaaagtaactcagttataagtgaggttgacatcgatatggtgtaaataattcgagtaaaataaaattttcactacaataattcaataaaaaggtgaagttaaaactggtggaaaaacaactcggttagttatttacaccaagggttagattgacacttaaacaattcggtgaagttgatagtaatccttagaagaaaactattgtgagaggtttggaaaaatccttggtgagaaatttctcgattgtaaaggttagtcaaatctgttaacttggctcttcagttgagctcaaagctaggtctataactttgaagacaagaacgtaggtagcttagttctactaaacattgtaaaaattgagtttacaatttctatacataaattctttacatttcaagtttgatatttgtttatacttgtgtttatctatgttaatgcattaaatatgaatatttgcataaattgtctttaaagtttttgaatttttgaaattagtttaaattttcaattcaccctatattttgggctaatatatttgtaaatagctagtaatatttcataatgggtaaatattattttggaccttgtgttttgtaaaaattactaactggaccatctcttttgttaaatgacaaattagaccatgtattttctaaaacagtactaaatggtaccttgaactgattttttttgtaaaataaaacttaataataacttaatatagaggtgttatgacaaaactgattacgttttctatatctgttcgtgctagaaattgtctttaagttagttatgtttgaaaaaaatcgaaaatttgagctcagaattttatttgtactattttaaaaaaatatagaattcattttctcattcaacaaaacataaagttcaattaataatttttgcaaaatacaaggtctaaaatagtattaatattttcataataattattaaattaaatttttgtgagactcaacatttaattatagagtattattatcggacaccaatagtgtctatcactttttaaaaatagcaccccacaattaattagtaatattctttaaaaattctatttcattaaattatttaggatctaatatttaattaaactaataataatataatacttaaaaaatagtaatcgccaataatctcttttaacatttctcttaattatactactaaccatatcacaatttaggtagtgtcttttaggctttagcatttctctttcattgccaaaaaaccttgaattgagtcctatatatatatcataccaccttgatacaatagatatcatgtaatgattgtgttacatagatatatagaccatttttccaagaaaaatacctcgaagaacaaactcttcctttttctcatatatatatatat

SEQ ID NO: 115243 - DNA, 2452 bp, Cannabis sativa
caacagtatgcaattagacttctatcaaagattcatgcatgaagtcaagttcactacagaatagccaagtgaatcctcagatacttgcgaggaacaaaactatatggtatatggtacggagttacaaatgagtctaaactgattggctacacagatagtgactgagcaggaccagttgacgacatgaagagcacgtcaagatatgccttcacacttggatgagaaatattttcttgggcatcaaagaagcaagaaactgttgcacaatcatctgcataaagcagaatatattgcaacaactatgcctacataccaatctatatggcacaaaagaatacttaaagacctgggaaaattacaagaagaagttttaaagatcttctgcgacagtaaatcagctatagcaatggcgaagaatctcgtatttcacagcagaacgaagcatacaagcatcaaatatattttcatcagggaagcagaagctaacaaagaaataaagttgaaacactacaagaccgaagacaatcaacaaatattttcacaaaggcttaaccaagaagaaaactcgagctactacgagacatgattggagttaaagaaatatgtaccaaggaggagtattagaatgtactacacatttctatagcaccttagtctaaaaatttctacacatttctagaaaaaattctttaagaacctctagtaatttctagataagatttaatctagaatatactaactatgtgaactctagaattatttagatgtgtatagatacaatttcttctagtaaaagaagaatttagaagaactaactttaaccacaaagtagggtaagaaactataaatagcacatttaggtttttaaattgtgtaaccatcatccaaactatcactaaaacttactactttttcaaacaatcgtcttctaagctaaaccattttatactatatacacaaccaactattaaggtatgaccgtactaccatcatcatcatactacactagtcactaaatacattataaaattattaccaaaaacaaatcacaactatttagtctattccaatttaacaaaccatcatggggatccacttaatcgtttccaactttccaagaaagaaagaggcagcagttcgtcagcttgttagaattttcaaacttgttcacataaatctcacccactgctccatttcttgactattcaaaattcccaagagatcaacaaataatattacattttatttattcccgcaggaactaaactcattgtccagattacattaaagaacaattttttattattattatatgtatttactgcatgaatagtcaatatgtaatacagcttttattttagttttagagtattacaacttctattttaattagagtatatacaacaacaccgacgtggcgttttttttacaaataattagtcaattgaaaaatagcacatcaaagtggattcaactttcacttaaattaaataagtcgattttcatcacattcttgtgttttataaacgaataattaatatttttgcttctgaactttttacattatttgattttgcttcttaagttaaaaatttcctaattattctttgtaaactgggtagcaacataagcaaaattggtaatggattttggtgaaaaatgaaaaaagagaatgcaaatgtgggaaaatagccatcgtcgtgtgaccaacatcaaacccaggccatcattccaaatgaaataatggaatggatcattaacattgagaaaaatataggaatgttttcaatcatacagaaatatcattccacctatagaaatgaatagattaattaccaaaatactgaaatttggagaagaaaaaacgtaccttgttaaatatatcttacgctatttgtttttcaacaaaataaatattgtcttgtgtttcaaataatgttaacattttgtaatattttcaaaaatatcaaaatttagagagttaccacaaaaataaccaaaatgtaaaatgggttactgtgtttatgagatactgagagtactaaatctataagaatatggttaataagttttgaaaacaagtaaccagatttcataatgtttgccatgcctataattgtaaccccattctactaaattattgaaaattcagttactcattcttggaaaattggtcactaagttttttttttttttttttgacataagaaatgagattcgaacttggaacttcttttttgaggaaaagtgtaaaactactaggctatgcctatgaccatggtctctaagtttttataagaatttttttatggtttttttagaaaattttaaaaaataatttaaaaatatatattatggaaagagtaatttgcggcataaatacctaagtttaactcccagttgcaaataaatacataagtttaatttttagcggtaataatacctaagttat

SEQ ID NO: 115244 - DNA, 2401 bp, Cannabis sativa
  modified_base (2342)..(2376): a, c, t, g, unknown or other
gtattgacttaagaacaaggaatataatcccttttcttagagctcttacaatagtatctctgaatatgaattcttagacaattttttgaccttttgcgtggtgagtatgaatcactatttacaaggctataagctttagagggaagaatttcccttctgattacaattgatataattggaaaaattgcatgttaaatacagaatacactaattaagcgattcagatagcttgccatatctctgtgatctgatcccaaaattataaggatttcttcggtgactcacgatacgaaagttgaaattgctaagtgttggcgtgttgttcagattgctcactgcccagttaagaaggcttcatccgagcgaatatatgtggcgctctgttcggcatatctcttgcgagtagatacataaagttgattccacgtgtcaccatcgtatgatgccatgtcggagtgcaaaaattgggataacacctacaaagtacacattgctcaaacatctactcttaagtagatggccttgtgagtggacctcgctcaaaggtttggagaaaacaactggtattcaagttggatgaccattcttaaagtgaaggatgttcagaaatcatcgctcttgagaaatgtccttggacgaactacaccgttcaattgttttatgtgttaagtagctaaagatcagttagatcatgtaatagcttttataattcaataaatgtgcgttactacggtaacaacacatccagaccaataaacgaataaagatattagttatcattccaattgtgtctatgatatagcaagttatgaaattaccattaaaaatgcatacaaagggtttgccttaacccagtagctggacaaacaaaattgaacttgtgtaatacaagttaccaagagtcataagtctgcttggtcatttggggggcaactacacccgtacaaagcataggtaagtaacaagctcaaaaaacaaaacatttacatgtgcaattatttaaacttaagagaaaatattcattttagaagataacaaagcatgataactatgggattaaaagctgcccgatcatccagttgtcttaaaacaaaattaaatattatccaagtttataagctgcttggtgggccatattatatcaaaaagggcccatgcgtcgaactaaaaaaaacaaaaaaggaaaacttcaaacagttatagtccttggctctttatatgagtccatatgtgtcatcagcggctggttctcattgctttggttggtcagagcatcagtgttggctacctcggattcttctttatctttttaggcctcacaaaaactaagatgtgtctctttgttttcattgaggtaatcaaagtttgcttttggatttgccttccaaaatttataaaagacatccagggtggctgtctccaagctttccacctccttctagagtagcttctgctcggtaccaaactttgtccgctgagagtcgagagtctcctccaaaaccttcttctccccggtcaaattgaaaataaaggtctgaaggccttccctctcatccttcaaagaattgacatccttggccagagcctcattgtccgcttcaagctgagcggtggatgacatatcactgatctccttcctcaagtcctcaacaagcttgttatcagccaaaagttgcttattaaccttgcttagttgaaaacttttctgctcagcctccatcttagtttcctccacctccttttaaagttggtggtggtcgttgtagctttcaaggtggtagacttggctcgaggatacatacattccatctttaggttgagctacacaatgaagcaaaatcaaagcctgcccgaataaaagcatgttaaagaaaaccaaaggaaagttacttactcgagtggattcctttagaaaactgcccatgagaagctcctcagacatgtcctctccttcggccagctggtcattcacctcgagaagaactcgatcctgatagagttagagcatctccttcccgttcttagtttctgggttcatcacggtaggagacgataaaggtttgggtagcccaggcccatcagtacttcctcccttttaacctttggaagggatagctatcgattgagatttagagttcttcttggccagtgggattacatctgatactgcctcctcgagaaccttaattggaaggacagccgagctcttctcaacagtcaatggaggagtcttggtgcttgggataatgctcttgggcgacatatcatccaccttggagcgcttcactagagacttctgaccggaggcatcacctaacctctattgggttttgtgccctaannnnnnnnnnnnnnnnnnnnnnnnnnnnnnnnnnntaataaagatcagaaatcattttat

SEQ ID NO: 115245 - DNA, 2300 bp, Cannabis sativa
atttaaaaatcaaatctttaagaactagaaaggtaaacaatgatacataataaataatctctaaattaactagaagacattattaaaaaaactatcagattttatattatccctctcaaactattgttttctacttggggcttattagtttattaataagaaaccccttttattttaatatgtcatagtacattaccaacacacaacaagaacaatgatctttcaaataaactaaaatatgaaactgtcatcacaaatatatacaaaaaagaagaaaaagagaatgaacctgccattttctccttttatcaataagaaacccttttattttaataagaactacatcaaccccataattcttttactttggttttttctccttcctattttcactaattatctggtctttatgccaaaatacttcaatatcaaattcacatttctacccaaccccaaccagaaaaaaatgctggaaaaaatgcaaaaaaggaaaaaataataaagaaaaaaaatatacctttaatattttgatcagctgctctggcggatttgggcgattgtggaatggatgatcgagtctcatggggtttgggcgagggattctgggtttgggcgagggtttctgggtttgggtgagagggtttctaggtttgggaggttgtcgaggttaataggtgtatgagtcgacttcgcgagatgcattttttaggggatgactttttatcccggttgtttagtgaaaaactgggataaaaaggtttcacatttatcccttttatctcagtttttaactaataaccgggataaaatgtttctctaaaaaaattaattcctgtttggcaaacccataaaaatcgaaccttgaacttatttttttacctttaatattttttttaacattctactaaacaaggccattgtctaaaagaaatatttgctacatatttgaggcgccaaatctaaaagtgggataaaaagtctcaatatatcttttatcccattttttatttttgttacctaaaatagtgggataagaggtcccctttcttgtagtgaattggttgcaatttaaagtattggaatatcattccaatagaatggcctttccaccattttggtgaaatgattattccattttaaaatagaataaaagatcattctaatgcaagatttgaaaaattttaataatctttttttttatcaattttcttatgcattttcaatttaattcattccattcttattccaatttccattcccactcctatatttttattcttcctaaccaaacgacaccagttagaattctttttaatttaatttaccaaagaaaatgaaacaaattggatttagagtggattaaaaattgtaaagaaaaagtgatagtaaatttgtataggagatcaagtataaatgagttgaggccttcttgtatgtgttgttagtttgtattcgttttggtgtttgaagtaatacaattcattggtttatatatataaaattaatacatatgaggtctaggatgcaaataagagaaaggcatgcataagtgtaatatcaatacaccattttattcattcagtttttgttatcgccatgattatcaatcacatgggcaattaaaacccatacatcagctgtatctgcatatgtaataatgattccataacataaccatatgtttggacaaatggctaatcacgtagctaacaattatttattaattacgtatatagggatccattgagctcaagccccaaacttcttctgaagttgctgaaccaaatccttgtccaacatgaacgccttagcaagaacatcaggattaattggagggtcagatccaaacacggcattagcaatggtaatgactccgggattctggctcccaaggccggcgaaagccaaggcgggagtctttccgacattgaactggaagtgaatcattcctacggggaagacgaagacgtctcccttgttgagaagcttagcgaagagtcggttaccgtcttggttagaagaaacaaaccccacgtacaacgttccctctgcgacgaacaggatttcagaggcacgagggtgagtgtgtggtgggttcagtccgtagggggcgaagtcgatacgcgcgagggatattcctagtgtgttgagccccggaaggttgtccacaaacacggccgtgacgttggagcccactgcattgtctgtgtttcctggaatgttgatccctgagaagaagaagtcttctgccttcaccatatcaggattcttgcagaatctcccgttcacaaacactgtta

SEQ ID NO: 115246 - DNA, 1219 bp, Cannabis sativa
gttaaaccaagaaatgccgttagataggcacttttaatatataaagattctgtgagggaggcctgcagcatcattaaaatattagagaaaaaagttcaagtaattagctagaaaatatcaatcatcaaacacaataactaaatcaaatacagtataaacatactaatatgtcaaagtaaacaaaattaataatatcaaagaataattcaaatttgaaagaaaagacagcaagatacaaagcaaaacataacaaaaaaatctattgtgagttgagtaggagaatgatttgcaggacaattcaattatttttacatgaattactcaatagaaagtagtctcgacataggaatcttaagcattgagacatgatcttcattttttattttaagaagacatgatcttgatctttcacttcttactccaaaaacattatatatatagatatggttatatatattatagggaagggttattggtacttcgtaatctctatattgataataataaaaagaatgtatatatatagagagagcacatattgtttgtaaccgcaaaaaatgaaaggtcatttaaaaataataacaataatattaataaaaattagtaagttatgaaaatgaaaattgtttcaaaaaaaatcatgaaaatgaaaagacacattaaattgtatttatgtatgaagtttgaagtatacaacgtaaacacttaaatgaaaaactgaaataatttaatgacatagaaaaaatttaaattagtagactattattaaattaaaagaactaaaaaaataaaaaaaatatatttatatatatagatatacaaatattcgatattatctctataaatattattgttagttgttattattactactacaaattacactattcacgtcggtcaacgttactattcatagcgttgatcgacgtgaatagtgtccaaattattggacccgtctatttaaaaatgccacaaataatatatattttgcgtcttttaattaagtgacggtaaaaggtaaaccgatgaaataaaaaaaatatataaaacaattgcttctatttcgcgtcaatttataaaactcgcttaaggtatttgcgaggtttaaaaattgacgcaaaatgcaaaatatgagaaagagaaactgacgcaacacatttaaaatccttgtaatgaccgctttagtaatttggattagcaaaggcaattagcactaatt

SEQ ID NO: 115247 - DNA, 819 bp, Cannabis sativa
acttgaatactataaaaaatcatattaatttgactacttttgccataagtatcttagatataattttagatgattaagttgtaaaaaatgattattttgaatctaatattagtttattggcccgcacacttatattataatatataatataatattatatagaagaagataagaattaagaatctattgacatgttgaaataaaggtagtgggaagtactagtgttattgtacccacacctatgtaaaatatcacatgaataatgttcctgattaggatggctaaagtgacaattgtcctagctttgtaccttccctcgtccggtaatttgccactcatcaaaaccaaattccctaactgtaaaataactaactttttaagggctcgtatctttaaaaagttaggttctaaagaatcatatctcttattttatattagctcttgttcatttctacaaggcagatgacaatgcttttagttcttttgccattcttttctcttcaacttataaatatcaattataaaaagttacatattattaataataataattaataatcccagaaggagaaaaaaaataatagattgcaaaaagtatttattgtggaaatacaacttgcattgataatgagtaataagtgccccaccaatactcacttttttgcttaacactctttcctaattgtatcacatttctatctttcatatgcgattcatatatataatatagaaatttttacaccaaaaatctaaaatgataaatttattacacaaatacctatacacggctaaaccaacttttttactcatcttttatat

SEQ ID NO: 115248 - DNA, 1971 bp, Cannabis sativa
ccaacaacacacaaaaatagggattttcctttcagacattagtcttatttttttaagaatttagttatctttttgtaacttaaatagtagataaatagatataatatatccctattttaatgggatatccttacctacttaaattagatattttgtaagccctacactatataaagggcattaggtctctctcattccctaagtcattctatgtcactccacttgcataaaaaggcctaagctacacgggaaagcctttctctctcaagtatcatacttcatccatgctacatagacactaagtcatatcttcttaagtccttcacaagaacttatcagttcttggtctgcaacacattgttctcaccattttaacattcaaagagagtcaaagatagaattcataaggttttcacctatgatgtgcatggtattatctctagaatcaatacagctaaaaggggagtaggttagtacccactaaacaagatgggcgaacctctataaatctctatatcacttttactatttatttttcttacttacacatagggataatcatcaattaataaggctcctcggtcagtttactaaattctgagtcaacagttactatttttcgctaaaataaaagttaccactttgtttaaaaagttttaatttttttttcttattatattatttctaccgaaatttcgacagcataactgcttaaaattcattaatttcaaatttttaaaacctacaaataacataaacaaacatcctagaacaatatatgcacaaaaataattatccatctatctgaccgcagtatatttgatcacatagcctacttcattacaaatgaatatttaaaatatccaaactcatttgaaacatgcataaacatactaattaataacatatactatgctatttctaatacaactaatatgaaaaaataaattatgaacctgaagtaatgtaaaaataacacaagcgggcagctgtgatccaaaacagtaaaatagggactaatttcacaaaaataagcatacatatatatacacaaaaatgtaccatgtcataaacttagatatatatttattcatattcacacacacaaatacatatatatatacatacccatacccacacacacatacacatacacatacacatatccatatacatatatactatacacacacaaatacatatatatacatattacatactcacacacacatacacatactatatccatacatatacacatgcacacacacacacacatatataaaataatgaaaaaaaatacacaaacacatatgttacctaatatataaatgcctatctaattttattttgtcgtacacttaatagaatattgtgtatttaacagaatataccaattagaaagttaactttaacagacacctattccattcacaagtacaatcaaatacccattctatttacaaagaaaccattattcactaatcgaaacaaccattcgcaagacatcattggttatcaataacacacaactaaatgagataaagagacaataatctcctctacacttaaaaaaatcatctcctaaatagttaacaacaactccataagaataggtctatttggtaagaatccttctcaaatgctatgaatctaaatagtttacaacaactccataagaataggtccatttggtaaaaaatccttctcaaatcctatgaatctaaatagtttacaacaattccataagaaaagcaccaattcgtaagatttttctcgactcactaattctcatctctcttaaaaagttgcttttgtgattattgaccatcatctcaaattctaaagcttacaaaaaaatcatttaagatttgtttgattacatttatactatttatataatttaattataagtataatactgttagaattttatgccctaaagaaaactcatttcaatataatctgatt

SEQ ID NO: 115249 - DNA, 3948 bp, Cannabis sativa
  modified_base (26)..(26): a, c, t, g, unknown or other
  modified_base (3882)..(3882): a, c, t, g, unknown or other
ttacattgaaacagagttttatttanggcataaaacccaacagtgcgatgtttgtataatcgaggaccctagggtctagatcaggcttttcctcatgtaggatttcttcaattctaaactattcatggcaaggcagaggtgcttcgagcatatatgtcacgttcactgatttcttcttttctaggaccttcatcgcagtattgtaacattcccttgaatttccctaaactcctctcactgatcctacacctactggtgtagggaatttcattgtaagatggtagattgaagtgactatttttatttctttcaaaatggggcgacctatcactgcattatttgcagaatattgatcgatcactatttgtagtaacaggtgtcgtccccaaagttatcggtagtttgatcattccttttagtttgattgtatctccgctaaatccgtagatactctaagtcacaggcttcaaaattttctcatgtaacccaattttctcgaaggcttataaatttaagaggttaattgagctacaattatcaacgagtacacaatggatgttgtcacctcctatattggtgactaccactaaatcgtccgtatgaggatgatgtacccatcttgcgtcactctccatgaaagtgatatcatcacactctttcttaaaaagctttgctagtctttcacttaaattgtttacatttgttaacggtttctccttggcttcttttgcataatgttcttgtgctttcttagaatctccactgacgtgtggtctgcctatgatggtcaagatgttgcaagaggctctagaaccattcacatcatctgtattgtctaccctatccactcgaggattggcttctccatttttcttgtactaatcaaaatgtccttgtcgaatcagttctttgatctcatcctataagaactagcatttgagtgttgtatgaccaatatccttatgatacctacgaaatttctttgggtctcttttatcgaatataatttcctctaattggatgtggttttctaaagacatctctgtgctctttgataggataaatgtggtcacgagagacggaaagccccatatagttagcaaagtgcaattctccttttggctttggggaagtttccttcctagttggggacttggcaagcttcggacttcgtcaccttctgggactgcgtctagggctgcgtcccctggaacttcttgatcatagactctattatcgtgatcttggtattggagatctttgtttttctttacttttctcgagtttttccagtgagttctcaatcctcttgtggggctctaccatggcaaaaaactcgacttgggtttctagtcgtcacacctccagcatttttcaaaagtttgtcctcggcaacacacttgtaatgagcatgcaaacaagtgaacactcgggggccttctccagattggttactttgatgttaaaatgcttaaagtaatcttgtaacgactcacctacatcctacttaatgtttgctagggttgtatatggcggcttatatgtcatagttgcctaaaaatgggttagaaacaaatctacaaacatctcccacgtcacaatggacgcttcatgtaattggctgaaccaatcatgtgcattgtcctctagagttatagcgagtatacaaaatttatccaataggggtacctgatcaacttccataattgtattaaacttatgaagataattgataggattagtagtacctttatacttgagtgattgagagagtctgaagcctttagggagcttggcttgttgcacttcttcggtgaagggtgatgtcccatttagtttgtatatggctttctctgctactcgatcattctcaatgctcgcaagagattttcttgatcaacccctcctggcaatatgcgattgttggtaagcgctgtttggtttcttgctggtagaacagctaatgctgctatgtttgcgggtaccaccacatctctatgtgcagctggtgcgcttggcgggtttactgcattcatcgtgtcatttttgtttgcaggagggatactttgatcgaccaaaggggaatcatggggttcctcttcatcgttgcaattccttggagattgtgattgagctcataatacttcattgaggcaatctcgtagatcacctctatgagcatgataccttcctcccagccttttaaatactgtccttgacctggtataatcactgggagaacaaatatcagtagaagaagagtgagagtcgccatcgtttacctcagttcgtggttgtgcacgactttgcgggttgcatcgtttaggatattcctcctacgatctttcctccctttgaccaagttgtcgacctgtattaggagcaccagtgactctatcacgtgtatagttacgaagaggttgatttagatcgagcccttcctgtccattttggcctacatgttgttccatgttattatgagtattttcaagatgttcattacgacgtctagtattatcgattacctgagtatcatcacgaggtcagtttgggactcgtggcaaatgccaggatcgaatcctatctctgcctacaattttttgcttgcaaaggccacatttgttcttgcatggccatatactgcgaggttgtgagttgaatgatgccctcagaagcaacggtaggtgtgaatggtggaaaatgccccactctggctgttggtgtcaaagtttctcctacatgttcagctgttttagggaatatatttaggggtaacatgagtatatcctactcctcgtacaatagccttaacaggggtcgttcctccttcaggcattgttcctccaccagggttattcctccactaggcataggaacgctaagagttccaacattgaaagatccagggttgttgttcacgtttgtcagatctgtagccatattgattttcctctaaaaacttttaaaattacttcatttccaaagacggtgctaaatgttgtcagagaaatttagacaacacctaattcatatgagtatacaaaggaaataagaatacccagttaaaaacgtgcgagtacttacctaatgtagcgagtactcaaattattggctactaggtaaacaaaataaaagcaaaaaataaagagaaaataaaagggattaaagtggttcagtcagagcttggtctgcttagtccattgttgtaagaatttcagcttgatttatttgatttggatcacccctttatatagaaagcaaatgtcctttagaattacataatcgaccggtttcagaaccatttttacattatatgacaatattaatcaaagtaaatgtttaaagaataaatgaaggatagtttaatctattcttatattaagtgaagtagtgtatgcgacttggtaagctgggagtttcctattcatattctaacacatgagcttgtaggctttaggtgtgtttgtattcgcaggatggcttttgggcctatcgttcagatgtctgcattcacttctgatcgcataaataaacatgtcatgtgttgataacgtagaatgtgtgagctcctgaagagttatcgaacacatttagttattcaaaccactcttatgtaagaatcaatctttactagtcgtaggagaggtctacttcatcgcatataatcggtatataagcgaccagtatcaaatccttttgcacctgcttattctgtttactatgcaaggcatattatacgactaaaccctatcttggtcgcatcctcttgctagttcatatcaagcgaggctaactccataagagctatctataaacacgtcatcctttccatcgggaattgggtccacgtgttgattttattgggaatattttaccaggatntagatttactaacaagtacgttgattaacatcctaaatatgaactctctaaaacaatgaaataaac

SEQ ID NO: 115250 - DNA, 2501 bp, Cannabis sativa
taaagtctacactcgaaaaggactcaaaaagaccaaagcttctgaaatctatgaggtttgaaaacgacccatgataacacaaaattgaaaatatgctcagtctattactagcctaataaatcacatcttcaagatttatacaaactatttttttttttgtaatcagacattttctgtttccttatacgtacacagtagaaagtctaatacttaataccaaaaaaaaaaagaaaagaaaagttaccagttgggacatttgaagccaaattagatagagcaataatgactaaagcaagcacagttatcccactaacacggttgatttgtgcaaaaggctctatcagatcccatagtgtgcctggtatccctgtcttgttaaaaccctccaccgtaataaacattccacagaagaatattagaagtgaataagatacctgttcaaaaaaagcataattaaatttaaaaatagaaaaagaaaatatatgtatagattgtgctatgagaaatgctattgctaacacaaaaccttttctaagcagtgttgggcatcttggaaatcaagaacaacaagagccaaagcagcagttattgcagtccaagacatatcgagccccaacagcaaagcaactaacattccaacggtaactaaataaacacaagttttccacaatagccttctccattttggtgacaaaattactcttttgcccttgtttccttctacagatttcaacgaagcctcgttgtcggatagtccatccaccgaggccacccgattcgaatgaacagaatggattgactgaactgaatcctcctttttatgatgaaccgaatggattgactgaactgaatcctcctttttatgatgaatagaatgtagcgaatgaaccgaatggattgaatcgtcctttttgtgatgaatcgacgttacttcgatcgccacctccttattttttggcgtcagagcttccgttacggctccattgatttcgttctcgctcgagctcaatcgcgttctcaggctctgctcggcgccggaactggagccgccggcgttcgcggtcagattcggggagctttgtacgttcagattctccaatttcgagctccagtcttgtgaattcaacgacgaaatgtgagacaaagttgccggagagaatcggtgggagttaacagcctcttccgcggcggctccgacgatcggatcttcttcttgtttcttaatcgataacggtttccagtacatgcagaggaggagtacggcgttaacagagacacctaaaagcgtggccggtaaaaccccgacgagaaattggccgaaggtgattttactgagaacagcgatgacgagattttgggggtttccgattggcgtggcggctgagccgatgttggagctggtggctagggcgagaagaaaggggtgtggcgggagattgtgttgtctggcgactttgaggacaaactcggtcaaaacgacacaagcggtgtcgtttgtgaataaagcacttgaaacggcggaaattaggcaaatacgacaaagtaagtcttttgctcctttgcttttccatgaaagtaatttccctaaatacataaacatatctgctctttcaagataaacgcttaccaccattgtaccaaataagagtcccaaaattggaagatcaatagcatggtaagcttcctctggtgttaacaccataaagattaccataagcatagcccctaatagggaccctgcagttctaccaataggtaaacatggcactgaaggaaaaacagccattatccagaaaatcccaaaggctatagaccctaaaactacttttacaggtgaacccaacgccatttttggaactctatttttttttttttttaattgttgggttcttattctaaactcttccagtggtttgtgtatatttatacaagattgatagcttcattaagagagaattagaagtggggtagtgaaagaaaaaacaagttttgttaaagactctgttttaaccttttttttttctttgtttcttttttgggaggtaatgtgtgtctgggttagtgtcacaacctgttcatggaaatctcatggatgtaaaatagcttattaaaaaagtatttaacgagtcaaatgggatttggaagaaagtaaactgtgacatgtgttggtagtaataatccaagtgtttggttttttagggattttgataattttattattcattctaaaaaataaataaaataaataaatccaaatgtgatgaaacaaattttattacttggctagcttttttattatttgaatgtgaaaatgtgtggcatgttaggataattttatataaatattttattttattctatttgtaaaatataataaattatttaataattaattaaaatattttaattatagttagatttatttattaattattttaattgcccaatttaatattttttaaattaattgtttaaatattaagggactttttcatttttac

SEQ ID NO: 115251 - DNA, 2957 bp, Cannabis sativa
ttttttatataagattttagtaaacatatatatatatatatgtatatgtgtaacaatgaaagtaaaaattaaaatataaatataattttttatattgtttttttttaatatattttatattttagattggagataaaaattttaagcttatgtgtgtaatatgtatgtgtatactatacaactgtataattattattttataaaagcttatgccttatatcatatggacattaaatttataaacactttttaaatttagacatttttaagaatatggatctatcatatgtatggactatggtggacaataactagtacggaatgtatggatggactatggagtttggagtatggactttgaatttttagtcacaatttatttcgacacttttagcttttattacatgttcattcatgattttaatgaacaatgaacataaatttgacgaatgatttgtttagttttggattattggatttacgtttatactttggatttcaaatatttttctttttctataaataatttgggtgatataaaaacattaaccgagagttgactgggtcaacccgttgacttggtcaacccagtcaactcaaatccgcagactgacaaacccacaaccttgaaacccgcaaatccaaaaccatttcactagtcgggtacaatattttaacccgaaacctacaaactcaaaacccagtcaacccgctcgatgttcagcgctagtgtactctataattgacatattctctccttgagccatgtgagtgaattctttcctctttgtactacaaactgcttcattgcagtacttagcattaaacagatcctggaactctttccaagaaattctggtaacatcccgagtaagggacaccatatcccaccataccaaggcatgctcttggaattgaaaggtggcacaagtcacctgatcgctaccggtgacacccatgaaatttagtattctgttgatagctgttagacatagcttagctttcataacatccaaacctctcaaaaagactaaaggtgcttgcttacaaaacctttcataaaatggttccatacgattagcaacaataacttgcttcactgatacaacaggagcaggagctacctgaactttgggatcaagcatcgcaggagcactgtaatgcctcacgcatccgttttcttcatcttgatcattaatcttagcttgcatttctgcaaacctctattctaatcttgggcaacctatgatgggttaacactaccccaccatgagctacacctctttggcctctgcctcagtcacaaacattagggggatactgtcttccctaactggcactggatccgactgaattttcttgacttctcatatttctcctggcatccattctattggactagcctgtaaaatcataagttagcttggtcagaccacaatcaaggttaaaatctaactgtcgcttactttgacttttagaacatgcgcctattcagctatcgggctactaacatgcttcccaagaagcttttttatttcatactaatcaaactactgaagcattaaaagcttactaaaccatgagtcgagcttattttatgatgattgtacatatcgtgacgatctttgaaagataacctagcagctctgataccatattataacaccctactagattaaggtgcgttatcgtgatttcaaattactgtgcactcctttgattatcaaatttactaaaaattgtgaataactaaattttttataattaaatctaattttaaatacataagtacaaaacatatttcaagatcccatttacaaagttacatcagttttcaaaatacaatagttacaaaagtttttgcctagcgactatcaaaataaagcctactgtcctaaagatatgaacactccaagtctaaccacctcaatatgtacaatcttcatctagcctaaactcactgatgtttagtctttgctttgcctttacctacacatgcatataatatctgtgagtcgagagactcagtaagaaaagtacaaacataatataacataaattagattatattatacgcccatacacccaatcacaatcctatcccacgtccaatgcgtactaggtctagaacattcgtatgacagtatgcttgaccataatatcagcctatactcaatactttaatcttactgatgtgatagtgcattaatccatactttgctaaatatatatatttgtgggtatttagtgcaactctacgtacactaatatcgctcttactgatatgttatctattaggcaattataaaacacatgcactaaacaagcaaacatatataaaactattatactaatcttacgtcaattctgaattcaggtgtgccggtcaacctgagtattacaaaattttattattaataaaaatttaccaggataatattacatctttaacatacccaaaaaaaaatattcaaatcaaatacaatctaaaaactattaatacatctaaaataaaataaaaaatacacatattaataaaaatatacatttcacaaaagaaattttgtgtacaccttcttcaagctgctaaatatctagctatccttttgcccaatctgaaaataacaaaaataaaagattttcaattacagaaaaaaaataaaaatatagaaaatatataaataaataaatttaaatataactatatacacaaaaattaatatatatatatatataaacagaacaaaaatatatatacattatatatatgtatataaacagaacaaaaatgtatatacattatatatataaataaatttgtaaaccctaaaagtaatatatatctctaaaatctttaataactttaaaatagatctgaatttttaaaaaaaaaaacaatgaacaataaaatataggggttttttcatttttacacttcaaattagtttttttttttt

SEQ ID NO: 115252 - DNA, 1221 bp, Cannabis sativa
catcacagaacctagatccacatgttctaaccctagatctaatcatatcacaccctaaacctataaataaacaacatttaaaccctaatcaataacataaaaaataaaaaatgaaagggggaatttaccttgctcgcgtattctgggttcgggcagtggggtcttgggttcggttggggtggcgggtttcctccgtggggtggcgagttccctccgtgcggtggtggattcatcgttcgagtgggtggtacgatttggtggtgcgatttggtttgggggggcttcggtggtgcgagtgggttgagagaacaggggacgaagagagagagagtgacttttgaaatgaggggggtaaaattgggttttatgaaaatatatcccactttgtatagtatgagattaggggtctaattttaagtattattaagtatatatattcaaatttccctaattaaacctaattaaaaaaaataattatatatgcaatgcacgtaacattaacctaatatatataattaaatttattagtagaagagtatcattataaaatttaggctaaatataatattaattttttttaactaaatgtagtttaaattataaagcatcaattataggtagtctaaaatgttattttaggatttcatttggaaatatcaatataaacacttctataaaaaagaaatagaggaaaaattcccttataacttacacaatgtttgtaaggatttttaggtggaagaagaaggatggaatgaaagagtttgaaggagagaataaatcatgtgtttggtaagatgaaagaaggaaaaaagggaagatggaaggatacatggcagttttgaataagtaaacaaatttgttaaaattgggactaacaaacttataaaaaatgtgactttgaagactatggccgctatttttcgagattaaaagtaattgcaacaaaataaactttttaaaaagatttacagtaaatattctaaataaaatctacacaaaagatgtcaaattagtaaaagtgaattagtctaattcatgatgaatgaagaatacatattgcaaagttaattaagtatttcaatgtggtttattaaagacaaatagacaatggattatattatcacattactttcaatagtatagactaggggtgttcatcaaactgctcaaatcgcctgcaccgcaccacatcgcaaaaaaaaaatacggtttgaaatt

SEQ ID NO: 115253 - DNA, 2249 bp, Cannabis sativa
caaaacggaagtggagttcaggtagtttagccgccaaaatttgagttttggtggttaactgtcacaaacccaaaagtttggggggtttagccgccaatatcccttataattataataattgccatttaattaattaattacttatatggttataataataataataataataataataataataatggttgtcttaactgtgtagttctatctgtcagggacggatgtacacattgggttatagtggctctggccttctttattttttacaaaatcatacatactaatattgatatataatgaaaagttacaatataatattatgtactctacatagttaaaaataataaaaaattcagttgaaaaatcaaagcaaaatttataggtaaaaatataattgatcatttgattgtgcatttcaaaagggtaaaaaagtaatatattaatataaataataaataataaaacataaattttattttttaacaaataaaatatattaatatattagttaaaatcattgtgtatataaatattttttttaaaagtcaatactatgtaatttttaaaataaaaaaagtaaattccatatacatataagtgtggtcctttattaatataattaatcaataaatatttataaaacttttgaattaaaatttagagaataacactaagactactaatgaatatagtcactattatcttgaaatggagatgttggtcactaaaattcataaacataaaaccttatttttccaagcgttgctcattattggccccacttaacatataatcctaactccgcccctactctcggctctaaattttttgtctcggtatcatgcctccaatgttttagagcattctattactattggggtgacttcgggtatcacacaagaacaattgaatagttgttgtaaaccgtcagaatcctacctaatgttaaacgttgatatgggtgttcaacatggtgcgtcaaagataggtgtgcgtgttgtggttcacgatcatatgggaaatgctcgggtgtccactacgattcctctcattgttaccttggagttggatgcagaagcttatagggatgaatatggggatttaatttggcatgaaaccagccaaatcgcccgttactaacttgagaaacatgaaaaattgtcaacccgtttagagcgggtaggtcaggttggacttggcatagtgaacgggtgggtacgggcgagatttttatatgtgcccaagtttgagaaatgctaaaaggcaccacttgtgtctaacaccctctacggtatcataccactattggtgtaattaattattaggtcttatataacttaagaaaatagcttttagggaatatcgcccaatcgtagggtgccacatatagaagctgctaggcaccactggtgcccaaataacaatgctcgattaaagctcaagttagacccagacccgcctgttgacccgttagttcagttattttttttgttttactaaaaacttaaactaaacctaaagtcaaaacctaaaaaaatcataccctcccctcaatgaaccctcgtctcctctcctcaacgaatgtgcactagagaccgattagacgaccccattcgtcggctaccactcctttcccttgcgattcatcacgcaagcactcactccccttacccttatctcttccctataatttcagctcgtgaccaagcctagcctctagttacaacacaattgcacgttagttgtcaccaccacactagcctcctccacacctcttccttccctcacgactcactcatcacaatcacagagccaacgcttgactagtgttggggataagaaggagtcccaaacatcaagtagtggaagtgagacggagattttagagagctttgatgtgcctccagttcctagctttgagtaaaagtgacttggggttatcgattaagaaggtatgctcgtgaaagagtggtttttccaaagtttgcacaggctcgttttataaaatgggctgggcctggcttgacccatattttaaaagtaagcctagtcccgcccataagcatagattattcgtgttgggttagatccgtgtcgggcttaaacgggccgacccatatttatcaaatgggccaaaacggacttatgaaaaattgtcaattttttgtgtacttttcaaattagtttctatattttaaagcacaaatagattgtttcagttataaaattagcttcaaaatcacaaa

SEQ ID NO: 115254 - DNA, 3136 bp, Cannabis sativa
gcaattgagagtagtaggttctttgtatcatcattagatgatttcaaagaagatttccaaccgctaaagagattgcttaggtttctcatttcattttttgttttaggatattcccaagcaagctcaaaaccatcaaagccatagtctttagcgaaagctaaggtcgactcaacaaacttgttacgtttgtcagcgctccttgccatcatagagatagcggaggaagggtcatcggtctttgttttcgggcctccaatggacactagagctttcttatttttgtcatgagcacaattgacaaaagacctcatatcttcctcaagttcaggagggataatcagctctcccgtcccctcttgaacttgaagaaatgcgtaatagaggtgagtaaataagggtacaatagagtcattttcgggtgaaaatggtttttctgttgatgcaatccagtaaccgatttggaacttcgcaggtgccattatatagtagaactatcacacaagaaaaaacaatatagttaatgctttaaaaaaaaaaaaatcaaatatcgcataacaaatataaggtcaaagaagttgtagccctaaaaaataatattacatatttaacatatttctttttatttagatcattaaagttatatgtatattaatatatcatgtctaaacatatatcaaatatttagctagctaggcttacctataaaatgatatataagcctttttttttttcttttctagtggtttgtttgttcacttgaatatcctatgctatttatagagtttttcttatcactcgtcatgtgcatggattaattatcttcacctaacattataatgtcagcatccatctacgtacaatataggtgatcatcaattaaaatttatttacatatatacgaataaatataaattaatttgtggaataagatcatacgtacatgtcaagaaattatctcttaattaatttatatatatttaaataatttataaggattgtaatcttttgaaactacacataaggaatataataatgtttccccattgtcataactaattacagttaaataaaatccctactacaattctaccctttagtgacactctttagtgactcgcacttttgtgcgggtcactaaaggattaagggtaagtattagtgacacacacaaaaagactttaaaaatttagtgttagtaacgtataatgtgtgtcactaaaaatatgaggtgtcactaaagattaactctcatagtttttattatttttttaaaaaaaattattgacctatagtgacgcgccaatcgggattaggtaaatatatcccgacacactttgcatgtcactatatcataaccataattttttttaaaaaaaaaaactgctgtaattaatgtattttttatttataaatatattatattttctaaaaattaatataacaaatcattattaatatactttacctttttcttaggaaaagtaaacagtagactattttaaaaaaaattcacatgtcagatttatattttattacatatacggctctctctctcttaaatcaataacattaaaaaacctttttctctctctctttatcatacagagtctctccattctctttctcattaaaattgttaaagggtttaataaaaaaaccctagctgattacattttcccctctcgccacctcatcttcttgccctctctttgatcatgtttttcatcactcggcagctgttgctactcaggcagccgaagactaaggcctggctccaaaatcctaaggtgcagctcgcttctctctatctcgatgtctctccgctcatcgtcaccacctcgttcatgaccacaccacctccgatgatgcagatctgagatcctcaaccaaagtcccaaggtcgagatctgagataatctatctctattcgcgtctctctctcacttttctgttcaggttgatggcgtttgacggagcttcttatacgacgggattttgggttgacggagcttctagcttcgtgttcgaggttggggcttgatgttcatggcattggatctgaactagtttttttaggtttattttgattttaaaatataaattgtgtatgactaatctcaatttttgtctgtttgatataaactaatttaggttttttttttagataaactaattttggttttttttacataaactgattcgggttagtatgtgattattttgtaacttttagagattaatatgttattagtttaaaattatgtgtatatagctttaaggtaaattgtataatttataaatttaattaattaaaattattattattatatttaattgtattaatatataattaatttaaattactatttataatttttattatatacaaaatttgtaaaaagaattgtatatatatatttttttaaaaaaaataaattaaaacctgaactaaaaaaaattgtatatatataattttttttttaaaaaaaaaaactaatatagtgtcacttttgtgtgtcactatatgtgcaaaataatgaaaaaaaagaaaaaaatgatatagtgacgttttttgtgagttgctattaaattttcagtcagacaaaatctgactctaaatgcttacagtgacacgcaatgagtgactggaaaatactttagtgacacgcgctgaagtgtcactaaaaactggatttccaatcagtcccattagtgacgcgcagtgaagtgtcactaaataattttagagtcacttaatgtgtgtcactaaaacctatttttctagtagtgaataggtatatcgacctattttatttcttattgttatgtttgtttggaaaagtataataagttttagactaattgtttcttcctagcttctcttttggttttgtcttatatattgtgcaagttcatatcagccttattgggcttaacttttgtgccttcttataactcttatgtggtgaatgatcaccctcaaaacatgattgatatactagtaataatgtgttgggtgtacatccaaagttccacattagttagaaatgggaagaatcttgagtatataaggatgaacactatctccattggaataagaccttttgtgaaggtgcccaaaaacaaatccgtgagg

SEQ ID NO: 115255 - DNA, 2332 bp, Cannabis sativa
ccccccccccccccccttttataggtgtttgaggtggtagttattcattctaatcttatctttgtaaccgttcatgaaacgtggacaatttctacgtttcatatttacaacacatatggataaaagaaataactgttataactgtctttgtctttatacaaaacggttgtgctgactaagtttagttgtgacgtggtattacatctttctctatacatcgcagtacatagtaatcgttttttgtccttatcgtgaaggcaatttatttgtcgagatatcatatacaaaatgcgcctcgcactcttcagtaattttggaaatgactaggcatgttttgcaagatgttaattaaagtatctttctcgcttttactgtttgagataagtatttagatagtacttaggattgaatcctttgtgcttcttagagtcaatcctcacgcgtcattcatgaatattcctagatgaattgccttctactcatatcccttagtcttttaacatactcacgagtatgtgggtcaatgagttgtaagttcttaaagaacttgttatctaccatttccagcgacttgtcctttcatattctatacttgtcttgtttatcttttactttgtgcttctcgaggtggacttttttttttttctgatagttttatatcttgctggtcttattaaatagtagttgatatttatgacttgtccttaattgattgaggaaagacttaaatgcatctacaattcgtattctccaaggcgaattatttcagtgtctgagccgattcatttttctaccattttacatgtgtcatgaccatatttattgctcgaaagataagtataataaccatatatatttatatataaataccttaagaaaacaacaaatatttaatttttagtatcaattaatttttgagttgcgacataaatatttaattttaactcttagttttagataaatacttaaatttaaatttttatagtaataatgcctaagttatattttcgaaacttctgtaggtacttggtcgttaagtgtcaagtcaatagccacgtagaagtccctgaatgatccaagtcattaaattttttattttttatttaaaaattaatttatatataataataagaaaatgacgcgtagataatgacttcacacttaacggtcagatacctacggaagctccaaaaatataacttagatattattaccgtaaattttaaacttaagtatttatctataatcgagagttaaacttaggtatttacactgcagttaattactcttaactttttaatcttttacttattgttgacaattttgtgtatatactattgttaactcagaaatttattaacattaattgaggctagataattaatactttgaatatataaacttaaatgaatgcggtgaatttaaatactaaaacaataaagaaaagatagaggatttttaacatgattttgtagttgattcgacatactccatgagctaatggtattcctagaattgttatgaaatttgttggttccttttacatttctgttccgactatttatagggatcaaataataattatttaatcttatctattgcaacgaattaacaagttccattaacaagctccaatgccaatccaatattgttttgtctagcgctaaagcccttaacgtaataaaggctccctaatactcatatacgagttagatagaaggcaaccttattactaagaatttttttataatgaaaagaattaagtcgacaaaacgtaaaatatcgctctaaactgttcaatggagatagcattgctttatttaagaattacaataataaaacatcaattcattgagccttcacaattcttttactgattttaaaaaaaatgccacaattttattaaaaaaatatttaaaaatattttttttcttatagtccattaaattttagagtggaccgtgggagtacgtttaaacaccaccccaacttattaaaacgagaaattctatcaactgagattttaataactccagtaaatttttccttcaaaaatttgaatgaatggggtaaataatatatataggaatagtatacctctaatgtaatgtccccgcttcaagcctccattgtgagagtacgtcactctggttctttcatggactgatgactgaccctacagaccaacacgagtgtttccagtgtgctttgtcctcactcgcaccttcatggggaaaacttcccaagaggtcacccatcttgaaattaccccaggtcaagcacacttagctgtggagttctttcgtgatgggctaccgaaaaataagatgca

SEQ ID NO: 115256 - DNA, 7586 bp, Cannabis sativa
ctagtgccatgtggattggggtgaatcccccttgtgctcatcaagctatcttgcttgatttgcctaatcctgtttagtgttgtttaatgtaatccctttccaaaaaaaaaaaaaaaattaaccacgacttaattagctaaaatattttcaatttttcaatattaatttaaaatttacaacttcataattattggttgaaaaccaaaactatccacatagataaaaacaaatcatattatactagttcattaaaaacaaacaaataaataaataaacaaatagtagatgagtaaagtacaaaataaaagttgtttaaaaaagtgaaaacatccaatagtagaaaaaatggagagtgagtgtcgacactattagtgtcatcaccatattcaccaattgaaaaagtagtgagtaaagcttcaaccttcattgaataaacctctgttttcctcaaactatgtcgacattctcttctcacaatcactcttctcatttcaaaatccaacctttcttccactctactaattgggctccatgaaaatcaacctcaaacccctttttctttttcttttataatcccaatttcatacctttgatcaaatccttcctctaaatatatcgaatcccaataaccccaattcccattttgatatgttattcctcgaggttccaacattttcaattttctacctttaaaattccaatctttacttttcacaaaaataaatattcaatctttaacgttgttgttgttcttcttcttaatctcaggagctttggcagtttctttccctcggtggattcgtcgacaaaactcgtctctccgcaggtaaaatcttcaaccagaaactctcaatttcgtatcgaaattcgatgattccgagaattgggggttttttttttaggtttttttttgcagaccgtatcggaatcaatggcgaattcgacttgccaaagcggcgaatcagatatctgtagagacgaatcagccgctttaggactcaaactcatagccatagcttcgattctcattgccggtgtgggaggaatcgccattcccttaatcggaaaacaccgcagattgctcagaaccgacggaagcctcttcgtggcggcgaaagcattcgccgccggcgtgattctctcgactgggttcgttcacatgttatcgggcgggtcggaggctttatcgaatccttgcttgcccaaattcccttggtcgaaattcccattctgtggattcttcgccatggttgctgctttgctaacccttctcgtcgatttcgtcggaactcagtattacgagcggaaacaggggaagaaaaccaggccaaacggagaagaacagagtcgggtcgggtcgggcgaggatgaggcgggtattgttcgggtcgggtcgaaggagtggaatgggaaagtgtttggggaagaagaaggtggtggtatgcatattgtgggtatgcatgcgcacgcggctcaccatagacatagtcatggtcaggagcagggggcatgtgatgggcacgtgactgaggtcgggcacgggcacgggcatggacacgggcatgggcatgggtttggtgatggggatgaggaaggtggtgttagacacgtcgtcgtttcacaggtaaagaaaaagacctttttccttttttttatgtcgttttctatattattaacttaaattatttgcttaaaaatgcattattttgattttgaggtctaaagaaaagaaaatgaatgaatatgacaagtgggtttggagtggggtgtggaaagttgttatctttttgtgatgagattggatagttttggagtttattgagggtaagagctatttggaatttcgtgtggtgttcttaaaagttaaaacacttgttttgctaagcatttggtgatttggtgtagttgtaggaatgcctttggtcgggtttcgaaaccccactaagtttgatttggtgtagttgtagggatgcttttacttatcgcccccactttgttgggtcgagatttgaaacccccaagctcgatttagtgtagtggtagggatgtcttttcttgtcaaactcactcaattgggtcgggttttgaaaccccgaagcccctgcctccggtttgggggtctatatgggtctatagagcgggctattagtatccgagattgcttaaaaaactgaaaattaaggtatggggatagaataagcactctccttttcatggccatcgttaactatggccccgccccccaactgggtaagatgcattagtggttttcgatgtgattttgagagtgacgtgagtttaaaatctaaaaaatgaacaaaacaagtggccatgggagaggtggggctttcaaagtttttatctttttgtgatagaaagtggattgtgctgttccatagtcaataagcttgaaacctttttcagctttaggctaaaatctcctgtggtgtgtggtgtccttaaaaacctcaattttggtagttgatataggtaatatgttgtgtttgttaatctaaagatttttctttttctaaccagacttgtataaagattcaaactttggtactcatttgccaaacccaattagttacttgtatggaatttgtgtttgccttaacattgaaaagtggacactcttgttgtcaaaacaaattatgttggtgaacccaaaaagcttgacttacgtttcattgttgactttattgttgtcatatatgacatttattgtttctgtcatacttatcttaaatgttagctgaagtcataaatgttagctgtgtaatttcaggccttggtatttgttttgattcatgaaacatgaaatgcttgtgttgtgttttgttttgttagtacttaggtaaatgcttctagaatctgtaaaattaccactgcagtaattagaaaatggtctatttttacaggttttggaacttgggatagtatcacattcagttataataggtctatcacttggagtttcacaaagtccttgtacaataagacccttgatcgccgcgttatcgttccatcaattcttcgagggattcgcgctcgggggctgcatctctcaagcacaatttaagaccctttcaaccacaatcatggcttgtttctttgccattacaactccaatggggatcgggataggtatcgccattgcctcgttctacaacccacacagtacgggagcgttggtcaccgaagggatattggattctttgtcagccgggattcttgtgtacatggctttggtggacctcattgcagctgatttcttaagcaagagaatgagctgtaattttaggctacaagtagtctcatattttatgctttttcttggtgctggtttaatgtctttacttgcaatttgggcttaatttttagtttagtttgactttttttttaattagtatttttcatttttcaattatatattgggaaattctttgtacttggttgcttgactctttcaaaagaatagagctcactcacaccaccacaaaaattaccatgtttgatttgtaaattattattgttatttttagagggaaaaaattatgtaagagtttattactaattacattagtgttggaattgttttgcttggaacttgttagaaagaactataattacccaatttgccaaattgaatagttgttggtttattttatttttattgttttttatttttgtagcaaattttttgtatgactttgatgctatgcacatgggagcttaaaattactactaaaacgacaattataatggctgcaaaacgacatcatcccaaataatagtaataatagaattgtgttgcttattgtaatttgtcaataattacattagtttagaaatagtaaattaagaaagtggcagagaaaaagcataataaattaaattatgattacccatttgctaaattgatgctctgcatatgggagttcacattcccaaaacgacaactaaaaaacagcatcaaagaaaataataagaaaccgacaacgcaaacaaaaagctatgatgagttaataatgcctgaaaacgacatgtcgtatagttttatgaagttggtatctttgttttagctttacatttctaatgatttaaataatagaattatgatccacctagtggcggagctaaaatataaagtgaagggggcgttatttttttagtaagtgagggaaacagaaataaacttaaaaaaaaatgtttttggtgggattaaaactcttgtcttttaacctatatactaagtagcttaactattacattaaagtttatattatgcttataaatatcatattttattacaaatatatattgttactaactaaaatgcatatatatttttttcccgattttttttttcagtgggagcgactgccccatctcgcttatatgtgaatccaccccttatccacctattcaaaaatcatagaattataataattggtgttgttgacgtagttttctatcaattgatttaagaagatgatagaactctaacgattagactcggactatatgatttttggaaataaaccggtttaataaaaaaaatagaatcagacatggaattattattgtggttcattcctttgatgtggttgtaatgggctagtccatttgttattttattaatcaatactcaagaacactaaagttatgttgtcacgaacatatttaagtggttacaacgggtgagatctttagtagaaatctctttagtgtgtctctgtaagtgattttagaagacttgttgacaaaattctattttggtgagtagggctatgacttctagggaacagttcgtagagactattagaaactgattaagaaatagattaagcttaaaaagaaataaattaaagacatgcaacaagaatttttaggtaattagggcgttaatgagtcttagtctgcaattaatattattaagctggaaaagctataaaatattcttacacaagagtgctcttgccaaagtttaagaaccctaatctttagcccttaaattgtgaaatgattttccaacccttataactaggcccattgatgggataaaatacaatttatattgagtttggaccggttagataagacctaatttatgatattacggtcatccgtacgtgttcttgcgcgcactcctcaagtatgacgcaagggacaaatctctgacttggtgggaccctgtgtctggaggatgccaagtaggatgcttttcggatgtctcttcagttgcccatttcaaattagtcccatgaaggtatctggatgcattttaatggacctttcattttatggagaaatggtccttccaagactaatagcgtcgactttatcctgtctatgagttggactttcgtgtagatctacagtggtaatttgactctattgtgggtcgatctattaacttcattgggctcatattagttaattttaggcctttaaaatacatgtgtcactaatccaaaatcatggataacattaagttattctctgaatggttattctctgaatgccacagtgagagttccaagaatcgatgatcagagagcagataggtggatcttaagagagttgtcaggggtttttagaatttggtcccttccctaggtgattaatggttaaaaatacatatttagtggttttaaagtttaaaataaattaaatttaaatttattttaatgaaattaatgaaatattttttatgttgaaaatatttaatttaaatttcatttattattaattttgtaagaattaaaaattattgtggtattttattaaaagagaagaaaaagaaaatgagaaagttgtaaaattgaaaaaaggaaaagaataagccaaaatataattaaaaaaaataaaagaatgcgaaaaatataggttcaataactcaaggcccaagttcattttcattaggcagttgtaggtgcattcttgcttgttcgactgtctaacgtagctctgagttgtcgctgatctctctccacacgccaaatagacggtagctcgcattctattacacacgtgattattttattttatacgtgagcgaaatagattgttcgaatcttattttcagcgtgtattttttttttttttaatttctcaaaattttacaatttattttaaataactacaatataaacaatgataaaaaaaaaattaattttatttttcaaaattcaaaaaccaataaaaatacattactacattatagaaattttcaacaatcttttatcttgaaaaaattaaaagaaaaaaaacatatcaagaacgttaggcttaaaatatgaatgttaagcacttgtcccaagtgtactcgtgcaaggccaaaaacaaaagcgggggtagtttcggtatttaatgcaacaaaaacaaaaaaacatgtttctcgaggtaaccttcgtccgtttcatccttgttaaaccaccaaaacgtctaacccatactctaatccgtccgatcattcaagagtcaaaccacaataatcatccaacggctcaaaatcatcccaacgatgaatctgacaacacacgataataaagcctctctcgttttcttttcctcttccccaatctgacaaaaaaataaaaaaactgagcgaccacagtacttttgtctgtactcaccatcacccgattccacactaaccccaacattaattcgccacgtcatacttatccacgtgacatcctacgtggcataaactgtattactacgtggcacaaactttttcctataaagcgttttgttcactctttcctctcttcgctccgtatcttcattttctttctctctctcttactaattctctccttattgggccatggaagagcccggcccaaagcccatacccgatccagaagccttcggtgacattaccggaaagttcatcggccttatgacggaggaggtggaggaagacgacggtaccgccgccgaaatctcgccggagattcccatcagagaagagcttatagaagaggtcatgcaagagctttacagagaaattagtagtaatgggcctgggcttgggcctgggtttgggccggcgaggcccaagtcgtttgacatcaataacgagagttgtggagcgtcgttttcggagtcggcgtcgacggttatggctgggcttgagtacgtggcggcggccggagaagtcgccggccggaatgttgggtcgccggcggcaatgtggagagagtgtggttgtgattggtcgtggggtgatgaaggttttgatgatgaagtcgtgatgattaagaataataatagtacgaagaaaaatggagtagtggaaatggacggttgtgatcgtgggagtgatgatgatgaatggttggcaagagttcttagttggggcccacttgagattgggccttggttttgatctattacttgtagatgataattattatggatatggtaattaattaaagtatgtttaattaagttaatttggtttaattataaaaaaaaaaaaaaaaaaaagaaaggttttagattttctttaattaccgtatttctaaccctatttgatttaatcaaatagggttcatatattgaattatttt

SEQ ID NO: 115257 - DNA, 2004 bp, Cannabis sativa
aaaatttaatttaaaaagttttttttttttttggctacactaaaaaaaatggtgcggattccactcctacattcttaacctgggataagttgaaaaatatttcttttttgtattcattaatcaaaaatacccttatattatatatatattttaaatatacttatttttttgagtgggttgctcaatataccttcacgctttacttaagtctagcatatagtttgcattaacttaaggagtttaatgaggatattatctataaaagtgtatatatcttaaagaatatgaaaatagagttaaaaattaaaacaagtaaaataaagtgggtataccatataatttcctctttcaacctttgcatgtggcccaaatctaaagtccgttaagtctagcccaaactgataaagggtataattgttttcggtatgtaaaaaattataaataattttgtattcttattgtggattatattataattatttttattaattaattttagaaaattctaaataatttattattcaaaataatcaactatccactttacattgtataaaacatatcaaaaataaaaatatttaaaaaaaagtagagcctaccatagaattattaagcgttattatgaaagtttgtagggatgtaagttttataccatcaattcatcgacatcaacctcgagaaatatgacattgggaaatttcttagccaattctctatagaatggattaatgcgacgacatggtccacaccatgaagctgtgaaattaataatcatctgtgaaccaaacacaaatatcttagtaatttaatcttattgccatgtatacatatacataatttttaatgatatatgttacctaattataagagataatataaagcaattgataaagaaaaaaaaaatactaatacttgtccaattctcttatagcatttttcaagaaaaactaagactctttgtttcactccaacattcaagaaaacatgattaattatatttattataattgtatttgcaagaattaatgtacttatagagtagataaatatgtaaattaaaaaaaattataaaataacaattagtgaaaaaaagaaaaaagagatgcaaaatgaagaacttacaagacttttggattcgttagctttttgaaactgtttgttccatatctcaatagtgtcacaattaatgacatgtaaataatctttcttcgtttttttcttatctttgttagaaacacgaacacacaatttgagataatataaaaattttaaaattaatttgtttttattaattagcatttcaatataaagtgtctacttatatattatattacaaaagtttgagagaatttcaataaatccttctggaggaacaaatatatgagctctaataattattacaagaaaaaatagattattgataaataaacttctttcaaactaaaaaacaagatttacattggctcaaaaaaaaaaagttaaagataatgcaaatccagtgacttatattactccaaaggtttaacaaaaataatgttaattataagttagtggttctcaattattcaccttaacaaactccacttttcttactgaccatagcttatcatttgagagtccaagctggattacattttattagctccataaaaaaaaaatggattaaatacctattttgagtatcaagtataaccaaatcaagcttacattattattataatgattttctaaaggataaataatgtttttccctcccaaactattatctttttaaaagtttatccttagatttacttatttattttggcaaaaattcctacaaaattattgtaataattacaaaagtatttttattgtgtatgtttactttcaagtaacactgatgacccaatttcagaatccacataaaaatatatatacaaataaataataatagggaaacttacaaaaatactagaatttcggttaatttttacaaaaatactgtcacacggaaattttttc

SEQ ID NO: 115258 - DNA, 2205 bp, Cannabis sativa
tcctgagctcactaggtcaggcagaggatccatgaaaagcctcgtctgacaaaagatgcttgatgggccgaaaattttgttctagagtgctgactttgctaactttgtcagcaaaaactttcgtaataataggttcctcgttatccatagaagctggacatttgtaaaaaattattaaaaagaaagatgaaaagctgcagaattaaagtatgaatggtaatgtgacataaacgtatgtacaagaatatccaaagaaaaaaaagaaggggaaagaatactaggagctccccagctgcgattgataaaaggggcagtaggatcatcagaaaaaaaaaaactcaacaggcccttttacaaaaaagaatcaattcttccaccccttatgagaagtctctaggtctgtgatagcagcacggttccacctggggcgtagatggaaatgcccttgctcactctccattaaggaataaaattgaataatacctgatacctcccacttaactccagccttatctcccaaaactattaaaattaaaaggatagcccacacattaggaagtaattaagcaagagcaagggagtaatgcacaaggaattccttaatcaactaaggaatgggaaccttaatttaatttttgactcaaaccaataagagtgtatgcacaaccactcaaactggggactgtcggccctctcatgtgtcttaggaagcctagcctccactcccgatgggaaaccacaagaggacactaagtaatcaagctccgatcgagttaaaactgacgagttactcaacttatgatccaagtaagagtgtcccaaggtatgttgtttatgctttgctttcttctgaggaggcgcagcaagagtcaccccctctaaagacgcagctccaccgttctcgcccgcgccatccccagagcgagaacgggggataatcgagacgctacccaaacactcaacttctgggtccgtaggaatgttagcattatcatcctccatagaaggggtaccaaaaactaacaatgactcaatgaactcgagagcaatacttgaagaaagagaattggaaagtgaggaagaagcgcctggacgatccacatttgccattataacactcataaaagggaaaaatactttggcctcagaattaaaccaaacgtctaaaggaaaacctaatcaagcattcaaattttcctttccccaaaaaatactaaggggcagatagggttataatcttagatcaattacattaagaaaacacgcaaatcaaagataaaggggaagcaaaggccagaggcaaacaatatgtgcagaacaggaaaagtaaaactcttttcttttcaaaaaaagaatggagaaaagaagaaaagaaaaaaagaaaaaaaaaagaagggaaaatagagaagcttaaaaaaagagagggagagaataagagaaaaatttagacaaaaaaaaaataaaggtaaaatttaaaattaggaaacaatgaattaatatatatacctagaaaagatgtgattcagtatagagaagttgaagcgaacatcaaagagggagcacacattagattttcaaaattagagatcttatactcaggagtgcaccgtcaaaaattagatgaggttaagggattagtggtacatttataacgtggcacgattctcgatgtagcacgatcaaatcacataaacgaccatttctcacgaaaattataaatttgaaattaaaaaaacacaagtaactgacacaataacttacaagtaatgataaaaaaataaaaatagccaaaaataataaataaaaaataatacaactcaacccagcggtttaaagcagtttcgaattatgcatgagcataatggaattggggggagtagtgtttgggggagaaaatgggaatgggcatgaaggcccatttagatatgagaaaaggcgcaaaggcccaattagacatactcccaacaataaggcccaatagattggaggaaaacaaggcgacccacaaatagataaaataataaaaagcccacaaagccacaagaagacaaaataaagcataacgacaaagcatgaaagactcaagaaaggacaaaatatgggttcgttgctcagagtaataactaatgacggaatcgaacccaacaaaaagaaattagtgacgacggtgcattcagtagcacgccaaaaagtcgaggtccgaga

SEQ ID NO: 115259 - DNA, 2633 bp, Cannabis sativa
  modified_base (2226)..(2242): a, c, t, g, unknown or other
  modified_base (2467)..(2469): a, c, t, g, unknown or other
  modified_base (2527)..(2545): a, c, t, g, unknown or other
cccctgccactcaaactaaaggaggtagtaggagatactacttaaaaatcagagactatgagatccaacgggtatggaccaatgaatcacttcatacttgaaaatacttttgagacaaaaggggttaattgtgccattactttgcccttgacattgatggccaaaaatatgagtactttccctgagtacatggagaggagttgaacttgagcaaccaattcaattctcttcagaattatgatctaactgaagtctactttgaatgaagttgccactacaatgctctgaacaaacactcccatagcgggttatcacgagaccatccagagttcattttcgagacttcaccagtgttgtgttgccttcatgaccccatggtcagaagaaaacaacaagacccaagttgaccagagtacaagatcaacttggaagacaaggagacctgcatgatctcttaaccaagaaaaggacaatggaaatggaaaattctagagaaaaccctacttgggtagtagaagctctgacttggacgcagaccaccacccatgggatcaaccgagcagaatttgacatcttggcagctttatcgaaagggatcatgactcctaagctatttgaattcaaagttgacatagagcagcgcgcattgctctctgaacgaattaaagctcttcaaatccctctaaagttcaagaaaccttcttggcatcaatacactttcaaggaagatccatctcaaattcactacttttaagtgtagactaatttgcaaggtgtgagtgatgaagttcggtgcagaatcttccctaccacactgcaagcttgggttagcagtggtaccttaagctctccccttgattaattgactcatggaaagatctagtgaatgattggcagcaaattcgctccttctcaacaatgccagatcaaacccaataatttggtggatgtcaagtaataggaagacgagcccctcaaggactaggcagccactaagaccaaaagtcttagcgaggatgcaagggtaatggcaattgtagctagactcaaggagatgagtcctctatggtctgacctttgtcttaaggtggtatacaccatgaattacttcttagatagagtgaatggttttatcaaactagaaaaagggatcacccgaggtaagggctcgaatggtggaaagaagaagtcaccaaactctgaagcctctgctactgaggcataaggcaatgggaaaaaggaggatcaaacagagggaagaaacccaataatggtggtaagccaggtaactccccctataaagagaagcctaagaccggggctaggcccttacaagagtacgagccttgcttcaccacttactccgtcctcttggccccaagagaagagatctatacggaaacacagtgaacaatgtcatattagaaaccttttcccttcaaagagtcaaggaagaagggcatgaaaaaattctgccattaccgcgataattgcggtcatgacactaaagaatgcaatcaattacgggatgaaatagaatttctcatcaaaacaaaaacgtgctactctttagcggtatgtacgacctgaagctccagctggggcaatgcacctctccagcctacgccaattgcaggcaggccatatatcgtgattggaaggcctcacctagctagaaatttgaggaaagccttagaaagatgtccaagatcactttgacatgagccaagagttgaagtcttggaggttgcagaacatccttcaaagtcttaatgcaacggatatgaaccaataaccttcagagaatcgacctcctatcatgttagctaccctcacaatgatcctttagttgtcagggtacaaatagctaatatgatggtagctagggtgattatcgatgacagagcatccttgaacatcctattcaagaaagccctaaatagaatgggtttggattttaggaaagaaacaacacttccgcagtgctagaagcaaggtccagggcctaggttgatactttgggctggctgagtgcccaagttgacattgtcaacctgggccaattcaaggattttttttttgagaactctttcggaatattctcgatttttaaaaatattaagattcaactatttttggggaccaaacggaatttctaaagggtcaaaacgaggacccagttgttggattatgtttttaccagtatctagatttactaccatgtannnnnnnnnnnnnnnnnaatatgaatttctaaaacaatagaatttaaacacatataaagtttaagaaacctcacattggttgcagcggaattaaatgactccttcggctcagatctctaacccttgtaccctttctgtagtagagtatcaccaagatctgagcccgattctccttcacttgaattggattcttcacagtcttacatactatgattgagtaccaacttgttatgtgtgggcannnactctatcactatagggtttgaaaattgaagagaaagagagacagagagagagagagnnnnnnnnnnnnnnnnnnngagagagagagagagagaaaaggattcaaatgagagagacatagaaggctcaaaatttgactgaaaggctgttggatattattttacc

SEQ ID NO: 115260 - DNA, 3845 bp, Cannabis sativa
gtaaaataaattccaacagaaaaaccttcaaaacaaatgagaaataggtagggagagagaggatctccctgcctaattcctctatgaggagttatgttgccaagaacagcaccatttaaaagaaaggaataggaaactgtctgcacacacttagaaatcagctgaacaattgtatcaccaaagcccattttaagcattacttgctgaacaaaatgccactccaccttatcaaaagccttactcatgtccaatttcatagccacaaaacctttgttacctctctttctatttttgagtgaatgaagaacttcaaatgcaacaagcacattatcagtaatgagcctttgtgagagaaattcactttgaaattctgagataaccaaatgaagaaaaggttgcatccgtagtacaatggtctttgagacaagtttatacaagacattgcatagacttataggtctgtattgagtgatcttggtaggctttttcactttgggtatgagtgtaatcaatgtacgattgagcaaggttggatcacaaccattgttaagaacatcaaggacagcagatgttacaagagaaccaaccacagaccagtaattagtgtagaacatcactgacataccatccaaaccagggcttctatcttcagacatggattttaatgcatgataaacctcctctgctgtgtatggctgagacaaagaagcttgattttcttgtgaaatagtagttggaatggtggaaagcacggcctcaacagcaacctggtcaatgccttgagaagaaaaaattacagaaaaataatcagcaatgattcgaccaatctcctgactactggtttgagtaacaccagtagaatcttcaagctttttaatacgattattggagtttctgttattggcatgttggtggaagaacttggtgttggaatcacccgatttcaaccaagaaattcttgacctttggtgccaatatgtttcttcttgagagaggagttcatccaaaatggcttcagagttttttagagcagtaaaatgtgatggagaagtgtcagctgaattctgtaaggcagctacatgctcatgggatttctttatttttttcttcatcttaccaaacttttgatgatgccaagtttgcaaatgtgatgcacaggaggccaaattgctagtaagttggagaatatgatcaggtgaatattcagcccattgcctctgaattatgtgtagacattcatcctcttgaagccataatttctcaaatcgaatcttgatttgaaggcaggttgttgttgcagctcacgaaaatccaaaacatgagttttcaaggcacggtgatcagaatggtaaaagtcgagatgctgaatggttagaggttgaaaattatctgcccaaaattcattacaaaatccataatcaagcctttccttgacattcccagcaccttgacatttattagtccaagtacaaagttcaccttcaaaaataagaggggtaagatgacatagatcaatggttgattgaaaagcttgaatttgatgttggtttcgaattggaccaccaatcttatcattgtttgaaagaacctcattgaaatcacccattacaagccatggtctaagaggagctatatcaaaacatctcttcagtagtgtccatgtatgtattcgttggttaacttggggatgaccataaaaaccggtgaagtgaaaagaatgaccactatggagttcaacaaaacaatcaatatgattggaagagtagttattaacttcaatgtcaacatccgatttccatagaagcataagaccaccacttaaaccaattcgaggaacttcgataccattaggaaagtgcaaactgtttcgaaatttagaaatactaccagattgtaattttgtttccatgagaaacaacacacagggagcttgctcagaaacaagcaagcgtaaatggcggaatgcagtcgggttccctaacccccgagcattccagcttaggatattcatggcgaaccgcagcgatcatcatcgatcactgcggagttatcaaaaagatgctgaacagaatccaaagccgttgcagaaacttgtaaagcattgggagaggctgctgacgaggtggatgcaattggagaagtgttgttcgaacgacaacgtttaagaaagctgcgaagggagtcagattccccctgccttttagtgaccttattaggattaatgttttctttggagtgtaaggttgtcgactgaacagaattgccgaattgaccactttgactattagaatgcctcgacaaatgaggaaggattgtagtgacagtaggagaagaatataagggtgaggggtgagttatagtattgatattgtggggagtgaaaggagaggatacagtgtgcgaagatggaggataagtggcaaaggatggtgtaaaggtaactagagtgttggagggtaaagacagtggtaagtatgatggaaatgggatttcagaaatgtcattttcattgttgtgggaagtagggtgttgttggttagggagatgatgattaatggattgaaatccaaagttgttgtttgttatagtatgagcagaagactcaatgtcggttaatgggaaagaatgagatggtggtcttgatgtaattttaggaacaacagcagcaaaagattttttagcaagtcttgtcattaaaggccaagcattaccctttccaaaatcagtcctatagcgatcatagccagagtatggtaggggagatcctaagagatcagggccataagaaagggatggttcaattccattgtagagttgatcaaggaaaacagaacaactttcaaaaggatgtccaagaaccccacattcaaaacaaaattcagggagacgttcataccgaaattcaacccagaattcatctcttgagtcacgaatcttaaccatcttgccacgaagaagaggttttgagacatcaatcaaagcctgaaaacgaagaaaaggtccccatccttcattcaaagaatcctcatcaacttctaagaaggatcctacaatattaccagcccagacagcaatggctttagatttactgagaaatggcagacggtgtagttgaatccaaaatggagagtaatgcagagattcttctgtgatattttgcaaagcagatggggaggccaatacaatatggtgattctgaaagtgccacggttccgtaataaggatcatttttttatctcttgggcatccgagagtgaccataaagagtccagtgtgatgatcagagatggtaactgggtaccgtcctttccaaagcccgcacattttgatgcgaaaagttttacgattgatttctttagaggacagaacacgagcaaaaagggtgatatcatcatttccagtgtctcgtaaattgactaaagtaggaagttcaaggacttctctctcaagatcagtaagagagatagaaggcctagttgaggaggtttcgtgatgcatgaattcggtcataagaggtacaaacagaggaaagtgaaggaagatagggagaaagaaacaaggaaaaaaacctgataaaaaacggaagaaaccaggaaaaaaaactgcaatggaacagttgaaaagaagaaaaaacagttaaaaagaataaactgccacagagctttttaagggcatacactcaactgaaaaatgtataattatatgaaaataaataaattaaattatttatacattgtatgataaagttatataatgtagggtgattctacaatgcactcccttaaaagggatgtactgatgcacccttaacttgtttcggcatctagaaaaatttttttgtctaa

SEQ ID NO: 115261 - DNA, 2918 bp, Cannabis sativa
atcattcttatgtcttaacaaaaacacccaaactttcctactaaaatcatctacaatggacaagaaatattgtttacctccttgagtttttaccttgctagctccccacatatcagcatgaatatattgtaggacagattttgctctgtaattgctatttgagaacttgatcctatgttgctttccctgtacacatatttcacaaaatggtaggttagcaagagtatagttctgtagtaaaccttgtttagataactcaactaaaccttgttcaccaatgtggcccaatctagcatgccacagtttcgattctgagttacacttatcaacagcagcagcttgtgctggtgtgacattttttccatcaaggtgataaagaccatgtcttttgattcctttcagtactagcaatgaacctttagtaatcttgagtatccctttgcttgtcttgtaatcacatccttcatcatctaatgttcccaaagaaattaaatttcttttcaaatctggaatgtgcctaaccttgtgcaaggttttgaatgtcccacatcaaaacttttttttgacaatagaaccaattccaactacactgcatttgtgatcatttcccattacaacattgccaccatttatgatagtgtaatcatgaaccagtccctatttggactcatgtgatatgtgcacccactgtctaggatccaatcttgatctttgagacaagaactggtgcaagcatcaccatcagttgatctctcatccttagtttcattattgatgactgtaagcacatctccattagaatcttcaattactgcatttgaatcattgttactgtcctcttcttctttgtctttttctttcttttatctcttaagtcccaacagttcctaatcaagtgtccaactttgccacaatgatgacacttccttgtttccctaggtcttgatttcaatcttgaattagacattgagtttcctctgatctcgagcttcctcttcttggtaatctgcctcgaaccattacaacatcatcagtttttggttctagcttagcaactctttgccaatggaactcagcatcccttgatctgagtgtactcataatatcttccaaggttaaagtatccctgctatacatgatgacagttctcatttccttaaattggtcaggtaaagcattgagcaaaatcactgcttgatcctcttcttttatggtttcacccatattagtaagagccaacacaatcttattaagttcagcaagattttaatctaatgtaacagtagcattcattttaaatccataaaacttccctttcaagaaaatctcggttgcagtagatcgagccatgtacaattggttgagtttactctgaattccaagagctgtcttctcaccaatcacctgcctcagtacattgtctgcaagattcatgacaatggcaaatcttgcttgcttcataatagtatctgattccttcttctgggattcatccatttcctttcttcttgatgtcatcagaaccaagatcttcatctaaggctgagtctaacttcagatagatcagtattgctagcatcttttctttccacaaattgaaatcacctttgccatcaaatctttctaagtcaaaactttttgatgaagaaaccattgcagcagcttctctggtttgatatcacacggtttgagttccagaaattcttagattcttcctggtgctttgataacactatcataatctaacaacataaactcaaaccaattattgatcaattaatcaacatgtaaatgagaaattgaataagaaattaaacaagataaataagcaatgaaaaacagagagaaaaaataaaatttatcctggttcggatctcaaactttgagtcctactccagctctcccccaaggagatttctccactatgaatcagcaattacaaacaccaattatactgcaaagcattcaagaacaatcacagttagatttagctctccaacactcaaaactagagcaatcctattagccaatcctgaacttgatccttctttctgcataattctcactcagcctctctctctgtatctttctcactttctagcgttttctattgaatacaatgaggagctttatatagtgttagtagctgacatgtccaacacttagcagttccgccaaatcggtttataactaactaactgacttactaaaacaagaaagtctgtaactgaaatatcagttgaacgcaaccatatttggagaaaaaaccggtttagtttaaaatggattatcttccacattacaattgttcacaactttattcaaaccattctaaatttttccttgccattttcttaagcattacactctaaattctactcttaagatcatatttaattctttttacaattacatcaattttataaattttcatattctaaagagtttcattcctgcaccatcatatgtggtaggttatcgttgctaaagttgctgaaaaaaaattagcgcttaaatttgttcattttcaatctatgcagctactatataatagcctcaaaatcgatactactatagttttctaattcatccacttgtttacttaaatattagtgttattatgtcatttctgtctatatggtttgatatgttaggagggactatatttattttgtaaataactaatttagctagttttgttagatctatgtgggtaatagaatattaaaaattataagatattttttttgaaatattataagatagttaaaatttgagtcatataatatactacatatacttttatacattacattggatagatatctaggtagacataaatgtaatgtatgaaagtatagtatatattatagggaaatttacatcgtatactaacttttgtcattttcttacaaaaa

SEQ ID NO: 115262 - DNA, 2553 bp, Cannabis sativa
  modified_base (38)..(44): a, c, t, g, unknown or other
tgtaccccgagacccatctaatgtaccacggaatacannnnnnnaaagtacatcacgggacaaaatcgtatccctatatatatatatatatatttatataaatttgatcatatatatataataattagctaggatgtgtaaatgtagctatagggtaagtacgtgcaatatacggctctatattattggtaattatgttattaataattataattatatttgactatatatggatagaaattagattcatgaattattattaacattagtttttcgatcattatataggtgcattgtttggagtgggaactaattaacttcaattaataaaagttatcaaaaggatgattaattacacgtatggtatggctgtaaatataattatatatatttgtgaacaacttttcttataaatttctagaaggaaaaagtttaatttgaagaacaaaaatcactccaccaacttagagaccaaaaaataaccacctatgatatttttgcatctatagatataagggtaaatcactactccacgtatttttaaagatgtatttcgtaaaaataatcgattaaattatctagtacaagaatgtgtaagaaataaaatctgtttgatcataaatacaatcaggtctgattattattaaattttattttgataaaaattaaactcaaagcactattttaaaaaatacagaatctaatttttcatttaataaaataaaagtcaaatcaattattttttttaaatatatagtctaaaataatattaacctatataaattacgtaccaaaatactaaatttgattgttaattattattagaattcttaaatctactcgtaaaatataaaaaatttaaaaactttcaaagctatatatataaatatgttattacaagtgtttaaaacatagatatttatttttttaaaaaaaaaattgtaatgatttaatctcgaattttggcttaaaatccaaaactgccacagctccactaagtggagtggtgtataaagagagcttggatatatatatatatatatatatatatttatatatatttctagtatatatataagaattgaaaagtgaaaaatttaatactatgatataatatatggagacaagatattttgaggtagttgtttcactaaattgaaaatggtaactaagtaattaagcaacaaaaaatatgtggttgatataaaggcatctcttcacaggggatggaccacctctattcactagccatatatataccaatttaattagagttatatattatatataaataaattaatgtaactatatatatatatagaccacatgtataataatagtatgaagtatgaacttgttttcttaaaaaaaaaacatgtataataatagtatactatcaagtaccaaccataccaactatctaatattcgtggtaaaatattttctttttagttacaataaaatttatggctaaaaataaaaataaaaaaaataaattataaattattattctcacgttgtgactaaaaagtttgtgattaaaagtatttatcacaaaaatcacaatttattatgactaaatatgtttttagtcataatattttttatgatttaaactaaattagtaataatttgtatgtaaatactatattttagtcacaaataatttttcttcgtgactgaaaatcacatttaatcataaaaaatttatctttctactaaaaaattgttactgtaattttttttagtgattttctgcccaatatatatgtatgtattatatatatcttaaaacttcactacacatatttactaaacttagctatatgtaacttgacagctaatacaaatatataattatttaatatgtgaaaatttaacatcatatataataagatgtataaattactctttttattgtcaactaatttagagatatacaaaacattgtacaccttaacacttccatattaatattttatgaattgaattttgttggaaattatgtatcaattttttttacaatcatgtttatcaaatcatgggcatgctcatggcaaataataaaaaccattatttgtattgatatttgctaattaattatatatatatatagctgtactatatataattacattctaaagacaatatcaactatatttctaaagtaacaaattatcaaaacttaagtaaataatatatagtgaaagaatatcatatttaggcacatatataattgatgatgtggaattttatttaccacttgttacgtacgtacagtatatacattatatacgtgcattacacggtatattaattatatacgtatacagaaaatatatatataaagaatcttcgaaatgccctttaaaaaatgagaaatatatatataagatatataacatcacatgcatatgcatatgccacaataaagaaagttccttttattttggttaattatacatatatatatatagggacaggatttggtcccgttatgccaaaacagggaatacaatccgtgattgtactgtagccgttggattaaattgg

SEQ ID NO: 115263 - DNA, 3333 bp, Cannabis sativa
  modified_base (3281)..(3285): a, c, t, g, unknown or other
ttatgttcttacatctgccaagtttgacaagctacagctttctttctcatttcaagttatttcttcaatattcactgaaaaagctctctgcttatttttacatgtgttgtgtttaatacactaacatatcaatctattgacaaaattagaataaaagagtataattttactaatattgtgtagctatgcttctagatataattattgagttttatcgattacaaactcaaaattttaaatactcctacgataaatattcacaataaaatggaccctttttaatttgtttcttgttaaaatttcttaaaagagataatggagaagaaatgccaaaatgcatttgttgtacctagcactatttatatgtgtcatactattattagtgtaattaagtattaagtttcacacataagttaaattaataactattatgtaatatcaataagaggaaagatcagtaatatttagcactctcttacgtgtcaatctctattgatataattatatatcaagtctcatataatttaatgtaataattttaaaaaaatattattgttaactaattataaagtgatacgtattaaaatgtacaaaacactactaatacttaacaacaattacttataagtaatgctactacggatacttaattagcaatgctttagctaataataataataagatttaatagttagatcattttattgggtgttgtgtcttataataattacatcacaatgataaattatctaacgatctcaactatatattcctagttagatcgttttattcatttgtagtttttataacatgtactgaaacatataaaacggagacataacggataagagcaatagaaatctttccttaagattgactaactttattaacattggtatcccccttataataatgactaaattagagtatacagatctttacccccttccaatgccactttacaattgcatgtccagctcatcctttttaatactatatacaatattctttatcctatgtatactatcatgcaaatatattactaaattattaaatatatataagtactggtgattacttattagtcacactagctagcatcggcatgccaagtgccaacaacgaccaccaaatcacagaaaagaatcaaatgaaatactcaattaatacaaacagcaatatcctttgttgtcattacaagccaaacccaaagccaaaatcaaatatatcaaagtagatcttcatcatgatatataccctcagaaagatgacacaaactcactcttgcttatttgttcatcattacagaagtaaaagagaaaaaacactcgaacataaggaatcaacaatcaatgtaattttgttgcaaacaaaaaagaaatgacaaatcaaacttataattgtatatgaataaggtttaatcaatcatcagtggtgtcgatattgaaaattcgagcacaagtataaactgagcaaaatgcttgcaaagccatcaaaagcaacatcaaaacagcagccaacaaagtgaggaacttccatgaattaagcacgtaaagtttcatgacctttccaaatttaaccttccatctcccgttgtgatacttgttcacatcttcaatgaccttatctaagaagggtactttagtcaatctaatggacttgctcatcccattccacaagttagctacttctttatcactcttcaaatggttcataatgatacctctttctctaagtagttttacatcttcatccgtatcaataatcccattcattaactcagtgtaacgtgtaaaaaccaacggcccagatgcattagatacttcataagcaactaagtttctcattatggcctcggcattgacgtctaagctaacggcagggaggtaaagagtaaatgttttgacgtcaaaagtaacggttgagaggttaccgtttgttggcaagaattgaacaccagatttgaagagctcactcacggtaggaataaaaatctcttcaatcaatggtggcttgttgttaaaattctcctcttctggtttaacttcttctttgtctacattgaaaaacaagtactcaacgggcgttttaaggagtttgaatccaggaagattggacaagattttccatggcagtagcaaaaatagtttaactggtttagagaaaagtaacctcttaaggagacgtattggacctttgtttagcttggaaaccatcttccaaattatagaaagaaccttttttacagagttagtattattgaaaaagctttctttcccttcttcttcttcatgatcattatcatcgctactttgatcctccacaacctgaattacttcatcttgtcgtggttgaagtagtttcattttgggtgtgatcatgtcgtataagaagtccaacaagtgagcacattctgagacatcaatttcagacaagtcttgattttccatcatcttgaatggagaaagctctttgcaaaatcccaccaacatggcaaacaacatgtcatcagcagcttctagtgacgaaaactgaaattccaatatttttcttaaaaggaataatgggatttggttttcaagcataactaagtctcttattatagcgttgtgagctgactttctccctgtgtagtcaaccaagtgtgacatattccttgaagagaattgagatggtctaacccttccttctttcatggcataaacttgaataaattcaagaacaaatgaggcatctatgaccatcatccaagccaatgtttcgccactgaagtgtaagtacttgtggtaacaagctcgaatcctgtgttcgtggtcgatcaattcttgaacaatatcttgaaacttatagccagattggaggagtgtttgagctcttctggctgaggatagcttgtacctttccatttcatagagctctggtcgccaataatggtaagggccaatggctacttcttgtggtgtgtaggattcaggatcacttgcctttagaattgttgggacattgaaaattgagacaggaacttcagtatcatcatcttcaagctcttcgtctagtgttcgacgaatttgcttaacccatatatgctcattgaagtttgtaggatttgatttagaggaaatggagtgttggattgcaggcattatttactgttatgtcttatatgtttcaagaaataataacaaagtgattgaatttgatatgtttcggattatatatatatattgagttgtgatgaagtttggaatatgttatgagactttatatatatatatatatannnnnactaggtgattgttacgtgtcaagccacgtagtgttagttttatttaa

SEQ ID NO: 115264 - DNA, 3662 bp, Cannabis sativa
agcaaagaactatccaatcaacccaagttttaataaaaccaataaaatttaatgtaagcccaattaaaagtctaacatgatattctttgagttaaataggtacaaaatgtttacttaaaagaataaacgttttagccgcacgcacacgactagcattagaagaaatttctcaagcatttgaagtaggctctcaattctcaagcatagattcatactttggcattggagatgatgtgtaaatttttaacatatttaagaatactactattagaaatgcttttagcggacaataatctaataaaacacatcacgtgcgaaaatgccttagaaaagctaactaatattgcctttaaaaaaagctagataaaagaaggctaaaatctgaaaaagtaacaaaagaaacaaactaacaaattctaccccatcttttgatctttcccaccaaaattaaatacctacaacaataatagaaataaaaatgtattagacaatgtataaaaatagaaatgaatgatatgaattgtgtacttgtatgataaaaattgacagtgtacacgtttgggtagtcagtgatacgtcattaggataaatatacaagactaattttatttttttttttttttgaaaaggaagactattctattcaatttgaataattataataataataaataattacattataattaaaaaaacagcatataaagtgaggtagtctgggaagacactcctttcagtttctgatttgtgcagctgagaaggacaatcccacacaatgaatcgtatcagtactcttcttcgatccaaccttagaactcaggtactcttattcttcttcttttttcaattgattggtttggattttctgttgaatttcgacctttgtttgttttccctatggatcaatttctgtgtttagattcttctaaatattcctctaataaacttttcttttggccattttttattatttttttaacttttacacactgttgttttgctcctaagatggaaaagcttgaaattctgttatctcatttgacttttcttcctgttcttttcacattgttgcatggtatctgattatagatcattgctgttgtcgataatatttaaatagttcttttgaggtcaaagtgcttttgcacatcttgctatagatctatgttgatttggttctaaaaggtactcaacttttttgtttagatgctaagaagaaaaatataggtgaaaatgggaaaaagaaaatgtgtgtaagccgtgcttttattggttttgttccattacctaatttttgcgttgaactatctctgggtctttttataggtctcaagataccatcgccatgatatttgcatcttgtgaaagtcaaacatttaaagtcttacattaatttttctttgacataataacaaatcaagttgccctgaaatgagtggttctacaaatttaattgaccatttattaagaaacagatttttcttacactgaatgcttcagaaattaagcatgtcttgcttagataaattatggcgcatgtcatgcttggatgatatcaacgtttctatagtagcttgattcataagggtattaagtgcatgtgatcttttatgtagtataacatatgtaaatagcaatacaaaaacatgaataggcaaggtctactaacttctctctgttttagctactgtgctttactgctgctcatccaagatttctttgtgttaccaatcaatctggtttgtattcgttcagcttggttcgtgcacgaaatatgctgttgcttctagacttctgcaggaccatattcttcaggtttcctcattcgcccgacattacagcaccgatgcatctgtccaaaaggaagattcggcaactgatctgaaaagtggaattgaagggtaacagatgcttcattaatttttctttgttataagtttgtatctatttaaatgtgcatgcttagacacaatttctgaaccagtgtgcgtagtttaacgtttttggatttttcaggttcaaaggccatgatatgcttgcacctttcactgctgggtggcagtcttctgacgtgcatcctttgatcatagaaaaatctgaggtgaacttcataaagttatcctttacaataaaagttcatatgccttaactattctggagctgtttgtcttgttaaaatctataacttacttcattatggtttcagggttcctatgtttatgactctaatggaaagaagtatcttgatgcacttgctggtctttggtgcacagcattaggtttgcctatgtttgttgacattttctatttcttggcttgttatttgcttcagtgttgttttttaattagataattgatatagatattctttttttactttcaatgcttttgattgctacacattttattgtatttactaatctgagatatttacagggggaaatgaacctcgacttgttgctgctgcaaccaaacagttgaataccttgcctttttaccactccttctggaatcgtacaacaaaaccttcattggtatccattcactttacatgttcatgtcatttttaaaaaaaaaaataaatcggaaaagctttttttttttggtcaaaattacaactacaatcctgtaccaatatagttacagttacacaccctttcgatagtcaatttttctaagatatactttggaacattatatattcatttagttgtttatattaaaatagaaattacttttctttgtacttttttttacatgctctttgcatgatactgagttattatttcatcttacaggatctagccaaggaactcttagaaacttttacagcaagcaaaatggcaaaagctttttttacgaacagtggatcagaagccaatgatacccaggtttgtcagtttgtacatcatgtcaatatggctgtgtcagtagttggtgtgaattatgtcactatgtaatgttctggtgcttgatttagtgcttggagaagaatgtaggtgaaaactgaacgttcaattaatgttaatggtagagaattgtgaatagaattgtgtgttgtattccatagaatagtatatatttatatacaaagctaggagactaaatgaaaaactactaaatacgatttattctaatttttacaactaatattctaacactccccctcaagctggagcatagatgttaatcatgcccagcttgttacaaagataatcaacccgcaccccattcaaagcttttgtaaaaatatctcctatttgttctccggtcttcatgtatcctgtggagatcagaccttgttgaattttctcacgaacaaaatgataatcaatctcaatgtgcttagttcgttcgttcgtttaacacacgatttgaggcaacatgaagagcatattgattatcacaccacaattttattggaatagaaatcttaaactcgaattcaatcaaaagttgataaatccatattacctcacacacagactgtgccatagctctataccctgattaagcattggatctaaacacaacattttgtttcttacttttctaaaggattagattgcccccaacaaatacacaatatcctgaagtggatcgtctatctaccctggagtctgcccaatctgcatcaaagaaacacttaatctgggtatgtc

SEQ ID NO: 115265 - DNA, 2111 bp, Cannabis sativa
tttaacatagtattatataaaaatatgacatataatccaattcaatataatacaatacaatacgacctaatatggcgttccaaaggagccctaaatgtatacatttatacataagaaattaagaatggcctcataattgttgctgccttattaatcccgatttcacacatatatattgaaattatgtcttttatttttctttttgtgaatataaattatgtcttcgttattttcaaggaatctagttttaaatatataaataaatacacattattttaataataatattaataatgagaggagagagagaccggtgagttcagctaaaacagtatcttagtgataataatgtattaacaaagtaaactatttggatggcaatatcatttgacttgtcttctacaaattattaatgagtattaggtctactaattgaagtcttaaccaacttttttgttttctcttacaacgtaaacgtcatatataaatatatcaaaataaaacttaattattgaaatttacaaattcactcattattaattaataatatatatattttgtggcaatgaacaatttcatctatttaataatataatggtacatatatataatatattcagaagtcttgggcaggcaaagccatccagctttccttcacattgaaactactactctatttggttcaccaactgccaacaaacacaattttgccacaaagtcctcaaattaattatatatgtttattatagttttcttattatttattttcctttctcatttaggagagtagaagtttttgttgtagctagttataattagttattatgtagtagctaatattggtacggtaagagatgtaccaaccagtgtcacaagaagaagcacaaaatgaataattttgtcttagaagagaagtttggggtgaagatatattgaagatgtgtattataggcccaaatgttatgtttgttggtgataagttgggaccagcataagcatatgtaatgtaacccaattttgggtccaatatcaatttcatccaattaccaaacttgatcgatcgttgcttttgctactcctcttttatgctcttttgttgcgtaaacaacaaaggaagttcaaaatgtgaccgaatcatcctggtaactttctttttttactagtttcatctcataaaagtacctatttttcattttttttttatatatatatatatttattttcttgaatttttatttttgtaatttattagttataaaaaattttaaataattttttatgtaatattttgaattgaacagttactcaaaaaaatctgaaaaaaaaagtctttgtaaattttaagttatttaaagaaggtaataaccaacaaaaaaaaaaaagatgttaccgataaagttatatattttacttattttatagctaaatatgaggctatttttgcttcttattgttgtttgaagggatcaatttgttttgtctcatatttttagagtttcttatatactcacatatatgataaatatagtttgaatatgaagtatttttaatttatttttatcaaatgcataaaataagtttatttatatatttttatgattataatgaattaaattataatatgattatcgttataatttgaattttaaaatttacagtattttaaaatttatttattaccaaattacattagtaatttttttatagcttacttacaggtatttttctttacaacacaactagatcagactgttcataagtaattaggttgtggctgtcactttgatgcaataggtaattacttttttttttgcttaactactttttagtgttttaacttattattttctatttttttttttctggtgataaatttgcctctataagtaattatcaatgattatgaaatctggctatataagaagcatagctggtcccttcataatgtaatatctctctctcgtaagctctctaagatttattaccttttattattttatgagtcacttgcttttatatgcaaccaaaaaaaaaaatattcggatgtgtgcctcctttttttttttttttttgaagaaaaagtgttttttattaataagagctatcgccca
